United States Patent Application Publication US 2007/0214517 A1 - sequence listing, part 69

SEQ ID NO: 89723 - DNA, 3769 bp, Arabidopsis thaliana
  misc_feature (1)..(3769): Ceres Seq. ID no. 12720213
  misc_feature: MA Experiment ID: 20000185 Result: Up-regulated in Transcription
  misc_feature: MA Experiment 20000185 PARAMETER Experiment Name: At_Roots__P Parameter: Age (day) Value: 7 vs. 21
  misc_feature: MA Experiment 20000185 PARAMETER Experiment Name: At_Roots__P Parameter: Organism Value: A. thaliana
  misc_feature: MA Experiment 20000185 PARAMETER Experiment Name: At_Roots__P Parameter: Tissue Value: Roots vs. Whole Plant
  misc_feature: MA Experiment ID: 20000438 Result: Up-regulated in Transcription
  misc_feature: MA Experiment 20000438 PARAMETER Experiment Name: At_Shoots__P Parameter: Age (day) Value: 14
  misc_feature: MA Experiment 20000438 PARAMETER Experiment Name: At_Shoots__P Parameter: Tissue Value: Shoots vs. Whole Plant
  misc_feature: MA Experiment ID: 20000439 Result: Up-regulated in Transcription
  misc_feature: MA Experiment 20000439 PARAMETER Experiment Name: At_Roots__P Parameter: Age (day) Value: 14 vs. 21
  misc_feature: MA Experiment 20000439 PARAMETER Experiment Name: At_Roots__P Parameter: Organism Value: A. thaliana
  misc_feature: MA Experiment 20000439 PARAMETER Experiment Name: At_Roots__P Parameter: Tissue Value: Roots vs. Whole Plant
  misc_feature: MA Experiment ID: 20000441 Result: Up-regulated in Transcription
  misc_feature: MA Experiment 20000441 PARAMETER Experiment Name: At_1uM_BR-BRZ__P Parameter: Tissue Value: Shoot Apices
  misc_feature: MA Experiment 20000441 PARAMETER Experiment Name: At_1uM_BR-BRZ__P Parameter: Treatment Value: 1uM BR vs. No Treatment
  misc_feature: MA Experiment ID: 20000443 Result: Up-regulated in Transcription
  misc_feature: MA Experiment 20000443 PARAMETER Experiment Name: At_1uM_BR-BRZ__P Parameter: Tissue Value: Shoot Apices
  misc_feature: MA Experiment 20000443 PARAMETER Experiment Name: At_1uM_BR-BRZ__P Parameter: Treatment Value: 1uM BRZ vs. No Treatment
  misc_feature: MA Experiment ID: 20000794 Result: Up-regulated in Transcription
  misc_feature: MA Experiment 20000794 PARAMETER Experiment Name: At_Petals_P Parameter: Age (day) Value: 23-25 days
  misc_feature: MA Experiment 20000794 PARAMETER Experiment Name: At_Petals_P Parameter: Plant Line Value: WS
  misc_feature: MA Experiment 20000794 PARAMETER Experiment Name: At_Petals_P Parameter: Tissue Value: Petals vs. Whole plant
  misc_feature: MA Experiment ID: 20001450 Result: Up-regulated in Transcription
  misc_feature: MA Experiment 20001450 PARAMETER Experiment Name: At_Far-red-induction_P Parameter: Age (day) Value: 7
  misc_feature: MA Experiment 20001450 PARAMETER Experiment Name: At_Far-red-induction_P Parameter: Light Value: Far-red vs. White
  misc_feature: MA Experiment 20001450 PARAMETER Experiment Name: At_Far-red-induction_P Parameter: Organism Value: A. thaliana
  misc_feature: MA Experiment 20001450 PARAMETER Experiment Name: At_Far-red-induction_P Parameter: Plant Line Value: Columbia
  misc_feature: MA Experiment 20001450 PARAMETER Experiment Name: At_Far-red-induction_P Parameter: Timepoint (hr) Value: 8
  misc_feature: MA Experiment 20001450 PARAMETER Experiment Name: At_Far-red-induction_P Parameter: Tissue Value: Whole Plant
  misc_feature: MA Experiment ID: 20001556 Result: Down-regulated in Transcription
  misc_feature: MA Experiment 20001556 PARAMETER Experiment Name: At_Drought_Soil_Dry_P Parameter: Age (day) Value: 26
  misc_feature: MA Experiment 20001556 PARAMETER Experiment Name: At_Drought_Soil_Dry_P Parameter: Organism Value: A. thaliana
  misc_feature: MA Experiment 20001556 PARAMETER Experiment Name: At_Drought_Soil_Dry_P Parameter: Plant Line Value: WS
  misc_feature: MA Experiment 20001556 PARAMETER Experiment Name: At_Drought_Soil_Dry_P Parameter: Post Timepoint (hr) Value: None
  misc_feature: MA Experiment 20001556 PARAMETER Experiment Name: At_Drought_Soil_Dry_P Parameter: Post-Treatment Value: None
  misc_feature: MA Experiment 20001556 PARAMETER Experiment Name: At_Drought_Soil_Dry_P Parameter: Timepoint (day) Value: 12
  misc_feature: MA Experiment 20001556 PARAMETER Experiment Name: At_Drought_Soil_Dry_P Parameter: Treatment Value: Drought vs. No Drought
  misc_feature: MA Experiment ID: 20001904 Result: Down-regulated in Transcription
  misc_feature: MA Experiment 20001904 PARAMETER Experiment Name: At_Drought_Reproduction_P Parameter: Age (day) Value: 37
  misc_feature: MA Experiment 20001904 PARAMETER Experiment Name: At_Drought_Reproduction_P Parameter: Organism Value: A. thaliana
  misc_feature: MA Experiment 20001904 PARAMETER Experiment Name: At_Drought_Reproduction_P Parameter: Plant Line Value: WS
  misc_feature: MA Experiment 20001904 PARAMETER Experiment Name: At_Drought_Reproduction_P Parameter: Timepoint (day) Value: 7
  misc_feature: MA Experiment 20001904 PARAMETER Experiment Name: At_Drought_Reproduction_P Parameter: Tissue Value: Rosettes
  misc_feature: MA Experiment 20001904 PARAMETER Experiment Name: At_Drought_Reproduction_P Parameter: Treatment Value: Drought vs. No Drought
agagagatacatattcaagttggttgaaggaggagaattagcggttcatatcagtacggagaaaattgtcagtcatatgctttttttctttaaattctgcatttgagtgggtgtgtgcttttaaccattttggtgatttatcaaaaaaaaaaaaaaaattctgtgtgttttgagctcaagctctctacaaattttgctgtctcaagtttttgccttttgaagtccaataaagttgaaatctttgttctttttgattggtcttcgtgaattccggtgaaagtttcaaacttttgatttaaattccggggaggaattagggtttatgaaagtaaaagaagaaactttgaagaatttgggagatggagtggttttaagacctgttgatcattgttctagcatttggagtatgaagatgaacatgaagaactttcttaagaaacttcatatctcgcccaatcaatcagatgaagctgaaggatcaatttcaacaactaagagcaatcatcataagtctatcgatgtatcatcatcatcatcaccgaggtctcatcacagcaatagccctgaaatcaaacctttttctggtttatctaattggttaagttctgttggtcatagaaaaatccctagtcctcctaattctttcaatgccaagaacagagccgccacggttgatgacactgttgttgttaatgggtcagaacatgtggatttaggttccaaagatccagctgttgaagaagagaatcagatacagttggctttagagttaagtgctagagaagatcctgaggctactcagattgaggctattaagcaattcagtttaggctcttgtgctcctgagaactctccagctgaactcatcgcttatcgctactggaattacaattgtcttggctatgatgacaagatcttggatggtttttatgacttgtatggagtgttgaatgcatcctcagcagaaagaatacctcctttgctcgatcttcaagggacacctgtttcagacggtgtgacatgggaagctgttcttgtgaacagaagtggggattctaatctgttgagacttgaacagatggctcttgatattgctgctaaatcaagatcagtttcttcctctggttttgtgaatagtgaattggtaaggaaactggctattttagtgggagattacatgggtggaccagtcgtgcacccagagagcatgttgagagcttggaggagtcttagctatagtttgaaagcaactcttggaagcatggttttgccacttggttctctgactattggtttggctcgtcaccgagccttgttattcaaagtattgtgtgatagtgttggtgttccttgtcgaatagtcaaaggtcagcaatataccggttctgaagatgtggcaatgaactttattaaggctgatgatggcagggagtacattgttgatcttatgggagatcccggcacgcttattccagctgatgcagctggactacaaatagactatgatgaatctgcctattccgctagtcctggagacaatgattcaattcatgtagcttcttccagcaatggtattgaaagctcatatgaagagaatacagagtttcgaacaggggaacatcgttctagtaccaagagttctggggagagaaaccaatccggaggtggaggcgatctcattgttcatccaaatatttctagagaagatgtgaaaaatcagaagaaagttgaaaaggctccatttcaaaatctgtctagcaggcctattcattctttcacccatatgagatcaccttcttggactgaaggggttagctccccagctgcacaaaggatgaaagtcaaagatgtttcacaatatatgattgatgctgctaaagagaatccacggttagctcagaagcttcatgatgtattacttgaaagcggagttgtagctcctcccaatttattttccgaagtctatccccagcaattggaggcaactgttgaaagcaaaaactcgactgaagccaagaaagagagaggaaaagatttagagacaactcaggaaggaagacaccaaaacggttttggtccagtgaggtttttgcctccattaccaagagtgcaatctaaaacaaatgcacatgatcaacgtgataatggcaaagttgtaagtcagtctgattcttcacattctgaagcatcttcgacagaatatgccagaaccgtccctgctgctgtagctgcagctgctgttgttgcatcttccatggttgctgctgctgctgccaagtctgcaaactcagactcctcccccatagaacttcctgctgcagctgctgccacggccactgctgctgcagttgtggcaacagctgcagccgtgtccaggcaacttgaattaggctcgaatagcgacggggatgatggttctggtgggcatgagcctcaaggtagtggggactctaatcatgggccaaattcaggaggggaaagaatatctgacaaatctattggcaatgaaagttctaagtcagactgtgatgatgtatctgactgtgagattttgtgggaagaaattactgtgggagaacgtattggacttggatcttatggagaagtgtatcggggagattggcacgggactgaagtggctgtcaagaagttccttgatcaagatttaacaggagaagcattggaggaattcagaagtgaggtccgaatcatgaaaaagctaagacatcccaacattgttctcttcatgggagctgtgactcgcccaccgaatctttcaattgttacagagtttcttcctagaggtagcttgtataggttaatccaccggccaaataaccaattagacgagaggaggcgcctgagaatggcccttgatgctgctcgtggaatgaactatttgcacagctgtaatccgatgattgtccatcgcgatcttaagtccccaaaccttctagttgacaaaaactgggtcgtgaaggtgtgtgattttggattgtctaggatgaaacacagtacatacctctcttcaaagtcaacagcagggacggctgaatggatggctccagaagtgctaagaaacgaacctgctgatgagaagtgcgatgtttacagctacggtgtgatcttatgggaactctttacgttacaacaaccgtggggaaagatgaacccgatgcaagtagttggggcagttgggtttcagcatcgacgtcttgacattcccgactttgtagatccagcaattgcagatctcatcagtaaatgctggcagacggattcaaagttaaggccaagttttgcagagataatggcgtctctaaagcggctacagaaacctgtaacaggttccaacatcccaagaccagtccccagttcctcttcattaccaactgaacatgaacaaaaggattgataacagaagaagacgaccaaagtggcaaacacatttttgacgaattcaatctgtttgaaggaaaaaaaagctacaaatgttccttctctgctactttttgcctcagcttcagtgtttgacacagcttgtgaattgtgaaaaagaaagattcatggaagatgacgattgaagaaggtgaaggattgtgctcgtgtgttttgttgtctttgcttgcaagcgatgttcatgttcatgcgtaatttcctctattttgttttccaatattgaaactgtacaaagagagaaagaaaaaacaattgacaaactcgtcgaaacgttgaccgaaaacatatattaaaaaaaatcattgagctc

SEQ ID NO: 89724 - protein, 1030 aa, Arabidopsis thaliana
  peptide (1)..(1030): Ceres Seq. ID no. 12720214
  misc_feature (748)..(1000): Pfam Name: Protein kinase domain Pfam Description: Protein kinase domain
  misc_feature (25)..(112): Homolog of NCBI NO: 32527767 NR Description: shoot regeneration-related mitogen activated
  misc_feature (33)..(552): Homolog of NCBI NO: 22326737 NR Description: MAP3K delta-1 protein kinase; protein id: supported by cDNA: gi_18700074 [Arabidopsis thaliana]
  misc_feature (711)..(1022): Homolog of NCBI NO: 22326737 NR Description: MAP3K delta-1 protein kinase; protein id: supported by cDNA: gi_18700074 [Arabidopsis thaliana]
  misc_feature (119)..(552): Homolog of NCBI NO: 11358502 NR Description: MAP3K delta-1 protein kinase - Arabidopsis
  misc_feature (711)..(985): Homolog of NCBI NO: 11358502 NR Description: MAP3K delta-1 protein kinase - Arabidopsis
  misc_feature (33)..(386): Homolog of NCBI NO: 7489058 NR Description: probable protein kinase TCTR2 - tomato
  misc_feature (736)..(1025): Homolog of NCBI NO: 7489058 NR Description: probable protein kinase TCTR2 - tomato
  misc_feature (139)..(446): Homolog of NCBI NO: 7488198 NR Description: probable serine/threonine-specific protein kinase
  misc_feature (139)..(446): Homolog of NCBI NO: 18390931 NR Description: putative protein kinase; protein id: At1g08720.1, by cDNA: gi_11127924 [Arabidopsis thaliana]
  misc_feature (696)..(1007): Homolog of NCBI NO: 7488198 NR Description: probable serine/threonine-specific protein kinase
MKVKEETLKNLGDGVVLRPVDHCSSIWSMKMNMKNFLKKLHISPNQSDEAEGSISTTKSNHHKSIDVSSSSSPRSHHSNSPEIKPFSGLSNWLSSVGHRKIPSPPNSFNAKNRAATVDDTVVVNGSEHVDLGSKDPAVEEENQIQLALELSAREDPEATQIEAIKQFSLGSCAPENSPAELIAYRYWNYNCLGYDDKILDGFYDLYGVLNASSAERIPPLLDLQGTPVSDGVTWEAVLVNRSGDSNLLRLEQMALDIAAKSRSVSSSGFVNSELVRKLAILVGDYMGGPVVHPESMLRAWRSLSYSLKATLGSMVLPLGSLTIGLARHRALLFKVLCDSVGVPCRIVKGQQYTGSEDVAMNFIKADDGREYIVDLMGDPGTLIPADAAGLQIDYDESAYSASPGDNDSIHVASSSNGIESSYEENTEFRTGEHRSSTKSSGERNQSGGGGDLIVHPNISREDVKNQKKVEKAPFQNLSSRPIHSFTHMRSPSWTEGVSSPAAQRMKVKDVSQYMIDAAKENPRLAQKLHDVLLESGVVAPPNLFSEVYPQQLEATVESKNSTEAKKERGKDLETTQEGRHQNGFGPVRFLPPLPRVQSKTNAHDQRDNGKVVSQSDSSHSEASSTEYARTVPAAVAAAAVVASSMVAAAAAKSANSDSSPIELPAAAAATATAAAVVATAAAVSRQLELGSNSDGDDGSGGHEPQGSGDSNHGPNSGGERISDKSIGNESSKSDCDDVSDCEILWEEITVGERIGLGSYGEVYRGDWHGTEVAVKKFLDQDLTGEALEEFRSEVRIMKKLRHPNIVLFMGAVTRPPNLSIVTEFLPRGSLYRLIHRPNNQLDERRRLRMALDAARGMNYLHSCNPMIVHRDLKSPNLLVDKNWVVKVCDFGLSRMKHSTYLSSKSTAGTAEWMAPEVLRNEPADEKCDVYSYGVILWELFTLQQPWGKMNPMQVVGAVGFQHRRLDIPDFVDPAIADLISKCWQTDSKLRPSFAEIMASLKRLQKPVTGSNIPRPVPSSSSLPTEHEQKD

SEQ ID NO: 89725 - protein, 1002 aa, Arabidopsis thaliana; identical to SEQ ID NO: 88587
  peptide (1)..(1002): Ceres Seq. ID no. 12720215
  misc_feature (720)..(972): Pfam Name: Protein kinase domain Pfam Description: Protein kinase domain
  misc_feature (1)..(84): Homolog of NCBI NO: 32527767 NR Description: shoot regeneration-related mitogen activated
  misc_feature (5)..(524): Homolog of NCBI NO: 22326737 NR Description: MAP3K delta-1 protein kinase; protein id: supported by cDNA: gi_18700074 [Arabidopsis thaliana]
  misc_feature (683)..(994): Homolog of NCBI NO: 22326737 NR Description: MAP3K delta-1 protein kinase; protein id: supported by cDNA: gi_18700074 [Arabidopsis thaliana]
  misc_feature (91)..(524): Homolog of NCBI NO: 11358502 NR Description: MAP3K delta-1 protein kinase - Arabidopsis
  misc_feature (683)..(957): Homolog of NCBI NO: 11358502 NR Description: MAP3K delta-1 protein kinase - Arabidopsis
  misc_feature (5)..(358): Homolog of NCBI NO: 7489058 NR Description: probable protein kinase TCTR2 - tomato
  misc_feature (708)..(997): Homolog of NCBI NO: 7489058 NR Description: probable protein kinase TCTR2 - tomato
  misc_feature (111)..(418): Homolog of NCBI NO: 7488198 NR Description: probable serine/threonine-specific protein kinase
  misc_feature (111)..(418): Homolog of NCBI NO: 18390931 NR Description: putative protein kinase; protein id: At1g08720.1, by cDNA: gi_11127924 [Arabidopsis thaliana]
  misc_feature (668)..(979): Homolog of NCBI NO: 7488198 NR Description: probable serine/threonine-specific protein kinase

SEQ ID NO: 89726 - protein, 1000 aa, Arabidopsis thaliana; identical to SEQ ID NO: 88588
  peptide (1)..(1000): Ceres Seq. ID no. 12720216
  misc_feature (718)..(970): Pfam Name: Protein kinase domain Pfam Description: Protein kinase domain
  misc_feature (1)..(82): Homolog of NCBI NO: 32527767 NR Description: shoot regeneration-related mitogen activated
  misc_feature (3)..(522): Homolog of NCBI NO: 22326737 NR Description: MAP3K delta-1 protein kinase; protein id: supported by cDNA: gi_18700074 [Arabidopsis thaliana]
  misc_feature (681)..(992): Homolog of NCBI NO: 22326737 NR Description: MAP3K delta-1 protein kinase; protein id: supported by cDNA: gi_18700074 [Arabidopsis thaliana]
  misc_feature (89)..(522): Homolog of NCBI NO: 11358502 NR Description: MAP3K delta-1 protein kinase - Arabidopsis
  misc_feature (681)..(955): Homolog of NCBI NO: 11358502 NR Description: MAP3K delta-1 protein kinase - Arabidopsis
  misc_feature (3)..(356): Homolog of NCBI NO: 7489058 NR Description: probable protein kinase TCTR2 - tomato
  misc_feature (706)..(995): Homolog of NCBI NO: 7489058 NR Description: probable protein kinase TCTR2 - tomato
  misc_feature (109)..(416): Homolog of NCBI NO: 7488198 NR Description: probable serine/threonine-specific protein kinase
  misc_feature (109)..(416): Homolog of NCBI NO: 18390931 NR Description: putative protein kinase; protein id: At1g08720.1, by cDNA: gi_11127924 [Arabidopsis thaliana]
  misc_feature (666)..(977): Homolog of NCBI NO: 7488198 NR Description: probable serine/threonine-specific protein kinase

SEQ ID NO: 89727 - DNA, 1525 bp, Arabidopsis thaliana
  misc_feature (1)..(1525): Ceres Seq. ID no. 12720236
  misc_feature: MA Experiment ID: 20000171 Result: Up-regulated in Transcription
  misc_feature: MA Experiment 20000171 PARAMETER Experiment Name: At_42deg_Heat_P Parameter: Age (day) Value: 14
  misc_feature: MA Experiment 20000171 PARAMETER Experiment Name: At_42deg_Heat_P Parameter: Organism Value: A. thaliana
  misc_feature: MA Experiment 20000171 PARAMETER Experiment Name: At_42deg_Heat_P Parameter: Plant Line Value: WS
  misc_feature: MA Experiment 20000171 PARAMETER Experiment Name: At_42deg_Heat_P Parameter: Temperature (deg C) Value: 42 vs. 22
  misc_feature: MA Experiment 20000171 PARAMETER Experiment Name: At_42deg_Heat_P Parameter: Timepoint (hr) Value: 1
  misc_feature: MA Experiment 20000171 PARAMETER Experiment Name: At_42deg_Heat_P Parameter: Tissue Value: Aerial
  misc_feature: MA Experiment ID: 20000184 Result: Down-regulated in Transcription
  misc_feature: MA Experiment 20000184 PARAMETER Experiment Name: At_Shoots__P Parameter: Age (day) Value: 7
  misc_feature: MA Experiment 20000184 PARAMETER Experiment Name: At_Shoots__P Parameter: Tissue Value: Shoots vs. Whole Plant
  misc_feature: MA Experiment ID: 20000185 Result: Down-regulated in Transcription
  misc_feature: MA Experiment 20000185 PARAMETER Experiment Name: At_Roots__P Parameter: Age (day) Value: 7 vs. 21
  misc_feature: MA Experiment 20000185 PARAMETER Experiment Name: At_Roots__P Parameter: Organism Value: A. thaliana
  misc_feature: MA Experiment 20000185 PARAMETER Experiment Name: At_Roots__P Parameter: Tissue Value: Roots vs. Whole Plant
  misc_feature: MA Experiment ID: 20000227 Result: Down-regulated in Transcription
  misc_feature: MA Experiment 20000227 PARAMETER Experiment Name: At_Root-Tips-vs-Tops_P Parameter: Tissue Value: Root Tips vs. Root Tops
  misc_feature: MA Experiment ID: 20000234 Result: Down-regulated in Transcription
  misc_feature: MA Experiment 20000234 PARAMETER Experiment Name: At_Siliques_P Parameter: Age (day) Value: 21
  misc_feature: MA Experiment 20000234 PARAMETER Experiment Name: At_Siliques_P Parameter: Organism Value: A. thaliana
  misc_feature: MA Experiment 20000234 PARAMETER Experiment Name: At_Siliques_P Parameter: Plant Line Value: WS
  misc_feature: MA Experiment 20000234 PARAMETER Experiment Name: At_Siliques_P Parameter: Tissue Value: Less Than 5mm Siliques vs. Whole Plant
  misc_feature: MA Experiment ID: 20000264 Result: Up-regulated in Transcription
  misc_feature: MA Experiment 20000264 PARAMETER Experiment Name: At_Open_Flower_P Parameter: Age (day) Value: 21
  misc_feature: MA Experiment 20000264 PARAMETER Experiment Name: At_Open_Flower_P Parameter: Plant Line Value: WS
  misc_feature: MA Experiment 20000264 PARAMETER Experiment Name: At_Open_Flower_P Parameter: Tissue Value: Open Flower vs. Whole Plant
  misc_feature: MA Experiment ID: 20000794 Result: Up-regulated in Transcription
  misc_feature: MA Experiment 20000794 PARAMETER Experiment Name: At_Petals_P Parameter: Age (day) Value: 23-25 days
  misc_feature: MA Experiment 20000794 PARAMETER Experiment Name: At_Petals_P Parameter: Plant Line Value: WS
  misc_feature: MA Experiment 20000794 PARAMETER Experiment Name: At_Petals_P Parameter: Tissue Value: Petals vs. Whole plant
  misc_feature: MA Experiment ID: 20001248 Result: Down-regulated in Transcription
  misc_feature: MA Experiment 20001248 PARAMETER Experiment Name: At_Far-red-induction_P Parameter: Age (day) Value: 7
  misc_feature: MA Experiment 20001248 PARAMETER Experiment Name: At_Far-red-induction_P Parameter: Light Value: Far-red vs. White
  misc_feature: MA Experiment 20001248 PARAMETER Experiment Name: At_Far-red-induction_P Parameter: Organism Value: A. thaliana
  misc_feature: MA Experiment 20001248 PARAMETER Experiment Name: At_Far-red-induction_P Parameter: Plant Line Value: Columbia
  misc_feature: MA Experiment 20001248 PARAMETER Experiment Name: At_Far-red-induction_P Parameter: Timepoint (hr) Value: 4
  misc_feature: MA Experiment 20001248 PARAMETER Experiment Name: At_Far-red-induction_P Parameter: Tissue Value: Whole Plant
  misc_feature: MA Experiment ID: 20001451 Result: Down-regulated in Transcription
  misc_feature: MA Experiment 20001451 PARAMETER Experiment Name: At_Far-red-induction_P Parameter: Age (day) Value: 7
  misc_feature: MA Experiment 20001451 PARAMETER Experiment Name: At_Far-red-induction_P Parameter: Light Value: Far-red vs. White
  misc_feature: MA Experiment 20001451 PARAMETER Experiment Name: At_Far-red-induction_P Parameter: Organism Value: A. thaliana
  misc_feature: MA Experiment 20001451 PARAMETER Experiment Name: At_Far-red-induction_P Parameter: Plant Line Value: Columbia
  misc_feature: MA Experiment 20001451 PARAMETER Experiment Name: At_Far-red-induction_P Parameter: Timepoint (hr) Value: 24
  misc_feature: MA Experiment 20001451 PARAMETER Experiment Name: At_Far-red-induction_P Parameter: Tissue Value: Whole Plant
  misc_feature: MA Experiment ID: 20001557 Result: Down-regulated in Transcription
  misc_feature: MA Experiment 20001557 PARAMETER Experiment Name: At_Drought_Soil_Dry_P Parameter: Age (day) Value: 27
  misc_feature: MA Experiment 20001557 PARAMETER Experiment Name: At_Drought_Soil_Dry_P Parameter: Organism Value: A. thaliana
  misc_feature: MA Experiment 20001557 PARAMETER Experiment Name: At_Drought_Soil_Dry_P Parameter: Plant Line Value: WS
  misc_feature: MA Experiment 20001557 PARAMETER Experiment Name: At_Drought_Soil_Dry_P Parameter: Post Timepoint (hr) Value: 3
  misc_feature: MA Experiment 20001557 PARAMETER Experiment Name: At_Drought_Soil_Dry_P Parameter: Post-Treatment Value: Re-Water vs. No Drought
  misc_feature: MA Experiment 20001557 PARAMETER Experiment Name: At_Drought_Soil_Dry_P Parameter: Timepoint (day) Value: 13
  misc_feature: MA Experiment 20001557 PARAMETER Experiment Name: At_Drought_Soil_Dry_P Parameter: Treatment Value: Drought vs. No Drought
  misc_feature: MA Experiment ID: 20001558 Result: Down-regulated in Transcription
  misc_feature: MA Experiment 20001558 PARAMETER Experiment Name: At_Drought_Soil_Dry_P Parameter: Age (day) Value: 27
  misc_feature: MA Experiment 20001558 PARAMETER Experiment Name: At_Drought_Soil_Dry_P Parameter: Organism Value: A. thaliana
  misc_feature: MA Experiment 20001558 PARAMETER Experiment Name: At_Drought_Soil_Dry_P Parameter: Plant Line Value: WS
  misc_feature: MA Experiment 20001558 PARAMETER Experiment Name: At_Drought_Soil_Dry_P Parameter: Post Timepoint (hr) Value: 6
  misc_feature: MA Experiment 20001558 PARAMETER Experiment Name: At_Drought_Soil_Dry_P Parameter: Post-Treatment Value: Re-Water vs. No Drought
  misc_feature: MA Experiment 20001558 PARAMETER Experiment Name: At_Drought_Soil_Dry_P Parameter: Timepoint (day) Value: 13
  misc_feature: MA Experiment 20001558 PARAMETER Experiment Name: At_Drought_Soil_Dry_P Parameter: Treatment Value: Drought vs. No Drought
  misc_feature: MA Experiment ID: 20001560 Result: Down-regulated in Transcription
  misc_feature: MA Experiment 20001560 PARAMETER Experiment Name: At_Drought_Soil_Dry_P Parameter: Age (day) Value: 28
  misc_feature: MA Experiment 20001560 PARAMETER Experiment Name: At_Drought_Soil_Dry_P Parameter: Organism Value: A. thaliana
  misc_feature: MA Experiment 20001560 PARAMETER Experiment Name: At_Drought_Soil_Dry_P Parameter: Plant Line Value: WS
  misc_feature: MA Experiment 20001560 PARAMETER Experiment Name: At_Drought_Soil_Dry_P Parameter: Post Timepoint (hr) Value: None
  misc_feature: MA Experiment 20001560 PARAMETER Experiment Name: At_Drought_Soil_Dry_P Parameter: Post-Treatment Value: None
  misc_feature: MA Experiment 20001560 PARAMETER Experiment Name: At_Drought_Soil_Dry_P Parameter: Timepoint (day) Value: 14
  misc_feature: MA Experiment 20001560 PARAMETER Experiment Name: At_Drought_Soil_Dry_P Parameter: Treatment Value: Drought vs. No Drought
  misc_feature: MA Experiment ID: 20001768 Result: Up-regulated in Transcription
  misc_feature: MA Experiment 20001768 PARAMETER Experiment Name: At_Far-red-enriched-adult_P Parameter: Age (day) Value: 28
  misc_feature: MA Experiment 20001768 PARAMETER Experiment Name: At_Far-red-enriched-adult_P Parameter: Light Value: Far-red enriched vs. White
  misc_feature: MA Experiment 20001768 PARAMETER Experiment Name: At_Far-red-enriched-adult_P Parameter: Organism Value: A. thaliana
  misc_feature: MA Experiment 20001768 PARAMETER Experiment Name: At_Far-red-enriched-adult_P Parameter: Plant Line Value: Columbia
  misc_feature: MA Experiment 20001768 PARAMETER Experiment Name: At_Far-red-enriched-adult_P Parameter: Timepoint (hr) Value: 1
  misc_feature: MA Experiment 20001768 PARAMETER Experiment Name: At_Far-red-enriched-adult_P Parameter: Tissue Value: Aerial
  misc_feature: MA Experiment ID: 20001905 Result: Up-regulated in Transcription
  misc_feature: MA Experiment 20001905 PARAMETER Experiment Name: At_Drought_Reproduction_P Parameter: Age (day) Value: 40
  misc_feature: MA Experiment 20001905 PARAMETER Experiment Name: At_Drought_Reproduction_P Parameter: Organism Value: A. thaliana
  misc_feature: MA Experiment 20001905 PARAMETER Experiment Name: At_Drought_Reproduction_P Parameter: Plant Line Value: WS
  misc_feature: MA Experiment 20001905 PARAMETER Experiment Name: At_Drought_Reproduction_P Parameter: Timepoint (day) Value: 10
  misc_feature: MA Experiment 20001905 PARAMETER Experiment Name: At_Drought_Reproduction_P Parameter: Tissue Value: Rosettes
  misc_feature: MA Experiment 20001905 PARAMETER Experiment Name: At_Drought_Reproduction_P Parameter: Treatment Value: Drought vs. No Drought
gggataccgctagtgattaacggtggttatggataccctccgattcgagttaagctcagcttccttcacttccgccgtcaccgcctcttctttacacagtcactcacggtatttcttctcctcagtgcaactcggccgagtcggctcatcatctccggcgatcacatcggtctcgaggacgacagtgaatgaaatctgcacggcggatgaacttcactacgttcctgttcccaactccgattggcgcgtcgctctctggcgatatcttccttccccaaaggcaccgaagaggaaccatcctttgcttctattgtctgggattgggaccaatgctgttacatacgatctttcccctgagtgttcctttgcaagatccatgtctggatcaggatttgatacatggattcttgagctccgtggagccgggctgagttctctcagtgttgatacaaatcttggtaaaggcaataaccagcagcggatagtctcgaatctattggagaatttcataagtgtatctgaaaggctggaaaatgttcttgatggaggttccaagatccttgggatgcaagaccgtctatcgaagagagcgggagatttcaagcagcggtttgaacttatccctcattacaattgggattttgataactatctagaagaagatgttccttctgcgatggactatgtaaggactcaaaccaagtcaaaagatggaaagttgctagcagttggtcactcaatgggtggtatcttgttatatgccttgctctcaagatgtggctttaaaggaatggattcaggtttggctggtgtcaccactctcgcatcaacatttgactattcatcctcaggaacactcctcaagtacctattaccaatgaaagagcctgcacaagctattaaccttcctatcatgccaattgacacaatgctcgctatggctcaccctctaatgtgtcgtcctccatattctttgtcctggttaaccgctaatatctctgctcctcaaatgatggaccctgaagttattgagaagcttgttttgaacagcttatgcacagtaccagtcaagcttctcttgcagctaacaacagccgtggaccacggtgggttgcgtgacagaaccggtactttctgttacaaggatcatatcagcaaaacaaatgtgcctatcttagctcttgcaggggactgggacataatctgccctcccgatgcagtatacgatactgtaaagctgattccagaacatctagccacttacaaagttgtaggatcacccggaggtccacattatggccaccaggatctaatttcgggtcgaacggctcggaacgaagtatatcctctgattactagatttcttcaacaacaagatgagagttaagatcaacaagaatgcaaatgaattttgattcttgtttctgtacatataacattccatatatacatttatgtgtacaaatcttcatacagttaaactcacaagcactgtatacaaattaaatacaaatgatacctttaa

SEQ ID NO: 89728 - protein, 452 aa, Arabidopsis thaliana
  peptide (1)..(452): Ceres Seq. ID no. 12720237
  misc_feature (1)..(452): Homolog of NCBI NO: 18410446 NR Description: expressed protein; protein id: At1g73750.1, by cDNA: gi_16930504 [Arabidopsis thaliana] At1g73750/F25P22_17 [Arabidopsis thaliana]
  misc_feature (1)..(452): Homolog of NCBI NO: 25372838 NR Description: unknown protein F25P22.17 [imported] -
  misc_feature (154)..(452): Homolog of NCBI NO: 19699290 NR Description: At1g15070/F9L1_1 [Arabidopsis thaliana]
  misc_feature (46)..(136): Homolog of NCBI NO: 19699290 NR Description: At1g15070/F9L1_1 [Arabidopsis thaliana]
  misc_feature (154)..(432): Homolog of NCBI NO: 15220945 NR Description: hypothetical protein; protein id: At1g15060.1, by cDNA: gi_19699289, supported by cDNA: gi_19699289 [Arabidopsis
  misc_feature (46)..(136): Homolog of NCBI NO: 15220945 NR Description: hypothetical protein; protein id: At1g15060.1, by cDNA: gi_19699289, supported by cDNA: gi_19699289 [Arabidopsis
  misc_feature (134)..(451): Homolog of NCBI NO: 38637529 NR Description: unknown protein [Oryza sativa (japonica
  misc_feature (49)..(155): Homolog of NCBI NO: 38637529 NR Description: unknown protein [Oryza sativa (japonica
  misc_feature (154)..(398): Homolog of NCBI NO: 25372839 NR Description: F9L1.1 protein - Arabidopsis thaliana
  misc_feature (46)..(136): Homolog of NCBI NO: 25372839 NR Description: F9L1.1 protein - Arabidopsis thaliana
MDTLRFELSSASFTSAVTASSLHSHSRYFFSSVQLGRVGSSSPAITSVSRTTVNEICTADELHYVPVPNSDWRVALWRYLPSPKAPKRNHPLLLLSGIGTNAVTYDLSPECSFARSMSGSGFDTWILELRGAGLSSLSVDTNLGKGNNQQRIVSNLLENFISVSERLENVLDGGSKILGMQDRLSKRAGDFKQRFELIPHYNWDFDNYLEEDVPSAMDYVRTQTKSKDGKLLAVGHSMGGILLYALLSRCGFKGMDSGLAGVTTLASTFDYSSSGTLLKYLLPMKEPAQAINLPIMPIDTMLAMAHPLMCRPPYSLSWLTANISAPQMMDPEVIEKLVLNSLCTVPVKLLLQLTTAVDHGGLRDRTGTFCYKDHISKTNVPILALAGDWDIICPPDAVYDTVKLIPEHLATYKVVGSPGGPHYGHQDLISGRTARNEVYPLITRFLQQQDES

SEQ ID NO: 89729 - protein, 336 aa, Arabidopsis thaliana
  peptide (1)..(336): Ceres Seq. ID no. 12720238
  misc_feature (1)..(336): Homolog of NCBI NO: 18410446 NR Description: expressed protein; protein id: At1g73750.1, by cDNA: gi_16930504 [Arabidopsis thaliana] At1g73750/F25P22_17 [Arabidopsis thaliana]
  misc_feature (1)..(336): Homolog of NCBI NO: 25372838 NR Description: unknown protein F25P22.17 [imported] -
  misc_feature (38)..(336): Homolog of NCBI NO: 19699290 NR Description: At1g15070/F9L1_1 [Arabidopsis thaliana]
  misc_feature (1)..(20): Homolog of NCBI NO: 19699290 NR Description: At1g15070/F9L1_1 [Arabidopsis thaliana]
  misc_feature (38)..(316): Homolog of NCBI NO: 15220945 NR Description: hypothetical protein; protein id: At1g15060.1, by cDNA: gi_19699289, supported by cDNA: gi_19699289 [Arabidopsis
  misc_feature (1)..(20): Homolog of NCBI NO: 15220945 NR Description: hypothetical protein; protein id: At1g15060.1, by cDNA: gi_19699289, supported by cDNA: gi_19699289 [Arabidopsis
  misc_feature (18)..(335): Homolog of NCBI NO: 38637529 NR Description: unknown protein [Oryza sativa (japonica
  misc_feature (1)..(39): Homolog of NCBI NO: 38637529 NR Description: unknown protein [Oryza sativa (japonica
  misc_feature (38)..(282): Homolog of NCBI NO: 25372839 NR Description: F9L1.1 protein - Arabidopsis thaliana
  misc_feature (1)..(20): Homolog of NCBI NO: 25372839 NR Description: F9L1.1 protein - Arabidopsis thaliana
MSGSGFDTWILELRGAGLSSLSVDTNLGKGNNQQRIVSNLLENFISVSERLENVLDGGSKILGMQDRLSKRAGDFKQRFELIPHYNWDFDNYLEEDVPSAMDYVRTQTKSKDGKLLAVGHSMGGILLYALLSRCGFKGMDSGLAGVTTLASTFDYSSSGTLLKYLLPMKEPAQAINLPIMPIDTMLAMAHPLMCRPPYSLSWLTANISAPQMMDPEVIEKLVLNSLCTVPVKLLLQLTTAVDHGGLRDRTGTFCYKDHISKTNVPILALAGDWDIICPPDAVYDTVKLIPEHLATYKVVGSPGGPHYGHQDLISGRTARNEVYPLITRFLQQQDES

SEQ ID NO: 89730 - protein, 273 aa, Arabidopsis thaliana
  peptide (1)..(273): Ceres Seq. ID no. 12720239
  misc_feature (1)..(273): Homolog of NCBI NO: 18410446 NR Description: expressed protein; protein id: At1g73750.1, by cDNA: gi_16930504 [Arabidopsis thaliana] At1g73750/F25P22_17 [Arabidopsis thaliana]
  misc_feature (1)..(273): Homolog of NCBI NO: 25372838 NR Description: unknown protein F25P22.17 [imported] -
  misc_feature (1)..(273): Homolog of NCBI NO: 19699290 NR Description: At1g15070/F9L1_1 [Arabidopsis thaliana]
  misc_feature (1)..(253): Homolog of NCBI NO: 15220945 NR Description: hypothetical protein; protein id: At1g15060.1, by cDNA: gi_19699289, supported by cDNA: gi_19699289 [Arabidopsis
  misc_feature (1)..(272): Homolog of NCBI NO: 38637529 NR Description: unknown protein [Oryza sativa (japonica
  misc_feature (1)..(219): Homolog of NCBI NO: 25372839 NR Description: F9L1.1 protein - Arabidopsis thaliana
  misc_feature (1)..(72): Homolog of NCBI NO: 34911394 NR Description: similar to Arabidopsis thaliana chromosome 1,
  misc_feature (121)..(260): Homolog of NCBI NO: 34911394 NR Description: similar to Arabidopsis thaliana chromosome 1,
  misc_feature (169)..(272): Homolog of NCBI NO: 7489376 NR Description: hypothetical protein - barley (fragment)
  misc_feature (221)..(273): Homolog of NCBI NO: 25518030 NR Description: T15D22.11 protein - Arabidopsis thaliana Contains similarity to unknown stress inducible protein product
MQDRLSKRAGDFKQRFELIPHYNWDFDNYLEEDVPSAMDYVRTQTKSKDGKLLAVGHSMGGILLYALLSRCGFKGMDSGLAGVTTLASTFDYSSSGTLLKYLLPMKEPAQAINLPIMPIDTMLAMAHPLMCRPPYSLSWLTANISAPQMMDPEVIEKLVLNSLCTVPVKLLLQLTTAVDHGGLRDRTGTFCYKDHISKTNVPILALAGDWDIICPPDAVYDTVKLIPEHLATYKVVGSPGGPHYGHQDLISGRTARNEVYPLITRFLQQQDES

SEQ ID NO: 89731 - DNA, 1260 bp, Arabidopsis thaliana
  misc_feature (1)..(1260): Ceres Seq. ID no. 12720240
  misc_feature: MA Experiment ID: 108488 Result: Down-regulated in Transcription
  misc_feature: MA Experiment ID: 108573 Result: Up-regulated in Transcription
  misc_feature: MA Experiment 108573 PARAMETER Experiment Name: At_Drought_cDNA_P Parameter: Timepoint (hr) Value: 6
  misc_feature: MA Experiment 108573 PARAMETER Experiment Name: At_Drought_cDNA_P Parameter: Tissue Value: Aerial
  misc_feature: MA Experiment 108573 PARAMETER Experiment Name: At_Drought_cDNA_P Parameter: Treatment Value: Drought vs. No Drought
  misc_feature: MA Experiment ID: 108577 Result: Down-regulated in Transcription
  misc_feature: MA Experiment 108577 PARAMETER Experiment Name: At_42deg_Heat_cDNA_P Parameter: Temperature (deg C) Value: 42 vs. 22
  misc_feature: MA Experiment 108577 PARAMETER Experiment Name: At_42deg_Heat_cDNA_P Parameter: Timepoint (hr) Value: 6
  misc_feature: MA Experiment 108577 PARAMETER Experiment Name: At_42deg_Heat_cDNA_P Parameter: Tissue Value: Aerial
  misc_feature: MA Experiment ID: 20000069 Result: Up-regulated in Transcription
  misc_feature: MA Experiment 20000069 PARAMETER Experiment Name: At_100uM_ABA_Mutants_cDNA_P Parameter: Plant Line Value: CS23
  misc_feature: MA Experiment 20000069 PARAMETER Experiment Name: At_100uM_ABA_Mutants_cDNA_P Parameter: Timepoint (hr) Value: 6
  misc_feature: MA Experiment 20000069 PARAMETER Experiment Name: At_100uM_ABA_Mutants_cDNA_P Parameter: Tissue Value: Aerial
  misc_feature: MA Experiment 20000069 PARAMETER Experiment Name: At_100uM_ABA_Mutants_cDNA_P Parameter: Treatment Value: 100uM ABA vs. No Treatment
  misc_feature: MA Experiment ID: 20000070 Result: Up-regulated in Transcription
  misc_feature: MA Experiment 20000070 PARAMETER Experiment Name: At_100uM_ABA_Mutants_cDNA_P Parameter: Plant Line Value: CS24
  misc_feature: MA Experiment 20000070 PARAMETER Experiment Name: At_100uM_ABA_Mutants_cDNA_P Parameter: Timepoint (hr) Value: 6
  misc_feature: MA Experiment 20000070 PARAMETER Experiment Name: At_100uM_ABA_Mutants_cDNA_P Parameter: Tissue Value: Aerial
  misc_feature: MA Experiment 20000070 PARAMETER Experiment Name: At_100uM_ABA_Mutants_cDNA_P Parameter: Treatment Value: 100uM ABA vs. No Treatment
  misc_feature: MA Experiment ID: 20000071 Result: Up-regulated in Transcription
  misc_feature: MA Experiment 20000071 PARAMETER Experiment Name: At_100uM_ABA_Mutants_cDNA_P Parameter: Plant Line Value: CS8104
  misc_feature: MA Experiment 20000071 PARAMETER Experiment Name: At_100uM_ABA_Mutants_cDNA_P Parameter: Timepoint (hr) Value: 6
  misc_feature: MA Experiment 20000071 PARAMETER Experiment Name: At_100uM_ABA_Mutants_cDNA_P Parameter: Tissue Value: Aerial
  misc_feature: MA Experiment 20000071 PARAMETER Experiment Name: At_100uM_ABA_Mutants_cDNA_P Parameter: Treatment Value: 100uM ABA vs. No Treatment
  misc_feature: MA Experiment ID: 20000072 Result: Up-regulated in Transcription
  misc_feature: MA Experiment 20000072 PARAMETER Experiment Name: At_100uM_ABA_Mutants_cDNA_P Parameter: Plant Line Value: CS8105
  misc_feature: MA Experiment 20000072 PARAMETER Experiment Name: At_100uM_ABA_Mutants_cDNA_P Parameter: Timepoint (hr) Value: 6
  misc_feature: MA Experiment 20000072 PARAMETER Experiment Name: At_100uM_ABA_Mutants_cDNA_P Parameter: Tissue Value: Aerial
  misc_feature: MA Experiment 20000072 PARAMETER Experiment Name: At_100uM_ABA_Mutants_cDNA_P Parameter: Treatment Value: 100uM ABA vs. No Treatment
  misc_feature: MA Experiment ID: 20000086 Result: Up-regulated in Transcription
  misc_feature: MA Experiment 20000086 PARAMETER Experiment Name: At_100uM_ABA_Mutants_cDNA_P Parameter: Plant Line Value: CS22
  misc_feature: MA Experiment 20000086 PARAMETER Experiment Name: At_100uM_ABA_Mutants_cDNA_P Parameter: Timepoint (hr) Value: 6
  misc_feature: MA Experiment 20000086 PARAMETER Experiment Name: At_100uM_ABA_Mutants_cDNA_P Parameter: Tissue Value: Aerial
  misc_feature: MA Experiment 20000086 PARAMETER Experiment Name: At_100uM_ABA_Mutants_cDNA_P Parameter: Treatment Value: 100uM ABA vs. No Treatment
  misc_feature: MA Experiment ID: 20000087 Result: Up-regulated in Transcription
  misc_feature: MA Experiment 20000087 PARAMETER Experiment Name: At_100uM_ABA_Mutants_cDNA_P Parameter: Plant Line Value: WS
  misc_feature: MA Experiment 20000087 PARAMETER Experiment Name: At_100uM_ABA_Mutants_cDNA_P Parameter: Timepoint (hr) Value: 6
  misc_feature: MA Experiment 20000087 PARAMETER Experiment Name: At_100uM_ABA_Mutants_cDNA_P Parameter: Tissue Value: Aerial
  misc_feature: MA Experiment 20000087 PARAMETER Experiment Name: At_100uM_ABA_Mutants_cDNA_P Parameter: Treatment Value: 100uM ABA vs. No Treatment
  misc_feature: MA Experiment ID: 20000088 Result: Up-regulated in Transcription
  misc_feature: MA Experiment 20000088 PARAMETER Experiment Name: At_100uM_ABA_Mutants_cDNA_P Parameter: Plant Line Value: Landsberg
  misc_feature: MA Experiment 20000088 PARAMETER Experiment Name: At_100uM_ABA_Mutants_cDNA_P Parameter: Timepoint (hr) Value: 6
  misc_feature: MA Experiment 20000088 PARAMETER Experiment Name: At_100uM_ABA_Mutants_cDNA_P Parameter: Tissue Value: Aerial
  misc_feature: MA Experiment 20000088 PARAMETER Experiment Name: At_100uM_ABA_Mutants_cDNA_P Parameter: Treatment Value: 100uM ABA vs. No Treatment
  misc_feature: MA Experiment ID: 20000111 Result: Down-regulated in Transcription
  misc_feature: MA Experiment 20000111 PARAMETER Experiment Name: At_42deg_Heat_cDNA_P Parameter: Temperature (deg C) Value: 42 vs. 22
  misc_feature: MA Experiment 20000111 PARAMETER Experiment Name: At_42deg_Heat_cDNA_P Parameter: Timepoint (hr) Value: 6
  misc_feature: MA Experiment 20000111 PARAMETER Experiment Name: At_42deg_Heat_cDNA_P Parameter: Tissue Value: Aerial
  misc_feature: MA Experiment ID: 20000113 Result: Down-regulated in Transcription
  misc_feature: MA Experiment 20000113 PARAMETER Experiment Name: At_42deg_Heat_cDNA_P Parameter: Temperature (deg C) Value: 42 vs. 22
  misc_feature: MA Experiment 20000113 PARAMETER Experiment Name: At_42deg_Heat_cDNA_P Parameter: Timepoint (hr) Value: 8
  misc_feature: MA Experiment 20000113 PARAMETER Experiment Name: At_42deg_Heat_cDNA_P Parameter: Tissue Value: Aerial
  misc_feature: MA Experiment ID: 20000224 Result: Down-regulated in Transcription
atctctcttttgttttttctctctctcacagagaaaaagaacacaatgccagtttctgcagagccttcttcatcttcttcaacaacaatcggtcaacacatgagactccaacgacctaggaatcatcgaaatctcccacccatttccaccgccgacgaacctctaatccccaaacctagccgcgtctctaaatccgccatgtcttccttcttcctcttgccagaaactactaagaagaaacccaacggaacggcgtcgtttcgtggtctaggctgcacaacctccgcatctcagcaagtttcagtcccggcagtgattcgctcctccgcggattgggatgctagtaatttcaaaattaagaagacgaagaagaagaacaagaacaagggtagtagtagctacaatggtggttcgattaagatcttgagcgaagctagtactagtagtagcgtcgcttgcgcagcgattcctgatgtttggtgtggtcctggagttgggttttcaacggatgctgtcgtcggaggctccattgacacagttgtttcagatcctccgagaaggaatattccggtgagacgcaaaatcgatggagataaaaccaatagtaacagtaataatcatagagagggttcttcttctcttcttcctagacgatctctcaatcaagagtctaatccttattttgattctgattcgagttttttgacatcgcgggctgagcagactgatagatatcatcgtcatctaagactgccttaccctgatggactcgctgagatgatgatgatgcagaatggttttgtgatgggaggagtattaagctcattcgatcaattccgtgacatgaggctcaatgtcgataacatgacatacgagcaacttttggagcttggtgaaagaattgggcatgtgaacactggacttactgaaaaacagatcaaaagttgtcttcggaaagtcaaaccatgccggcaagatacaacagttgctgatagaaagtgcatcatctgtcaagacgagtatgaggcgaaggacgaggtaggggaattacgatgtgggcacaggttccatatcgactgtgtgaatcaatggcttgtgaggaagaactcttgtccggtctgtaaaacgatggcgtacaataagtcttagttagatattatctcttcctgtgatgtgattcttgatttcgggattgaaaccaaatcactattttatgttaagattcttttttggctttttattcatgattgctatttttct

SEQ ID NO: 89732 - protein, 382 aa, Arabidopsis thaliana
  peptide (1)..(382): Ceres Seq. ID no. 12720241
  misc_feature (334)..(374): Pfam Name: Zinc finger, C3HC4 type (RING finger) Pfam Description: Zinc finger, C3HC4 type (RING finger)
  misc_feature (16)..(382): Homolog of NCBI NO: 15219544 NR Description: putative RING zinc finger protein; protein id: [Arabidopsis thaliana] >gi|25406292|pir||H96764 protein RING zinc
  misc_feature (26)..(381): Homolog of NCBI NO: 15220912 NR Description: zinc-finger protein (C-terminal), putative; id: At1g17970.1, supported by cDNA: 261272., supported by cDNA: [Arabidopsis thaliana] >gi|16226279|gb|AAL16122.1|AF428290_1
  misc_feature (26)..(381): Homolog of NCBI NO: 21554695 NR Description: zinc-finger protein (C-terminal), putative
  misc_feature (75)..(381): Homolog of NCBI NO: 25511721 NR Description: F2H15.19 protein - Arabidopsis thaliana
  misc_feature (72)..(319): Homolog of NCBI NO: 34911396 NR Description: RING zinc finger protein-like [Oryza sativa
  misc_feature (338)..(376): Homolog of NCBI NO: 34911396 NR Description: RING zinc finger protein-like [Oryza sativa
  misc_feature (241)..(382): Homolog of NCBI NO: 7486381 NR Description: hypothetical protein F3L17.20 - Arabidopsis >gi|5262756|emb|CAB45904.1| putative protein [Arabidopsis >gi|7270048|emb|CAB79863.1| putative protein [Arabidopsis
  misc_feature (241)..(382): Homolog of NCBI NO: 18417809 NR Description: putative protein; protein id: At4g31450.1, by cDNA: gi_15983461 [Arabidopsis thaliana] AT4g31450/F3L17_20 [Arabidopsis thaliana]
  misc_feature (197)..(380): Homolog of NCBI NO: 15220067 NR Description: hypothetical protein; protein id: At1g45180.1 thaliana] >gi|7767667|gb|AAF69164.1|AC007915_16 F27F5.26
  misc_feature (270)..(378): Homolog of NCBI NO: 38345496 NR Description: OSJNBa0010D21.9 [Oryza sativa (japonica
ISLLFFLSLTEKKNTMPVSAEPSSSSSTTIGQHMRLQRPRNHRNLPPISTADEPLIPKPSRVSKSAMSSFFLLPETTKKKPNGTASFRGLGCTTSASQQVSVPAVIRSSADWDASNFKIKKTKKKNKNKGSSSYNGGSIKILSEASTSSSVACAAIPDVWCGPGVGFSTDAVVGGSIDTVVSDPPRRNIPVRRKIDGDKTNSNSNNHREGSSSLLPRRSLNQESNPYFDSDSSFLTSRAEQTDRYHRHLRLPYPDGLAEMMMMQNGFVMGGVLSSFDQFRDMRLNVDNMTYEQLLELGERIGHVNTGLTEKQIKSCLRKVKPCRQDTTVADRKCIICQDEYEAKDEVGELRCGHRFHIDCVNQWLVRKNSCPVCKTMAYNKS

SEQ ID NO: 89733 - protein, 367 aa, Arabidopsis thaliana
  peptide (1)..(367): Ceres Seq. ID no. 12720242
  misc_feature (319)..(359): Pfam Name: Zinc finger, C3HC4 type (RING finger) Pfam Description: Zinc finger, C3HC4 type (RING finger)
  misc_feature (1)..(367): Homolog of NCBI NO: 15219544 NR Description: putative RING zinc finger protein; protein id: [Arabidopsis thaliana] >gi|25406292|pir||H96764 protein RING zinc
  misc_feature (11)..(366): Homolog of NCBI NO: 15220912 NR Description: zinc-finger protein (C-terminal), putative; id: At1g17970.1, supported by cDNA: 261272., supported by cDNA: [Arabidopsis thaliana] >gi|16226279|gb|AAL16122.1|AF428290_1
  misc_feature (11)..(366): Homolog of NCBI NO: 21554695 NR Description: zinc-finger protein (C-terminal), putative
  misc_feature (60)..(366): Homolog of NCBI NO: 25511721 NR Description: F2H15.19 protein - Arabidopsis thaliana
  misc_feature (57)..(304): Homolog of NCBI NO: 34911396 NR Description: RING zinc finger protein-like [Oryza sativa
  misc_feature (323)..(361): Homolog of NCBI NO: 34911396 NR Description: RING zinc finger protein-like [Oryza sativa
  misc_feature (226)..(367): Homolog of NCBI NO: 7486381 NR Description: hypothetical protein F3L17.20 - Arabidopsis >gi|5262756|emb|CAB45904.1| putative protein [Arabidopsis >gi|7270048|emb|CAB79863.1| putative protein [Arabidopsis
  misc_feature (226)..(367): Homolog of NCBI NO: 18417809 NR Description: putative protein; protein id: At4g31450.1, by cDNA: gi_15983461 [Arabidopsis thaliana] AT4g31450/F3L17_20 [Arabidopsis thaliana]
  misc_feature (182)..(365): Homolog of NCBI NO: 15220067 NR Description: hypothetical protein; protein id: At1g45180.1 thaliana] >gi|7767667|gb|AAF69164.1|AC007915_16 F27F5.26
  misc_feature (255)..(363): Homolog of NCBI NO: 38345496 NR Description: OSJNBa0010D21.9 [Oryza sativa (japonica
MPVSAEPSSSSSTTIGQHMRLQRPRNHRNLPPISTADEPLIPKPSRVSKSAMSSFFLLPETTKKKPNGTASFRGLGCTTSASQQVSVPAVIRSSADWDASNFKIKKTKKKNKNKGSSSYNGGSIKILSEASTSSSVACAAIPDVWCGPGVGFSTDAVVGGSIDTVVSDPPRRNIPVRRKIDGDKTNSNSNNHREGSSSLLPRRSLNQESNPYFDSDSSFLTSRAEQTDRYHRHLRLPYPDGLAEMMMMQNGFVMGGVLSSFDQFRDMRLNVDNMTYEQLLELGERIGHVNTGLTEKQIKSCLRKVKPCRQDTTVADRKCIICQDEYEAKDEVGELRCGHRFHIDCVNQWLVRKNSCPVCKTMAYNKS

SEQ ID NO: 89734 - protein, 349 aa, Arabidopsis thaliana
  peptide (1)..(349): Ceres Seq. ID no. 12720243
  misc_feature (301)..(341): Pfam Name: Zinc finger, C3HC4 type (RING finger) Pfam Description: Zinc finger, C3HC4 type (RING finger)
  misc_feature (1)..(349): Homolog of NCBI NO: 15219544 NR Description: putative RING zinc finger protein; protein id: [Arabidopsis thaliana] >gi|25406292|pir||H96764 protein RING zinc
  misc_feature (1)..(348): Homolog of NCBI NO: 15220912 NR Description: zinc-finger protein (C-terminal), putative; id: At1g17970.1, supported by cDNA: 261272., supported by cDNA: [Arabidopsis thaliana] >gi|16226279|gb|AAL16122.1|AF428290_1
  misc_feature (1)..(348): Homolog of NCBI NO: 21554695 NR Description: zinc-finger protein (C-terminal), putative
  misc_feature (42)..(348): Homolog of NCBI NO: 25511721 NR Description: F2H15.19 protein - Arabidopsis thaliana
  misc_feature (39)..(286): Homolog of NCBI NO: 34911396 NR Description: RING zinc finger protein-like [Oryza sativa
  misc_feature (305)..(343): Homolog of NCBI NO: 34911396 NR Description: RING zinc finger protein-like [Oryza sativa
  misc_feature (208)..(349): Homolog of NCBI NO: 7486381 NR Description: hypothetical protein F3L17.20 - Arabidopsis >gi|5262756|emb|CAB45904.1| putative protein [Arabidopsis >gi|7270048|emb|CAB79863.1| putative protein [Arabidopsis
  misc_feature (208)..(349): Homolog of NCBI NO: 18417809 NR Description: putative protein; protein id: At4g31450.1, by cDNA: gi_15983461 [Arabidopsis thaliana] AT4g31450/F3L17_20 [Arabidopsis thaliana]
  misc_feature (164)..(347): Homolog of NCBI NO: 15220067 NR Description: hypothetical protein; protein id: At1g45180.1 thaliana] >gi|7767667|gb|AAF69164.1|AC007915_16 F27F5.26
  misc_feature (237)..(345): Homolog of NCBI NO: 38345496 NR Description: OSJNBa0010D21.9 [Oryza sativa (japonica
MRLQRPRNHRNLPPISTADEPLIPKPSRVSKSAMSSFFLLPETTKKKPNGTASFRGLGCTTSASQQVSVPAVIRSSADWDASNFKIKKTKKKNKNKGSSSYNGGSIKILSEASTSSSVACAAIPDVWCGPGVGFSTDAVVGGSIDTVVSDPPRRNIPVRRKIDGDKTNSNSNNHREGSSSLLPRRSLNQESNPYFDSDSSFLTSRAEQTDRYHRHLRLPYPDGLAEMMMMQNGFVMGGVLSSFDQFRDMRLNVDNMTYEQLLELGERIGHVNTGLTEKQIKSCLRKVKPCRQDTTVADRKCIICQDEYEAKDEVGELRCGHRFHIDCVNQWLVRKNSCPVCKTMAYNKS

SEQ ID NO: 89735 - DNA, 3093 bp, Arabidopsis thaliana
  misc_feature (1)..(3093): Ceres Seq. ID no. 12720262
  misc_feature: MA Experiment ID: 20000180 Result: Up-regulated in Transcription
  misc_feature: MA Experiment 20000180 PARAMETER Experiment Name: At_Germinating_Seeds_P Parameter: Age (hr) Value: 24 vs. 0
  misc_feature: MA Experiment 20000180 PARAMETER Experiment Name: At_Germinating_Seeds_P Parameter: Tissue Value: Germinating Seeds
  misc_feature: MA Experiment ID: 20000185 Result: Up-regulated in Transcription
  misc_feature: MA Experiment 20000185 PARAMETER Experiment Name: At_Roots__P Parameter: Age (day) Value: 7 vs. 21
  misc_feature: MA Experiment 20000185 PARAMETER Experiment Name: At_Roots__P Parameter: Organism Value: A. thaliana
  misc_feature: MA Experiment 20000185 PARAMETER Experiment Name: At_Roots__P Parameter: Tissue Value: Roots vs. Whole Plant
  misc_feature: MA Experiment ID: 20000235 Result: Up-regulated in Transcription
  misc_feature: MA Experiment 20000235 PARAMETER Experiment Name: At_Siliques_P Parameter: Age (day) Value: 21
  misc_feature: MA Experiment 20000235 PARAMETER Experiment Name: At_Siliques_P Parameter: Organism Value: A. thaliana
  misc_feature: MA Experiment 20000235 PARAMETER Experiment Name: At_Siliques_P Parameter: Plant Line Value: WS
  misc_feature: MA Experiment 20000235 PARAMETER Experiment Name: At_Siliques_P Parameter: Tissue Value: 5-10mm Siliques vs. Whole Plant
  misc_feature: MA Experiment ID: 20000264 Result: Up-regulated in Transcription
  misc_feature: MA Experiment 20000264 PARAMETER Experiment Name: At_Open_Flower_P Parameter: Age (day) Value: 21
  misc_feature: MA Experiment 20000264 PARAMETER Experiment Name: At_Open_Flower_P Parameter: Plant Line Value: WS
  misc_feature: MA Experiment 20000264 PARAMETER Experiment Name: At_Open_Flower_P Parameter: Tissue Value: Open Flower vs. Whole Plant
  misc_feature: MA Experiment ID: 20000794 Result: Up-regulated in Transcription
  misc_feature: MA Experiment 20000794 PARAMETER Experiment Name: At_Petals_P Parameter: Age (day) Value: 23-25 days
  misc_feature: MA Experiment 20000794 PARAMETER Experiment Name: At_Petals_P Parameter: Plant Line Value: WS
  misc_feature: MA Experiment 20000794 PARAMETER Experiment Name: At_Petals_P Parameter: Tissue Value: Petals vs. Whole plant
  misc_feature: MA Experiment ID: 20001910 Result: Up-regulated in Transcription
  misc_feature: MA Experiment 20001910 PARAMETER Experiment Name: At_Drought_Reproduction_P Parameter: Age (day) Value: 37
  misc_feature: MA Experiment 20001910 PARAMETER Experiment Name: At_Drought_Reproduction_P Parameter: Organism Value: A. thaliana
  misc_feature: MA Experiment 20001910 PARAMETER Experiment Name: At_Drought_Reproduction_P Parameter: Plant Line Value: WS
  misc_feature: MA Experiment 20001910 PARAMETER Experiment Name: At_Drought_Reproduction_P Parameter: Timepoint (day) Value: 7
  misc_feature: MA Experiment 20001910 PARAMETER Experiment Name: At_Drought_Reproduction_P Parameter: Tissue Value: Flowers
  misc_feature: MA Experiment 20001910 PARAMETER Experiment Name: At_Drought_Reproduction_P Parameter: Treatment Value: Drought vs. No Drought
atgaatcctatgcgtgatcaaccgggcagcccttatggagattcaactcctcgtagtccgttttctcccttttctccattatctgtagatgataggcatagaaatcatgcagatacaaaaactcctcgtagtcctttctctccattttctccattatccggagatgaaaggcacaaaagtctggcagagtccaaatttcagcaagcccttgccagctctggccaattagatccattatctcctggatcaatgcatcatggaggacacaagtttcatgaggttttccaaatgaaacaggggcgttatgatcttcaagcttcaaagatttctgaaatgatgaaatcaagtagcttagataatgctcctacgcagtcattgctaagcgtcttgaatggaattctagatgaaagtatcgaaagaaagaatggtgaaatccctcagcgtgtggcatgcctgttaagaaaagtcgtgcaggagattgagcggcgtatatcaactcaagctgaacatctaagaacgcaaaacaatattttcaaaactcgcgaggaaaaataccagtcaaggatcaatgtccttgaagccttagcatcaggaactggtgtagaacacgagattgcaacacaacagcttagacagatagagacagaaaagtcaatgtgggaggaaaagaagaaacacgaagaggaagatatggttaagctaatgaaacaaaatgatcagcacaacctcgaaatttctgcgctgaagcaagaactggagacaactaaaagaaaatatgaacaacaatactcgcaaattgaaagccaaacaaagacagagaagtcaaagtgggaagaacagaagaaaaatgaagaggaggatatggacaagctattgaaagaaaatgatcagttcaaccttcagatttctgcgttaaggcaagagctggagacaacaagaaaagcgtatgaacagcaatgctcgcaaatggaaagccaaacaatggtcgctacaacaggacttgagagcaggctcaaggaacttgaacaagagggaaaagtggtaaacactgcaaaaaatgcccttgaggaaagggttaaagagcttgaacaaatgggaaaagaagcacattctgctaaaaatgctcttgaggaaaagattaaacagcttcaacaaatggaaaaagaaacaaaaactgctaatacaagccttgaaggaaagatccaagagcttgaacaaaacctcgtaatgtggaagactaaagtcagagaaatggagaaaaagtctgagtccaaccaccaaagatggagtcagaaagaactttcctataaaagctttattgataaccagtctcaggcactactggagttgaggtcctattcaagatccatcaagcaagaaatactgaaggtacaagagaactatacagaccagttcagccaactaggaaagaaactgattgaacttagcaatgctgctgaaaactatcacgctgtactaactgaaaaccggaagcttttcaacgagcttcaggagctaaaaggaaacatcagagtgttttgccgggtgaggcctttccttcctgcacagggtgcagcaaacacagtggtcgagtatgtcggtgaagatggagaattagtagttaccaatccaactagacccgggaaagacggtcttcgccagtttaagttcaacaaggtgtatagtccaactgcttcacaagctgacgtcttttcagacataagaccgctggttaggtcagtacttgatgggtacaatgtttgtatatttgcatatggccagacaggatcagggaaaacttatacaatgactggtccagatggatcaagtgaagaagactggggagtaaattatcgcgctctcaatgatctttttaaaatctctcagtccagaaagggaaacatatcgtatgaagtcggggtgcaaatggtggagatatataatgaacaagtgctcgatctgctgtctgatgacaattctcaaaagaaatatccctttgttttaaatcctgggatcctttctacaactcaacaaaatggcctggctgtgcctgacgcaagcatgtatcctgtgacatcaacttcagatgtgattacattgatggacattggactacagaatcgagccgttggttctactgccttgaatgaaagaagtagtcgttcacatagcattgtcactgttcacgttcgcggtaaagatttaaagaccggttccgtgctatacggtaatcttcatttggtggatctggcaggaagtgagagagtagatcgctctgaagttacaggagacagactaagagaagcacaacatataaacaagtcgctctcatctcttggagatgtgatattctctctcgcttcaaagagttctcatgtaccatacagaaacagcaagctaacacagcttctccaaacctctcttggaggacgagcaaagacactaatgtttgtgcaactcaaccctgacgctacttcatactcagagtcaatgagtaccttgaaatttgcagagcgtgtctctggagtcgaacttggtgctgcaaagacaagtaaagaaggtaaagatgttcgagacttgatggaacagttagcgtcccttaaggacaccatagcgagaaaagacgaagagatagagagacttcagcatcagcctcagagacttcagaaatcaatgatgagaagaaaaagcataggacatacagatgacataaactcagatacaggagaatattcatcacaatcaagatactctgttactgacggcgaaagtttagcatcctctgccgaggcagagtacgacgagagactaagcgagattacgtctgatgctgcatctatgggaacacaaggatccattgatgttaccaaaagaccacccagaatttcagacagagctaagtcggtgactgcaaaatcatctacgagtgtaacacggccactcgataaacttcggaaagtagctacaagaacaacatcgaccgttgctaaggtcacgggcttgacatcatcaagtaaaggcttagcgtcatcaagcattaagaagacgggaagtacatcaagtttggcaaagtcttcaaaacggtgggcgtaa

SEQ ID NO: 89736 - protein, 1030 aa, Arabidopsis thaliana
  peptide (1)..(1030): Ceres Seq. ID no. 12720263
  misc_feature (111)..(504): Pfam Name: Myosin tail Pfam Description: Myosin tail
  misc_feature (6)..(1030): Homolog of NCBI NO: 6714287 NR Description: F15H18.10 [Arabidopsis thaliana]
  misc_feature (289)..(969): Homolog of NCBI NO: 25404429 NR Description: kinesin-like protein, 73641-79546 [imported] -
  misc_feature (289)..(969): Homolog of NCBI NO: 30696876 NR Description: kinesin-related protein [Arabidopsis thaliana]
  misc_feature (569)..(969): Homolog of NCBI NO: 6633835 NR Description: F2K11.1 [Arabidopsis thaliana]
  misc_feature (327)..(567): Homolog of NCBI NO: 6633835 NR Description: F2K11.1 [Arabidopsis thaliana]
  misc_feature (91)..(294): Homolog of NCBI NO: 6633835 NR Description: F2K11.1 [Arabidopsis thaliana]
  misc_feature (343)..(638): Homolog of NCBI NO: 34909422 NR Description: putative kinesin-like protein [Oryza sativa
  misc_feature (707)..(948): Homolog of NCBI NO: 34909422 NR Description: putative kinesin-like protein [Oryza sativa
  misc_feature (312)..(921): Homolog of NCBI NO: 18421069 NR Description: kinesin-related protein; protein id: At5g27000.1
  misc_feature (312)..(921): Homolog of NCBI NO: 11358474 NR Description: kinesin-like heavy chain [validated] -
MNPMRDQPGSPYGDSTPRSPFSPFSPLSVDDRHRNHADTKTPRSPFSPFSPLSGDERHKSLAESKFQQALASSGQLDPLSPGSMHHGGHKFHEVFQMKQGRYDLQASKISEMMKSSSLDNAPTQSLLSVLNGILDESIERKNGEIPQRVACLLRKVVQEIERRISTQAEHLRTQNNIFKTREEKYQSRINVLEALASGTGVEHEIATQQLRQIETEKSMWEEKKKHEEEDMVKLMKQNDQHNLEISALKQELETTKRKYEQQYSQIESQTKTEKSKWEEQKKNEEEDMDKLLKENDQFNLQISALRQELETTRKAYEQQCSQMESQTMVATTGLESRLKELEQEGKVVNTAKNALEERVKELEQMGKEAHSAKNALEEKIKQLQQMEKETKTANTSLEGKIQELEQNLVMWKTKVREMEKKSESNHQRWSQKELSYKSFIDNQSQALLELRSYSRSIKQEILKVQENYTDQFSQLGKKLIELSNAAENYHAVLTENRKLFNELQELKGNIRVFCRVRPFLPAQGAANTVVEYVGEDGELVVTNPTRPGKDGLRQFKFNKVYSPTASQADVFSDIRPLVRSVLDGYNVCIFAYGQTGSGKTYTMTGPDGSSEEDWGVNYRALNDLFKISQSRKGNISYEVGVQMVEIYNEQVLDLLSDDNSQKKYPFVLNPGILSTTQQNGLAVPDASMYPVTSTSDVITLMDIGLQNRAVGSTALNERSSRSHSIVTVHVRGKDLKTGSVLYGNLHLVDLAGSERVDRSEVTGDRLREAQHINKSLSSLGDVIFSLASKSSHVPYRNSKLTQLLQTSLGGRAKTLMFVQLNPDATSYSESMSTLKFAERVSGVELGAAKTSKEGKDVRDLMEQLASLKDTIARKDEEIERLQHQPQRLQKSMMRRKSIGHTDDINSDTGEYSSQSRYSVTDGESLASSAEAEYDERLSEITSDAASMGTQGSIDVTKRPPRISDRAKSVTAKSSTSVTRPLDKLRKVATRTTSTVAKVTGLTSSSKGLASSSIKKTGSTSSLAKSSKRWA

SEQ ID NO: 89737 - protein, 1027 aa, Arabidopsis thaliana
  peptide (1)..(1027): Ceres Seq. ID no. 12720264
  misc_feature (108)..(501): Pfam Name: Myosin tail Pfam Description: Myosin tail
  misc_feature (3)..(1027): Homolog of NCBI NO: 6714287 NR Description: F15H18.10 [Arabidopsis thaliana]
  misc_feature (286)..(966): Homolog of NCBI NO: 25404429 NR Description: kinesin-like protein, 73641-79546 [imported] -
  misc_feature (286)..(966): Homolog of NCBI NO: 30696876 NR Description: kinesin-related protein [Arabidopsis thaliana]
  misc_feature (566)..(966): Homolog of NCBI NO: 6633835 NR Description: F2K11.1 [Arabidopsis thaliana]
  misc_feature (324)..(564): Homolog of NCBI NO: 6633835 NR Description: F2K11.1 [Arabidopsis thaliana]
  misc_feature (88)..(291): Homolog of NCBI NO: 6633835 NR Description: F2K11.1 [Arabidopsis thaliana]
  misc_feature (340)..(635): Homolog of NCBI NO: 34909422 NR Description: putative kinesin-like protein [Oryza sativa
  misc_feature (704)..(945): Homolog of NCBI NO: 34909422 NR Description: putative kinesin-like protein [Oryza sativa
  misc_feature (309)..(918): Homolog of NCBI NO: 18421069 NR Description: kinesin-related protein; protein id: At5g27000.1
  misc_feature (309)..(918): Homolog of NCBI NO: 11358474 NR Description: kinesin-like heavy chain [validated] -
MRDQPGSPYGDSTPRSPFSPFSPLSVDDRHRNHADTKTPRSPFSPFSPLSGDERHKSLAESKFQQALASSGQLDPLSPGSMHHGGHKFHEVFQMKQGRYDLQASKISEMMKSSSLDNAPTQSLLSVLNGILDESIERKNGEIPQRVACLLRKVVQEIERRISTQAEHLRTQNNIFKTREEKYQSRINVLEALASGTGVEHEIATQQLRQIETEKSMWEEKKKHEEEDMVKLMKQNDQHNLEISALKQELETTKRKYEQQYSQIESQTKTEKSKWEEQKKNEEEDMDKLLKENDQFNLQISALRQELETTRKAYEQQCSQMESQTMVATTGLESRLKELEQEGKVVNTAKNALEERVKELEQMGKEAHSAKNALEEKIKQLQQMEKETKTANTSLEGKIQELEQNLVMWKTKVREMEKKSESNHQRWSQKELSYKSFIDNQSQALLELRSYSRSIKQEILKVQENYTDQFSQLGKKLIELSNAAENYHAVLTENRKLFNELQELKGNIRVFCRVRPFLPAQGAANTVVEYVGEDGELVVTNPTRPGKDGLRQFKFNKVYSPTASQADVFSDIRPLVRSVLDGYNVCIFAYGQTGSGKTYTMTGPDGSSEEDWGVNYRALNDLFKISQSRKGNISYEVGVQMVEIYNEQVLDLLSDDNSQKKYPFVLNPGILSTTQQNGLAVPDASMYPVTSTSDVITLMDIGLQNRAVGSTALNERSSRSHSIVTVHVRGKDLKTGSVLYGNLHLVDLAGSERVDRSEVTGDRLREAQHINKSLSSLGDVIFSLASKSSHVPYRNSKLTQLLQTSLGGRAKTLMFVQLNPDATSYSESMSTLKFAERVSGVELGAAKTSKEGKDVRDLMEQLASLKDTIARKDEEIERLQHQPQRLQKSMMRRKSIGHTDDINSDTGEYSSQSRYSVTDGESLASSAEAEYDERLSEITSDAASMGTQGSIDVTKRPPRISDRAKSVTAKSSTSVTRPLDKLRKVATRTTSTVAKVTGLTSSSKGLASSSIKKTGSTSSLAKSSKRWA

SEQ ID NO: 89738 - protein, 947 aa, Arabidopsis thaliana
  peptide (1)..(947): Ceres Seq. ID no. 12720265
  misc_feature (28)..(421): Pfam Name: Myosin tail Pfam Description: Myosin tail
  misc_feature (1)..(947): Homolog of NCBI NO: 6714287 NR Description: F15H18.10 [Arabidopsis thaliana]
  misc_feature (206)..(886): Homolog of NCBI NO: 25404429 NR Description: kinesin-like protein, 73641-79546 [imported] -
  misc_feature (206)..(886): Homolog of NCBI NO: 30696876 NR Description: kinesin-related protein [Arabidopsis thaliana]
  misc_feature (486)..(886): Homolog of NCBI NO: 6633835 NR Description: F2K11.1 [Arabidopsis thaliana]
  misc_feature (244)..(484): Homolog of NCBI NO: 6633835 NR Description: F2K11.1 [Arabidopsis thaliana]
  misc_feature (8)..(211): Homolog of NCBI NO: 6633835 NR Description: F2K11.1 [Arabidopsis thaliana]
  misc_feature (260)..(555): Homolog of NCBI NO: 34909422 NR Description: putative kinesin-like protein [Oryza sativa
  misc_feature (624)..(865): Homolog of NCBI NO: 34909422 NR Description: putative kinesin-like protein [Oryza sativa
  misc_feature (229)..(838): Homolog of NCBI NO: 18421069 NR Description: kinesin-related protein; protein id: At5g27000.1
  misc_feature (229)..(838): Homolog of NCBI NO: 11358474 NR Description: kinesin-like heavy chain [validated] -
MHHGGHKFHEVFQMKQGRYDLQASKISEMMKSSSLDNAPTQSLLSVLNGILDESIERKNGEIPQRVACLLRKVVQEIERRISTQAEHLRTQNNIFKTREEKYQSRINVLEALASGTGVEHEIATQQLRQIETEKSMWEEKKKHEEEDMVKLMKQNDQHNLEISALKQELETTKRKYEQQYSQIESQTKTEKSKWEEQKKNEEEDMDKLLKENDQFNLQISALRQELETTRKAYEQQCSQMESQTMVATTGLESRLKELEQEGKVVNTAKNALEERVKELEQMGKEAHSAKNALEEKIKQLQQMEKETKTANTSLEGKIQELEQNLVMWKTKVREMEKKSESNHQRWSQKELSYKSFIDNQSQALLELRSYSRSIKQEILKVQENYTDQFSQLGKKLIELSNAAENYHAVLTENRKLFNELQELKGNIRVFCRVRPFLPAQGAANTVVEYVGEDGELVVTNPTRPGKDGLRQFKFNKVYSPTASQADVFSDIRPLVRSVLDGYNVCIFAYGQTGSGKTYTMTGPDGSSEEDWGVNYRALNDLFKISQSRKGNISYEVGVQMVEIYNEQVLDLLSDDNSQKKYPFVLNPGILSTTQQNGLAVPDASMYPVTSTSDVITLMDIGLQNRAVGSTALNERSSRSHSIVTVHVRGKDLKTGSVLYGNLHLVDLAGSERVDRSEVTGDRLREAQHINKSLSSLGDVIFSLASKSSHVPYRNSKLTQLLQTSLGGRAKTLMFVQLNPDATSYSESMSTLKFAERVSGVELGAAKTSKEGKDVRDLMEQLASLKDTIARKDEEIERLQHQPQRLQKSMMRRKSIGHTDDINSDTGEYSSQSRYSVTDGESLASSAEAEYDERLSEITSDAASMGTQGSIDVTKRPPRISDRAKSVTAKSSTSVTRPLDKLRKVATRTTSTVAKVTGLTSSSKGLASSSIKKTGSTSSLAKSSKRWA

SEQ ID NO: 89739 - DNA, 1635 bp, Arabidopsis thaliana
  misc_feature (1)..(1635): Ceres Seq. ID no. 12720272
  misc_feature: MA Experiment ID: 20000306 Result: Down-regulated in Transcription
  misc_feature: MA Experiment 20000306 PARAMETER Experiment Name: At_Germinating_Seeds_Sub_P Parameter: Age (hr) Value: 6 vs. 0
  misc_feature: MA Experiment 20000306 PARAMETER Experiment Name: At_Germinating_Seeds_Sub_P Parameter: Organism Value: A. thaliana
  misc_feature: MA Experiment 20000306 PARAMETER Experiment Name: At_Germinating_Seeds_Sub_P Parameter: Plant Line Value: WS
  misc_feature: MA Experiment 20000306 PARAMETER Experiment Name: At_Germinating_Seeds_Sub_P Parameter: Tissue Value: Germinating Seeds
  misc_feature: MA Experiment ID: 20000307 Result: Down-regulated in Transcription
  misc_feature: MA Experiment 20000307 PARAMETER Experiment Name: At_Germinating_Seeds_Sub_P Parameter: Age (hr) Value: 24 vs. 0
  misc_feature: MA Experiment 20000307 PARAMETER Experiment Name: At_Germinating_Seeds_Sub_P Parameter: Organism Value: A. thaliana
  misc_feature: MA Experiment 20000307 PARAMETER Experiment Name: At_Germinating_Seeds_Sub_P Parameter: Plant Line Value: WS
  misc_feature: MA Experiment 20000307 PARAMETER Experiment Name: At_Germinating_Seeds_Sub_P Parameter: Tissue Value: Germinating Seeds
  misc_feature: MA Experiment ID: 20000328 Result: Up-regulated in Transcription
  misc_feature: MA Experiment 20000328 PARAMETER Experiment Name: At_42deg_Heat_Sub_P Parameter: Age (day) Value: 14
  misc_feature: MA Experiment 20000328 PARAMETER Experiment Name: At_42deg_Heat_Sub_P Parameter: Organism Value: A. thaliana
  misc_feature: MA Experiment 20000328 PARAMETER Experiment Name: At_42deg_Heat_Sub_P Parameter: Plant Line Value: WS
  misc_feature: MA Experiment 20000328 PARAMETER Experiment Name: At_42deg_Heat_Sub_P Parameter: Temperature (deg C) Value: 42 vs. 22
  misc_feature: MA Experiment 20000328 PARAMETER Experiment Name: At_42deg_Heat_Sub_P Parameter: Timepoint (hr) Value: 6
  misc_feature: MA Experiment 20000328 PARAMETER Experiment Name: At_42deg_Heat_Sub_P Parameter: Tissue Value: Aerial
  misc_feature: MA Experiment ID: 20000347 Result: Up-regulated in Transcription
  misc_feature: MA Experiment 20000347 PARAMETER Experiment Name: At_2mM_SA_Sub_P Parameter: Age (day) Value: 14
  misc_feature: MA Experiment 20000347 PARAMETER Experiment Name: At_2mM_SA_Sub_P Parameter: Organism Value: A. thaliana
  misc_feature: MA Experiment 20000347 PARAMETER Experiment Name: At_2mM_SA_Sub_P Parameter: Plant Line Value: WS
  misc_feature: MA Experiment 20000347 PARAMETER Experiment Name: At_2mM_SA_Sub_P Parameter: Timepoint (hr) Value: 6
  misc_feature: MA Experiment 20000347 PARAMETER Experiment Name: At_2mM_SA_Sub_P Parameter: Tissue Value: Aerial
  misc_feature: MA Experiment 20000347 PARAMETER Experiment Name: At_2mM_SA_Sub_P Parameter: Treatment Value: 2mM SA vs. No Treatment
  misc_feature: MA Experiment ID: 20000352 Result: Up-regulated in Transcription
  misc_feature: MA Experiment 20000352 PARAMETER Experiment Name: At_Drought_Sub_P Parameter: Age (day) Value: 7
  misc_feature: MA Experiment 20000352 PARAMETER Experiment Name: At_Drought_Sub_P Parameter: Organism Value: A. thaliana
  misc_feature: MA Experiment 20000352 PARAMETER Experiment Name: At_Drought_Sub_P Parameter: Plant Line Value: WS
  misc_feature: MA Experiment 20000352 PARAMETER Experiment Name: At_Drought_Sub_P Parameter: Timepoint (hr) Value: 6
  misc_feature: MA Experiment 20000352 PARAMETER Experiment Name: At_Drought_Sub_P Parameter: Tissue Value: Whole Plant
  misc_feature: MA Experiment 20000352 PARAMETER Experiment Name: At_Drought_Sub_P Parameter: Treatment Value: Drought vs. No Drought
  misc_feature: MA Experiment ID: 20001807 Result: Down-regulated in Transcription
  misc_feature: MA Experiment 20001807 PARAMETER Experiment Name: At_50mM_NH4NO3_L-to-H_Sub_P Parameter: Timepoint (hr) Value: 6
  misc_feature: MA Experiment 20001807 PARAMETER Experiment Name: At_50mM_NH4NO3_L-to-H_Sub_P Parameter: Tissue Value: Leaf
  misc_feature: MA Experiment 20001807 PARAMETER Experiment Name: At_50mM_NH4NO3_L-to-H_Sub_P Parameter: Treatment Value: 50mM NH4NO3 vs 100mM Mannitol
aaaacattccggcataaacaaaaaaaagtcccactagaaaagctcattatgaaagtgaacgaggaaaacaacaagccgacaaagacccatgtcttaatcttcccatttccggcgcaaggtcacatgattcccctcctcgacttcacccaccgccttgctctccgcggcggcgccgccttaaaaataaccgtcctagtcactccaaaaaaccttccttttctctctccgcttctctccgccgtagttaacatcgaaccacttatcctcccttttccctcccacccttcaatcccctccggcgtcgaaaacgtccaagacttacctccttcaggcttccctttaatgatccacgcgcttggtaatctccacgcgccgcttatctcttggattacttctcacccttctcctccagtagccatcgtatctgatttcttccttggttggaccaaaaacctcggaatccctcgtttcgatttctctccctccgctgctatcacttgctgcatactcaatactctctggatcgaaatgcccaccaagatcaacgaagatgacgataacgagatcctccactttcccaagatcccgaattgtccaaaataccgttttgatcagatctcctctctttacagaagttacgttcacggagatccagcttgggagttcataagagactcctttagagataacgtggcgagttggggactcgtcgtgaactcgttcaccgccatggaaggtgtttatctcgaacatcttaagcgagagatgggccatgatcgtgtatgggctgtaggcccaattattccgttatctggggataaccgtggtggcccgacttctgtttctgttgatcacgtgatgtcgtggcttgacgcacgtgaggataaccacgtggtgtacgtgtgctttggaagtcaagtagttttgactaaagagcagactcttgcactcgcctctgggcttgagaaaagcggcgtccatttcatatgggccgtaaaggagcccgttgagaaagactcaacacgtggcaacatcctggacggtttcgacgatcgcgtggctgggagaggtctggtgatcagaggatgggctccacaagtagctgtgctacgtcaccgagccgttggcgcgtttttaacgcactgtggttggaactctgtggtggaggcggttgtcgccggcgttttgatgctgacgtggccgatgagagctgaccagtacactgacgcgtctctggtggttgatgagttgaaagtaggtgtgcgtgcttgcgaaggacctgacacggtgcctgacccggacgagttagctcgagttttcgctgattccgtgaccggaaatcaaacggagaggatcaaagccgtggagctgaggaaagcagcgttggatgcgattcaagaacgtgggagctcagtgaatgatttagatggatttatccaacatgtcgttagtttaggactaaacaaatgatttgatttagtcaaacaaaattctaattatggtttttttttccttaatacagtatgttcctcacgaactaaaaaaatatgcatgagtgtattttattaaattgttgtaagatgataaataagtgtttgtgattgtgattcataaataagtgtttgtgatttttgt

SEQ ID NO: 89740 - protein, 489 aa, Arabidopsis thaliana
  peptide (1)..(489): Ceres Seq. ID no. 12720273
  misc_feature (17)..(489): Homolog of NCBI NO: 22330612 NR Description: putative glucosyltransferase; protein id:
  misc_feature (17)..(482): Homolog of NCBI NO: 25406301 NR Description: protein glucosyltransferase F2P9.25 [imported] - thaliana >gi|12325153|gb|AAG52529.1|AC016662_23 putative
  misc_feature (42)..(489): Homolog of NCBI NO: 20260128 NR Description: putative glucosyltransferase [Arabidopsis
  misc_feature (28)..(457): Homolog of NCBI NO: 15223779 NR Description: putative glucosyl transferase; protein id: [Arabidopsis thaliana] >gi|25286807|pir||H96549 hypothetical
  misc_feature (15)..(480): Homolog of NCBI NO: 15242769 NR Description: putative protein; protein id: At5g03490.1
  misc_feature (43)..(489): Homolog of NCBI NO: 19911191 NR Description: glucosyltransferase like protein [Vigna angularis]
  misc_feature (23)..(485): Homolog of NCBI NO: 2232354 NR Description: UDPG glucosyltransferase [Solanum berthaultii]
  misc_feature (52)..(485): Homolog of NCBI NO: 10241430 NR Description: putative glucosyltransferase [Oryza sativa
  misc_feature (222)..(479): Homolog of NCBI NO: 21536579 NR Description: unknown [Arabidopsis thaliana]
  misc_feature (28)..(176): Homolog of NCBI NO: 21536579 NR Description: unknown [Arabidopsis thaliana]
KTFRHKQKKVPLEKLIMKVNEENNKPTKTHVLIFPFPAQGHMIPLLDFTHRLALRGGAALKITVLVTPKNLPFLSPLLSAVVNIEPLILPFPSHPSIPSGVENVQDLPPSGFPLMIHALGNLHAPLISWITSHPSPPVAIVSDFFLGWTKNLGIPRFDFSPSAAITCCILNTLWIEMPTKINEDDDNEILHFPKIPNCPKYRFDQISSLYRSYVHGDPAWEFIRDSFRDNVASWGLVVNSFTAMEGVYLEHLKREMGHDRVWAVGPIIPLSGDNRGGPTSVSVDHVMSWLDAREDNHVVYVCFGSQVVLTKEQTLALASGLEKSGVHFIWAVKEPVEKDSTRGNILDGFDDRVAGRGLVIRGWAPQVAVLRHRAVGAFLTHCGWNSVVEAVVAGVLMLTWPMRADQYTDASLVVDELKVGVRACEGPDTVPDPDELARVFADSVTGNQTERIKAVELRKAALDAIQERGSSVNDLDGFIQHVVSLGLNK

SEQ ID NO: 89741 - protein, 473 aa, Arabidopsis thaliana
  peptide (1)..(473): Ceres Seq. ID no. 12720274
  misc_feature (1)..(473): Homolog of NCBI NO: 22330612 NR Description: putative glucosyltransferase; protein id:
  misc_feature (1)..(466): Homolog of NCBI NO: 25406301 NR Description: protein glucosyltransferase F2P9.25 [imported] - thaliana >gi|12325153|gb|AAG52529.1|AC016662_23 putative
  misc_feature (26)..(473): Homolog of NCBI NO: 20260128 NR Description: putative glucosyltransferase [Arabidopsis
  misc_feature (12)..(441): Homolog of NCBI NO: 15223779 NR Description: putative glucosyl transferase; protein id: [Arabidopsis thaliana] >gi|25286807|pir||H96549 hypothetical
  misc_feature (1)..(464): Homolog of NCBI NO: 15242769 NR Description: putative protein; protein id: At5g03490.1
  misc_feature (27)..(473): Homolog of NCBI NO: 19911191 NR Description: glucosyltransferase like protein [Vigna angularis]
  misc_feature (7)..(469): Homolog of NCBI NO: 2232354 NR Description: UDPG glucosyltransferase [Solanum berthaultii]
  misc_feature (36)..(469): Homolog of NCBI NO: 10241430 NR Description: putative glucosyltransferase [Oryza sativa
  misc_feature (206)..(463): Homolog of NCBI NO: 21536579 NR Description: unknown [Arabidopsis thaliana]
  misc_feature (12)..(160): Homolog of NCBI NO: 21536579 NR Description: unknown [Arabidopsis thaliana]
MKVNEENNKPTKTHVLIFPFPAQGHMIPLLDFTHRLALRGGAALKITVLVTPKNLPFLSPLLSAVVNIEPLILPFPSHPSIPSGVENVQDLPPSGFPLMIHALGNLHAPLISWITSHPSPPVAIVSDFFLGWTKNLGIPRFDFSPSAAITCCILNTLWIEMPTKINEDDDNEILHFPKIPNCPKYRFDQISSLYRSYVHGDPAWEFIRDSFRDNVASWGLVVNSFTAMEGVYLEHLKREMGHDRVWAVGPIIPLSGDNRGGPTSVSVDHVMSWLDAREDNHVVYVCFGSQVVLTKEQTLALASGLEKSGVHFIWAVKEPVEKDSTRGNILDGFDDRVAGRGLVIRGWAPQVAVLRHRAVGAFLTHCGWNSVVEAVVAGVLMLTWPMRADQYTDASLVVDELKVGVRACEGPDTVPDPDELARVFADSVTGNQTERIKAVELRKAALDAIQERGSSVNDLDGFIQHVVSLGLNK

SEQ ID NO: 89742 - protein, 448 aa, Arabidopsis thaliana
  peptide (1)..(448): Ceres Seq. ID no. 12720275
  misc_feature (1)..(448): Homolog of NCBI NO: 22330612 NR Description: putative glucosyltransferase; protein id:
  misc_feature (1)..(441): Homolog of NCBI NO: 25406301 NR Description: protein glucosyltransferase F2P9.25 [imported] - thaliana >gi|12325153|gb|AAG52529.1|AC016662_23 putative
  misc_feature (1)..(448): Homolog of NCBI NO: 20260128 NR Description: putative glucosyltransferase [Arabidopsis
  misc_feature (1)..(416): Homolog of NCBI NO: 15223779 NR Description: putative glucosyl transferase; protein id: [Arabidopsis thaliana] >gi|25286807|pir||H96549 hypothetical
  misc_feature (1)..(439): Homolog of NCBI NO: 15242769 NR Description: putative protein; protein id: At5g03490.1
  misc_feature (2)..(448): Homolog of NCBI NO: 19911191 NR Description: glucosyltransferase like protein [Vigna angularis]
  misc_feature (1)..(444): Homolog of NCBI NO: 2232354 NR Description: UDPG glucosyltransferase [Solanum berthaultii]
  misc_feature (11)..(444): Homolog of NCBI NO: 10241430 NR Description: putative glucosyltransferase [Oryza sativa
  misc_feature (181)..(438): Homolog of NCBI NO: 21536579 NR Description: unknown [Arabidopsis thaliana]
  misc_feature (1)..(135): Homolog of NCBI NO: 21536579 NR Description: unknown [Arabidopsis thaliana]
MIPLLDFTHRLALRGGAALKITVLVTPKNLPFLSPLLSAVVNIEPLILPFPSHPSIPSGVENVQDLPPSGFPLMIHALGNLHAPLISWITSHPSPPVAIVSDFFLGWTKNLGIPRFDFSPSAAITCCILNTLWIEMPTKINEDDDNEILHFPKIPNCPKYRFDQISSLYRSYVHGDPAWEFIRDSFRDNVASWGLVVNSFTAMEGVYLEHLKREMGHDRVWAVGPIIPLSGDNRGGPTSVSVDHVMSWLDAREDNHVVYVCFGSQVVLTKEQTLALASGLEKSGVHFIWAVKEPVEKDSTRGNILDGFDDRVAGRGLVIRGWAPQVAVLRHRAVGAFLTHCGWNSVVEAVVAGVLMLTWPMRADQYTDASLVVDELKVGVRACEGPDTVPDPDELARVFADSVTGNQTERIKAVELRKAALDAIQERGSSVNDLDGFIQHVVSLGLNK

SEQ ID NO: 89743 - DNA, 1581 bp, Arabidopsis thaliana
  misc_feature (1)..(1581): Ceres Seq. ID no. 12720281
  misc_feature: MA Experiment ID: 20000185 Result: Up-regulated in Transcription
  misc_feature: MA Experiment 20000185 PARAMETER Experiment Name: At_Roots__P Parameter: Age (day) Value: 7 vs. 21
  misc_feature: MA Experiment 20000185 PARAMETER Experiment Name: At_Roots__P Parameter: Organism Value: A. thaliana
  misc_feature: MA Experiment 20000185 PARAMETER Experiment Name: At_Roots__P Parameter: Tissue Value: Roots vs. Whole Plant
  misc_feature: MA Experiment ID: 20000439 Result: Up-regulated in Transcription
  misc_feature: MA Experiment 20000439 PARAMETER Experiment Name: At_Roots__P Parameter: Age (day) Value: 14 vs. 21
  misc_feature: MA Experiment 20000439 PARAMETER Experiment Name: At_Roots__P Parameter: Organism Value: A. thaliana
  misc_feature: MA Experiment 20000439 PARAMETER Experiment Name: At_Roots__P Parameter: Tissue Value: Roots vs. Whole Plant
atggattcgaaggagatggttgtggaagaaatcatgagaattcacagatctctaccattgagaccagagatcgacgatgtagaaacggcaacttctctgatacaaaacgttgaaaaggaagatcggaatcgtttagaagccattgataaacttgttaaaacctcttcctctgaggttcctttagagcttttcaatgtgttcaaggagatgaagaaaagtcttgttcgtttccagagcacagaacagacaagagaagctacgaaaattctcgatctggaatctgtacacgttgtgttcgacgaattgattcagagagcttctttttgcattgcttctcccaacagcaccaccgctttgcctcggtctgttccggtaccggcgccggttgtttcttctgatgagattcctttcaagtcaaaggaaattatctcgcgtgacgatacgtttgtgaagaaagctaaatcttcgttttatagtgatgggttgttagctcctagtaagccccaggttctggattcaacacttcatcaggctaagaacgttgcaggcaatgatggggagaagttgagtctcataaaacttgctagtttgattgaggtatctgccaagaaagctactcaagagctaaatttgcagcacaggctgatggatcagctcgaatggcttccggattctctaggcaagttatcgagtcttgtcaggctagatctgtctgagaattgtatcatggtactaccggcaaccataggagggcttatttctttgacgaggcttgatttgcattcgaatagaattggtcagctccctgagtctataggagatttgctaaacttggtcaacctgaatcttagtggaaaccaattatcatctcttccatcgtcatttaatagattgatacatcttgaggaacttgatttgagctctaacagcctctctattctccctgaatctattggttctctcgtgagcctaaagaagctcgatgttgaaacaaataacatcgaagagattccacatagtatctctggctgttcttccatggaagaactccgtgcagattacaacagacttaaagctcttccagaagctgttgggaagttatctaccttagagattctgactgtccgttataataacattcggcagctacccacaacaatgtcctccatggctaacctcaaagagctagatgtgagtttcaacgagcttgagtcagtaccagagagtttatgttatgccaaaacacttgttaagcttaacatcgggaacaattttgccaacctaagatcactcccgggattaataggcaaccttgagaagctagaagagcttgatatgagcaataaccagatccgtttccttccctactcttttaaaacgctttcaaatctgcgtgttcttcaaacagaacaaaatccacttgaagagcttccaagggatataaccgaaaaaggcgcacaggccgtggttcaatacatgaatgatcttgtggaggcaagaaacaccaaatctcaaagaactaagccgaaaaagagttgggttaacagtatttgcttcttctgcaagtcctctaccaactag

SEQ ID NO: 89744 - protein, 526 aa, Arabidopsis thaliana
  peptide (1)..(526): Ceres Seq. ID no. 12720282
  misc_feature (254)..(276): Pfam Name: Leucine Rich Repeat Pfam Description: Leucine Rich Repeat
  misc_feature (1)..(526): Homolog of NCBI NO: 15227838 NR Description: unknown protein; protein id: At2g17440.1
  misc_feature (1)..(524): Homolog of NCBI NO: 15237011 NR Description: putative protein; protein id: At4g35470.1, by cDNA: gi_18252196 [Arabidopsis thaliana]
  misc_feature (1)..(522): Homolog of NCBI NO: 20148766 NR Description: PSR9 [Brassica nigra]
  misc_feature (1)..(524): Homolog of NCBI NO: 37537048 NR Description: putative leucine-rich repeat protein [Oryza
  misc_feature (146)..(493): Homolog of NCBI NO: 22330985 NR Description: hypothetical protein; protein id: At3g11330.1, by cDNA: gi_18175637 [Arabidopsis thaliana] unknown protein [Arabidopsis thaliana]
  misc_feature (228)..(493): Homolog of NCBI NO: 30688342 NR Description: leucine rich repeat protein family [Arabidopsis
  misc_feature (168)..(493): Homolog of NCBI NO: 15239256 NR Description: putative protein; protein id: At5g05850.1 thaliana] >gi|9759110|dbj|BAB09679.1|
  misc_feature (193)..(481): Homolog of NCBI NO: 24216020 NR Description: Leucine-rich repeat containing protein interrogans serovar lai str. 56601]
  misc_feature (101)..(504): Homolog of NCBI NO: 18391461 NR Description: expressed protein; protein id: At1g12970.1, by cDNA: gi_17063164 [Arabidopsis thaliana] At1g12970/F13K23_18 [Arabidopsis thaliana]
  misc_feature (199)..(509): Homolog of NCBI NO: 24215150 NR Description: putative outermembrane protein [Leptospira serovar lai str. 56601] >gi|24196220|gb|AAN49649.1|AE011413_3 outermembrane protein [Leptospira interrogans serovar lai str.
MDSKEMVVEEIMRIHRSLPLRPEIDDVETATSLIQNVEKEDRNRLEAIDKLVKTSSSEVPLELFNVFKEMKKSLVRFQSTEQTREATKILDLESVHVVFDELIQRASFCIASPNSTTALPRSVPVPAPVVSSDEIPFKSKEIISRDDTFVKKAKSSFYSDGLLAPSKPQVLDSTLHQAKNVAGNDGEKLSLIKLASLIEVSAKKATQELNLQHRLMDQLEWLPDSLGKLSSLVRLDLSENCIMVLPATIGGLISLTRLDLHSNRIGQLPESIGDLLNLVNLNLSGNQLSSLPSSFNRLIHLEELDLSSNSLSILPESIGSLVSLKKLDVETNNIEEIPHSISGCSSMEELRADYNRLKALPEAVGKLSTLEILTVRYNNIRQLPTTMSSMANLKELDVSFNELESVPESLCYAKTLVKLNIGNNFANLRSLPGLIGNLEKLEELDMSNNQIRFLPYSFKTLSNLRVLQTEQNPLEELPRDITEKGAQAVVQYMNDLVEARNTKSQRTKPKKSWVNSICFFCKSSTN

SEQ ID NO: 89745 - protein, 521 aa, Arabidopsis thaliana
  peptide (1)..(521): Ceres Seq. ID no. 12720283
  misc_feature (249)..(271): Pfam Name: Leucine Rich Repeat Pfam Description: Leucine Rich Repeat
  misc_feature (1)..(521): Homolog of NCBI NO: 15227838 NR Description: unknown protein; protein id: At2g17440.1
  misc_feature (1)..(519): Homolog of NCBI NO: 15237011 NR Description: putative protein; protein id: At4g35470.1, by cDNA: gi_18252196 [Arabidopsis thaliana]
  misc_feature (1)..(517): Homolog of NCBI NO: 20148766 NR Description: PSR9 [Brassica nigra]
  misc_feature (1)..(519): Homolog of NCBI NO: 37537048 NR Description: putative leucine-rich repeat protein [Oryza
  misc_feature (141)..(488): Homolog of NCBI NO: 22330985 NR Description: hypothetical protein; protein id: At3g11330.1, by cDNA: gi_18175637 [Arabidopsis thaliana] unknown protein [Arabidopsis thaliana]
  misc_feature (223)..(488): Homolog of NCBI NO: 30688342 NR Description: leucine rich repeat protein family [Arabidopsis
  misc_feature (163)..(488): Homolog of NCBI NO: 15239256 NR Description: putative protein; protein id: At5g05850.1 thaliana] >gi|9759110|dbj|BAB09679.1|
  misc_feature (188)..(476): Homolog of NCBI NO: 24216020 NR Description: Leucine-rich repeat containing protein interrogans serovar lai str. 56601]
  misc_feature (96)..(499): Homolog of NCBI NO: 18391461 NR Description: expressed protein; protein id: At1g12970.1, by cDNA: gi_17063164 [Arabidopsis thaliana] At1g12970/F13K23_18 [Arabidopsis thaliana]
  misc_feature (194)..(504): Homolog of NCBI NO: 24215150 NR Description: putative outermembrane protein [Leptospira serovar lai str. 56601] >gi|24196220|gb|AAN49649.1|AE011413_3 outermembrane protein [Leptospira interrogans serovar lai str.
MVVEEIMRIHRSLPLRPEIDDVETATSLIQNVEKEDRNRLEAIDKLVKTSSSEVPLELFNVFKEMKKSLVRFQSTEQTREATKILDLESVHVVFDELIQRASFCIASPNSTTALPRSVPVPAPVVSSDEIPFKSKEIISRDDTFVKKAKSSFYSDGLLAPSKPQVLDSTLHQAKNVAGNDGEKLSLIKLASLIEVSAKKATQELNLQHRLMDQLEWLPDSLGKLSSLVRLDLSENCIMVLPATIGGLISLTRLDLHSNRIGQLPESIGDLLNLVNLNLSGNQLSSLPSSFNRLIHLEELDLSSNSLSILPESIGSLVSLKKLDVETNNIEEIPHSISGCSSMEELRADYNRLKALPEAVGKLSTLEILTVRYNNIRQLPTTMSSMANLKELDVSFNELESVPESLCYAKTLVKLNIGNNFANLRSLPGLIGNLEKLEELDMSNNQIRFLPYSFKTLSNLRVLQTEQNPLEELPRDITEKGAQAVVQYMNDLVEARNTKSQRTKPKKSWVNSICFFCKSSTN

SEQ ID NO: 89746 - protein, 515 aa, Arabidopsis thaliana
  peptide (1)..(515): Ceres Seq. ID no. 12720284
  misc_feature (243)..(265): Pfam Name: Leucine Rich Repeat Pfam Description: Leucine Rich Repeat
  misc_feature (1)..(515): Homolog of NCBI NO: 15227838 NR Description: unknown protein; protein id: At2g17440.1
  misc_feature (1)..(513): Homolog of NCBI NO: 15237011 NR Description: putative protein; protein id: At4g35470.1, by cDNA: gi_18252196 [Arabidopsis thaliana]
  misc_feature (1)..(511): Homolog of NCBI NO: 20148766 NR Description: PSR9 [Brassica nigra]
  misc_feature (1)..(513): Homolog of NCBI NO: 37537048 NR Description: putative leucine-rich repeat protein [Oryza
  misc_feature (135)..(482): Homolog of NCBI NO: 22330985 NR Description: hypothetical protein; protein id: At3g11330.1, by cDNA: gi_18175637 [Arabidopsis thaliana] unknown protein [Arabidopsis thaliana]
  misc_feature (217)..(482): Homolog of NCBI NO: 30688342 NR Description: leucine rich repeat protein family [Arabidopsis
  misc_feature (157)..(482): Homolog of NCBI NO: 15239256 NR Description: putative protein; protein id: At5g05850.1 thaliana] >gi|9759110|dbj|BAB09679.1|
  misc_feature (182)..(470): Homolog of NCBI NO: 24216020 NR Description: Leucine-rich repeat containing protein interrogans serovar lai str. 56601]
  misc_feature (90)..(493): Homolog of NCBI NO: 18391461 NR Description: expressed protein; protein id: At1g12970.1, by cDNA: gi_17063164 [Arabidopsis thaliana] At1g12970/F13K23_18 [Arabidopsis thaliana]
  misc_feature (188)..(498): Homolog of NCBI NO: 24215150 NR Description: putative outermembrane protein [Leptospira serovar lai str. 56601] >gi|24196220|gb|AAN49649.1|AE011413_3 outermembrane protein [Leptospira interrogans serovar lai str.
MRIHRSLPLRPEIDDVETATSLIQNVEKEDRNRLEAIDKLVKTSSSEVPLELFNVFKEMKKSLVRFQSTEQTREATKILDLESVHVVFDELIQRASFCIASPNSTTALPRSVPVPAPVVSSDEIPFKSKEIISRDDTFVKKAKSSFYSDGLLAPSKPQVLDSTLHQAKNVAGNDGEKLSLIKLASLIEVSAKKATQELNLQHRLMDQLEWLPDSLGKLSSLVRLDLSENCIMVLPATIGGLISLTRLDLHSNRIGQLPESIGDLLNLVNLNLSGNQLSSLPSSFNRLIHLEELDLSSNSLSILPESIGSLVSLKKLDVETNNIEEIPHSISGCSSMEELRADYNRLKALPEAVGKLSTLEILTVRYNNIRQLPTTMSSMANLKELDVSFNELESVPESLCYAKTLVKLNIGNNFANLRSLPGLIGNLEKLEELDMSNNQIRFLPYSFKTLSNLRVLQTEQNPLEELPRDITEKGAQAVVQYMNDLVEARNTKSQRTKPKKSWVNSICFFCKSSTN

SEQ ID NO: 89747 - DNA, 1305 bp, Arabidopsis thaliana
  misc_feature (1)..(1305): Ceres Seq. ID no. 12720301
  misc_feature: MA Experiment ID: 20000184 Result: Down-regulated in Transcription
  misc_feature: MA Experiment 20000184 PARAMETER Experiment Name: At_Shoots__P Parameter: Age (day) Value: 7
  misc_feature: MA Experiment 20000184 PARAMETER Experiment Name: At_Shoots__P Parameter: Tissue Value: Shoots vs. Whole Plant
  misc_feature: MA Experiment ID: 20000286 Result: Down-regulated in Transcription
  misc_feature: MA Experiment 20000286 PARAMETER Experiment Name: At_Open_Flower_P Parameter: Age (day) Value: 21
  misc_feature: MA Experiment 20000286 PARAMETER Experiment Name: At_Open_Flower_P Parameter: Plant Line Value: WS
  misc_feature: MA Experiment 20000286 PARAMETER Experiment Name: At_Open_Flower_P Parameter: Tissue Value: Half Open vs. Whole Plant
  misc_feature: MA Experiment ID: 20000437 Result: Up-regulated in Transcription
  misc_feature: MA Experiment 20000437 PARAMETER Experiment Name: At_Drought_P Parameter: Age (day) Value: 8
  misc_feature: MA Experiment 20000437 PARAMETER Experiment Name: At_Drought_P Parameter: Organism Value: A. thaliana
  misc_feature: MA Experiment 20000437 PARAMETER Experiment Name: At_Drought_P Parameter: Plant Line Value: WS
  misc_feature: MA Experiment 20000437 PARAMETER Experiment Name: At_Drought_P Parameter: Timepoint (hr) Value: 24
  misc_feature: MA Experiment 20000437 PARAMETER Experiment Name: At_Drought_P Parameter: Tissue Value: Whole Plant
  misc_feature: MA Experiment 20000437 PARAMETER Experiment Name: At_Drought_P Parameter: Treatment Value: Drought vs. No Drought
  misc_feature: MA Experiment ID: 20001248 Result: Up-regulated in Transcription
  misc_feature: MA Experiment 20001248 PARAMETER Experiment Name: At_Far-red-induction_P Parameter: Age (day) Value: 7
  misc_feature: MA Experiment 20001248 PARAMETER Experiment Name: At_Far-red-induction_P Parameter: Light Value: Far-red vs. White
  misc_feature: MA Experiment 20001248 PARAMETER Experiment Name: At_Far-red-induction_P Parameter: Organism Value: A. thaliana
  misc_feature: MA Experiment 20001248 PARAMETER Experiment Name: At_Far-red-induction_P Parameter: Plant Line Value: Columbia
  misc_feature: MA Experiment 20001248 PARAMETER Experiment Name: At_Far-red-induction_P Parameter: Timepoint (hr) Value: 4
  misc_feature: MA Experiment 20001248 PARAMETER Experiment Name: At_Far-red-induction_P Parameter: Tissue Value: Whole Plant
  misc_feature: MA Experiment ID: 20001450 Result: Up-regulated in Transcription
  misc_feature: MA Experiment 20001450 PARAMETER Experiment Name: At_Far-red-induction_P Parameter: Age (day) Value: 7
  misc_feature: MA Experiment 20001450 PARAMETER Experiment Name: At_Far-red-induction_P Parameter: Light Value: Far-red vs. White
  misc_feature: MA Experiment 20001450 PARAMETER Experiment Name: At_Far-red-induction_P Parameter: Organism Value: A. thaliana
  misc_feature: MA Experiment 20001450 PARAMETER Experiment Name: At_Far-red-induction_P Parameter: Plant Line Value: Columbia
  misc_feature: MA Experiment 20001450 PARAMETER Experiment Name: At_Far-red-induction_P Parameter: Timepoint (hr) Value: 8
  misc_feature: MA Experiment 20001450 PARAMETER Experiment Name: At_Far-red-induction_P Parameter: Tissue Value: Whole Plant
atcgctcgctgcctttctctttcacagtcagcgctcttgaacggagaatctcagtcgcgccgtcaactttttgttgagaagagatatcatctgttttcgatccaaagaatagaaagcttggattccgaaatctccctttttgcttccccaattcgttttcctttacaagctcggcgcttgatctcgctatctctcagagagctgagagctgaggatattggaaatttggaaggtggaatctcaaatggctgaacttcctggtcaaataagacatataggcggtcgaatgagtcaactgctagagcagatatatgggttttcgagaagatctttgtttcgggtcatatctatgggtcctataccttgtcatattgcctttatcatggatggaaatcggagatatgcaaagaagtgtggtcttttagatgggtctggtcacaaagcggggttttctgcgcttatgtcgatgctgcaatactgctacgagctgggtatcaagtatgtaacgatatacgcatttagcatagataattttagaagaaaacctgaggaggttgagtctgtaatggatttgatgctggaaaagataaagtctttgcttgaaaaagagagtattgtgcatcagtatgggattcgggtctattttatcggtaacttagcgcttctaaatgaccaagtgagagctgctgcagaaaaagtcatgaaagccacagctaagaatagtcgggtagtgcttctcatttgcattgcctataactcgacagatgagatcgtacaagctgtcaagaaatcttgtattaacaagtcagacaatattgaagcatctaattataaacacgaggatagcgatagtgatatagaaggaacagatatggagaaccaagagaagaagatacagttggtggatattgaggagaatatgcagatgagcgtggcgccgaatcctgatatactcatcaggagttcaggagagacgaggctgagcaattttctcttatggcaaacaggtaatacccagctctgctctccggctgctctgtggcctgagattggtttgaggcatctgctctgggctatattgaacttccaaagaaatcattcatacttggaaaagaggaagaaacaattatgattgtcttgaaaggagactagtgaaggatatacaaaagctctcttctctatttggctttgtaatgtgatgtgatgctcttgtggtatactatcaaaaggaaacttgggattacatagaacaagcaatgtattttacacacgaactcatttgagtttttctttatgaatccttaa

SEQ ID NO: 89748 - protein, 295 aa, Arabidopsis thaliana
  peptide (1)..(295): Ceres Seq. ID no. 12720302
  misc_feature (46)..(290): Pfam Name: Putative undecaprenyl diphosphate synthase Pfam Description: Putative undecaprenyl diphosphate synthase
  misc_feature (1)..(295): Homolog of NCBI NO: 18398467 NR Description: undecaprenyl pyrophosphate synthetase (UPP family; protein id: At2g17570.1, supported by cDNA: gi_14423545, by cDNA: gi_20336658 [Arabidopsis thaliana]
  misc_feature (1)..(295): Homolog of NCBI NO: 20336659 NR Description: hypothetical protein [Arabidopsis thaliana]
  misc_feature (36)..(295): Homolog of NCBI NO: 25314045 NR Description: hypothetical protein At2g17570 [imported] -
  misc_feature (75)..(295): Homolog of NCBI NO: 14423546 NR Description: Unknown protein [Arabidopsis thaliana]
  misc_feature (16)..(294): Homolog of NCBI NO: 23491567 NR Description: cis-prenyltransferase [Periploca sepium]
  misc_feature (25)..(295): Homolog of NCBI NO: 16751459 NR Description: cis-prenyltransferase [Hevea brasiliensis]
  misc_feature (25)..(295): Homolog of NCBI NO: 20563020 NR Description: cis-prenyltransferase1 [Hevea brasiliensis]
  misc_feature (17)..(295): Homolog of NCBI NO: 22213587 NR Description: cis-prenyltransferase 2 [Hevea brasiliensis]
  misc_feature (25)..(295): Homolog of NCBI NO: 20563022 NR Description: cis-prenyltransferase2 [Hevea brasiliensis]
  misc_feature (25)..(295): Homolog of NCBI NO: 22213585 NR Description: cis-prenyltransferase 1 [Hevea brasiliensis]
MAELPGQIRHIGGRMSQLLEQIYGFSRRSLFRVISMGPIPCHIAFIMDGNRRYAKKCGLLDGSGHKAGFSALMSMLQYCYELGIKYVTIYAFSIDNFRRKPEEVESVMDLMLEKIKSLLEKESIVHQYGIRVYFIGNLALLNDQVRAAAEKVMKATAKNSRVVLLICIAYNSTDEIVQAVKKSCINKSDNIEASNYKHEDSDSDIEGTDMENQEKKIQLVDIEENMQMSVAPNPDILIRSSGETRLSNFLLWQTGNTQLCSPAALWPEIGLRHLLWAILNFQRNHSYLEKRKKQL

SEQ ID NO: 89749 - protein, 281 aa, Arabidopsis thaliana
  peptide (1)..(281): Ceres Seq. ID no. 12720303
  misc_feature (32)..(276): Pfam Name: Putative undecaprenyl diphosphate synthase Pfam Description: Putative undecaprenyl diphosphate synthase
  misc_feature (1)..(281): Homolog of NCBI NO: 18398467 NR Description: undecaprenyl pyrophosphate synthetase (UPP family; protein id: At2g17570.1, supported by cDNA: gi_14423545, by cDNA: gi_20336658 [Arabidopsis thaliana]
  misc_feature (1)..(281): Homolog of NCBI NO: 20336659 NR Description: hypothetical protein [Arabidopsis thaliana]
  misc_feature (22)..(281): Homolog of NCBI NO: 25314045 NR Description: hypothetical protein At2g17570 [imported] -
  misc_feature (61)..(281): Homolog of NCBI NO: 14423546 NR Description: Unknown protein [Arabidopsis thaliana]
  misc_feature (2)..(280): Homolog of NCBI NO: 23491567 NR Description: cis-prenyltransferase [Periploca sepium]
  misc_feature (11)..(281): Homolog of NCBI NO: 16751459 NR Description: cis-prenyltransferase [Hevea brasiliensis]
  misc_feature (11)..(281): Homolog of NCBI NO: 20563020 NR Description: cis-prenyltransferase1 [Hevea brasiliensis]
  misc_feature (3)..(281): Homolog of NCBI NO: 22213587 NR Description: cis-prenyltransferase 2 [Hevea brasiliensis]
  misc_feature (11)..(281): Homolog of NCBI NO: 20563022 NR Description: cis-prenyltransferase2 [Hevea brasiliensis]
  misc_feature (11)..(281): Homolog of NCBI NO: 22213585 NR Description: cis-prenyltransferase 1 [Hevea brasiliensis]
MSQLLEQIYGFSRRSLFRVISMGPIPCHIAFIMDGNRRYAKKCGLLDGSGHKAGFSALMSMLQYCYELGIKYVTIYAFSIDNFRRKPEEVESVMDLMLEKIKSLLEKESIVHQYGIRVYFIGNLALLNDQVRAAAEKVMKATAKNSRVVLLICIAYNSTDEIVQAVKKSCINKSDNIEASNYKHEDSDSDIEGTDMENQEKKIQLVDIEENMQMSVAPNPDILIRSSGETRLSNFLLWQTGNTQLCSPAALWPEIGLRHLLWAILNFQRNHSYLEKRKKQL

SEQ ID NO: 89750 - protein, 260 aa, Arabidopsis thaliana
  peptide (1)..(260): Ceres Seq. ID no. 12720304
  misc_feature (11)..(255): Pfam Name: Putative undecaprenyl diphosphate synthase Pfam Description: Putative undecaprenyl diphosphate synthase
  misc_feature (1)..(260): Homolog of NCBI NO: 18398467 NR Description: undecaprenyl pyrophosphate synthetase (UPP family; protein id: At2g17570.1, supported by cDNA: gi_14423545, by cDNA: gi_20336658 [Arabidopsis thaliana]
  misc_feature (1)..(260): Homolog of NCBI NO: 20336659 NR Description: hypothetical protein [Arabidopsis thaliana]
  misc_feature (1)..(260): Homolog of NCBI NO: 25314045 NR Description: hypothetical protein At2g17570 [imported] -
  misc_feature (40)..(260): Homolog of NCBI NO: 14423546 NR Description: Unknown protein [Arabidopsis thaliana]
  misc_feature (1)..(259): Homolog of NCBI NO: 23491567 NR Description: cis-prenyltransferase [Periploca sepium]
  misc_feature (1)..(260): Homolog of NCBI NO: 16751459 NR Description: cis-prenyltransferase [Hevea brasiliensis]
  misc_feature (1)..(260): Homolog of NCBI NO: 20563020 NR Description: cis-prenyltransferase1 [Hevea brasiliensis]
  misc_feature (1)..(260): Homolog of NCBI NO: 22213587 NR Description: cis-prenyltransferase 2 [Hevea brasiliensis]
  misc_feature (1)..(260): Homolog of NCBI NO: 20563022 NR Description: cis-prenyltransferase2 [Hevea brasiliensis]
  misc_feature (1)..(260): Homolog of NCBI NO: 22213585 NR Description: cis-prenyltransferase 1 [Hevea brasiliensis]
MGPIPCHIAFIMDGNRRYAKKCGLLDGSGHKAGFSALMSMLQYCYELGIKYVTIYAFSIDNFRRKPEEVESVMDLMLEKIKSLLEKESIVHQYGIRVYFIGNLALLNDQVRAAAEKVMKATAKNSRVVLLICIAYNSTDEIVQAVKKSCINKSDNIEASNYKHEDSDSDIEGTDMENQEKKIQLVDIEENMQMSVAPNPDILIRSSGETRLSNFLLWQTGNTQLCSPAALWPEIGLRHLLWAILNFQRNHSYLEKRKKQL

SEQ ID NO: 89751 - DNA, 1114 bp, Arabidopsis thaliana
  misc_feature (1)..(1114): Ceres Seq. ID no. 12720313
  misc_feature: MA Experiment ID: 20000184 Result: Down-regulated in Transcription
  misc_feature: MA Experiment 20000184 PARAMETER Experiment Name: At_Shoots__P Parameter: Age (day) Value: 7
  misc_feature: MA Experiment 20000184 PARAMETER Experiment Name: At_Shoots__P Parameter: Tissue Value: Shoots vs. Whole Plant
  misc_feature: MA Experiment ID: 20000227 Result: Down-regulated in Transcription
  misc_feature: MA Experiment 20000227 PARAMETER Experiment Name: At_Root-Tips-vs-Tops_P Parameter: Tissue Value: Root Tips vs. Root Tops
  misc_feature: MA Experiment ID: 20000794 Result: Up-regulated in Transcription
  misc_feature: MA Experiment 20000794 PARAMETER Experiment Name: At_Petals_P Parameter: Age (day) Value: 23-25 days
  misc_feature: MA Experiment 20000794 PARAMETER Experiment Name: At_Petals_P Parameter: Plant Line Value: WS
  misc_feature: MA Experiment 20000794 PARAMETER Experiment Name: At_Petals_P Parameter: Tissue Value: Petals vs. Whole plant
ctttatcgtctccttggagagatatgaatggcgatgagcttcctttcgagagtggtttcgaggtttacgctaagggaactcataagtcagagtttgactcgaatttgcttgatcctcgttctgatcctatttgggatgctataagagaagaagctaaacttgaggcagagaaagagcctattttgagtagcttcttgtatgctggtatcttagcacatgattgtttagagcaagctttagggtttgttctagccaaccgtctccaaaacccaaccttgttggcaacacaactcttggatatattttatggtgttatgatgcatgacaaaggtattcagagttcgattcgccatgatctccaggcatttaaagatcgtgatcctgcttgtctgtcgtatagttctgctattttacatctgaagggttatcatgcgttacaagcatatagggttgcgcataaactgtggaatgaagggaggaaactattagctcttgcattgcaaagccgaataagcgaggtttttggcattgacatacatccagcggcaagaattggggagggaatattgttggatcatggaactggagtggtcattggtgagaccgctgtgataggcaacggtgtctcgatcttacatggtgtgactttaggaggaaccggaaaggaaactggcgatcgccacccaaagataggtgaaggtgcattgcttggagcttgtgtgactatacttggtaacataagcataggtgctggagcaatggtagctgcaggttcacttgtgttaaaagacgttccttcgcatagtgtggtggctggaaatcctgcaaaactgatcagggtcatggaagagcaagacccgtctctagcaatgaaacacgatgctactaaagagttctttcgacatgtagctgatggttacaaaggggcacaatctaacggaccatcactttcagcaggagatacagagaaaggacacactaacagcacatcatgagatctttgtatgcaaatttcttaccatcataagctaattcttgtatgctcttgcttatcatcataagctaatctcagcatttcctcaataagttgtctaataaaagattttgttcactg

SEQ ID NO: 89752 - protein, 330 aa, Arabidopsis thaliana
  peptide (1)..(330): Ceres Seq. ID no. 12720314
  misc_feature (1)..(330): Homolog of NCBI NO: 5597011 NR Description: serine acetyltranferase 2 [Arabidopsis thaliana]
  misc_feature (8)..(330): Homolog of NCBI NO: 18398491 NR Description: expressed protein; protein id: At2g17640.1, by cDNA: gi_4406383 [Arabidopsis thaliana]
  misc_feature (8)..(292): Homolog of NCBI NO: 20198259 NR Description: serine acetyltransferase (GB:AF112303)
  misc_feature (8)..(292): Homolog of NCBI NO: 25286519 NR Description: probable serine acetyltransferase [imported] -
  misc_feature (8)..(292): Homolog of NCBI NO: 7433701 NR Description: serine O-acetyltransferase (EC 2.3.1.30)
  misc_feature (10)..(325): Homolog of NCBI NO: 17225592 NR Description: serine acetyltransferase [Arabidopsis thaliana] unknown protein [Arabidopsis thaliana]
  misc_feature (16)..(312): Homolog of NCBI NO: 22758278 NR Description: Putative serine acetyltransferase [Oryza sativa
  misc_feature (43)..(292): Homolog of NCBI NO: 1361979 NR Description: serine O-acetyltransferase (EC 2.3.1.30) - >gi|1350550|dbj|BAA12843.1| serine acetyltransferase [Citrullus >gi|1841312|dbj|BAA08479.1| serine acetyltransferase. [Citrullus
  misc_feature (27)..(292): Homolog of NCBI NO: 23028301 NR Description: hypothetical protein [Microbulbifer degradans
  misc_feature (37)..(292): Homolog of NCBI NO: 15241928 NR Description: serine O-acetyltransferase (EC 2.3.1.30) Sat-52 protein id: At5g56760.1, supported by cDNA: 119783., supported by gi_14517553, supported by cDNA: gi_905390 [Arabidopsis
LSSPWRDMNGDELPFESGFEVYAKGTHKSEFDSNLLDPRSDPIWDAIREEAKLEAEKEPILSSFLYAGILAHDCLEQALGFVLANRLQNPTLLATQLLDIFYGVMMHDKGIQSSIRHDLQAFKDRDPACLSYSSAILHLKGYHALQAYRVAHKLWNEGRKLLALALQSRISEVFGIDIHPAARIGEGILLDHGTGVVIGETAVIGNGVSILHGVTLGGTGKETGDRHPKIGEGALLGACVTILGNISIGAGAMVAAGSLVLKDVPSHSVVAGNPAKLIRVMEEQDPSLAMKHDATKEFFRHVADGYKGAQSNGPSLSAGDTEKGHTNSTS

SEQ ID NO: 89753 - protein, 323 aa, Arabidopsis thaliana
  peptide (1)..(323): Ceres Seq. ID no. 12720315
  misc_feature (1)..(323): Homolog of NCBI NO: 5597011 NR Description: serine acetyltranferase 2 [Arabidopsis thaliana]
  misc_feature (1)..(323): Homolog of NCBI NO: 18398491 NR Description: expressed protein; protein id: At2g17640.1, by cDNA: gi_4406383 [Arabidopsis thaliana]
  misc_feature (1)..(285): Homolog of NCBI NO: 20198259 NR Description: serine acetyltransferase (GB:AF112303)
  misc_feature (1)..(285): Homolog of NCBI NO: 25286519 NR Description: probable serine acetyltransferase [imported] -
  misc_feature (1)..(285): Homolog of NCBI NO: 7433701 NR Description: serine O-acetyltransferase (EC 2.3.1.30)
  misc_feature (3)..(318): Homolog of NCBI NO: 17225592 NR Description: serine acetyltransferase [Arabidopsis thaliana] unknown protein [Arabidopsis thaliana]
  misc_feature (9)..(305): Homolog of NCBI NO: 22758278 NR Description: Putative serine acetyltransferase [Oryza sativa
  misc_feature (36)..(285): Homolog of NCBI NO: 1361979 NR Description: serine O-acetyltransferase (EC 2.3.1.30) - >gi|1350550|dbj|BAA12843.1| serine acetyltransferase [Citrullus >gi|1841312|dbj|BAA08479.1| serine acetyltransferase. [Citrullus
  misc_feature (20)..(285): Homolog of NCBI NO: 23028301 NR Description: hypothetical protein [Microbulbifer degradans
  misc_feature (30)..(285): Homolog of NCBI NO: 15241928 NR Description: serine O-acetyltransferase (EC 2.3.1.30) Sat-52 protein id: At5g56760.1, supported by cDNA: 119783., supported by gi_14517553, supported by cDNA: gi_905390 [Arabidopsis
MNGDELPFESGFEVYAKGTHKSEFDSNLLDPRSDPIWDAIREEAKLEAEKEPILSSFLYAGILAHDCLEQALGFVLANRLQNPTLLATQLLDIFYGVMMHDKGIQSSIRHDLQAFKDRDPACLSYSSAILHLKGYHALQAYRVAHKLWNEGRKLLALALQSRISEVFGIDIHPAARIGEGILLDHGTGVVIGETAVIGNGVSILHGVTLGGTGKETGDRHPKIGEGALLGACVTILGNISIGAGAMVAAGSLVLKDVPSHSVVAGNPAKLIRVMEEQDPSLAMKHDATKEFFRHVADGYKGAQSNGPSLSAGDTEKGHTNSTS

SEQ ID NO: 89754 - protein, 226 aa, Arabidopsis thaliana
  peptide (1)..(226): Ceres Seq. ID no. 12720316
  misc_feature (1)..(226): Homolog of NCBI NO: 5597011 NR Description: serine acetyltranferase 2 [Arabidopsis thaliana]
  misc_feature (1)..(226): Homolog of NCBI NO: 18398491 NR Description: expressed protein; protein id: At2g17640.1, by cDNA: gi_4406383 [Arabidopsis thaliana]
  misc_feature (1)..(188): Homolog of NCBI NO: 20198259 NR Description: serine acetyltransferase (GB:AF112303)
  misc_feature (1)..(188): Homolog of NCBI NO: 25286519 NR Description: probable serine acetyltransferase [imported] -
  misc_feature (1)..(188): Homolog of NCBI NO: 7433701 NR Description: serine O-acetyltransferase (EC 2.3.1.30)
  misc_feature (1)..(221): Homolog of NCBI NO: 17225592 NR Description: serine acetyltransferase [Arabidopsis thaliana] unknown protein [Arabidopsis thaliana]
  misc_feature (1)..(208): Homolog of NCBI NO: 22758278 NR Description: Putative serine acetyltransferase [Oryza sativa
  misc_feature (1)..(188): Homolog of NCBI NO: 1361979 NR Description: serine O-acetyltransferase (EC 2.3.1.30) - >gi|1350550|dbj|BAA12843.1| serine acetyltransferase [Citrullus >gi|1841312|dbj|BAA08479.1| serine acetyltransferase. [Citrullus
  misc_feature (1)..(188): Homolog of NCBI NO: 23028301 NR Description: hypothetical protein [Microbulbifer degradans
  misc_feature (1)..(188): Homolog of NCBI NO: 15241928 NR Description: serine O-acetyltransferase (EC 2.3.1.30) Sat-52 protein id: At5g56760.1, supported by cDNA: 119783., supported by gi_14517553, supported by cDNA: gi_905390 [Arabidopsis
MMHDKGIQSSIRHDLQAFKDRDPACLSYSSAILHLKGYHALQAYRVAHKLWNEGRKLLALALQSRISEVFGIDIHPAARIGEGILLDHGTGVVIGETAVIGNGVSILHGVTLGGTGKETGDRHPKIGEGALLGACVTILGNISIGAGAMVAAGSLVLKDVPSHSVVAGNPAKLIRVMEEQDPSLAMKHDATKEFFRHVADGYKGAQSNGPSLSAGDTEKGHTNSTS

SEQ ID NO: 89755 - DNA, 2104 bp, Arabidopsis thaliana
  misc_feature (1)..(2104): Ceres Seq. ID no. 12720327
  misc_feature: MA Experiment ID: 20000173 Result: Down-regulated in Transcription
  misc_feature: MA Experiment 20000173 PARAMETER Experiment Name: At_42deg_Heat_P Parameter: Age (day) Value: 14
  misc_feature: MA Experiment 20000173 PARAMETER Experiment Name: At_42deg_Heat_P Parameter: Organism Value: A. thaliana
  misc_feature: MA Experiment 20000173 PARAMETER Experiment Name: At_42deg_Heat_P Parameter: Plant Line Value: WS
  misc_feature: MA Experiment 20000173 PARAMETER Experiment Name: At_42deg_Heat_P Parameter: Temperature (deg C) Value: 42 vs. 22
  misc_feature: MA Experiment 20000173 PARAMETER Experiment Name: At_42deg_Heat_P Parameter: Timepoint (hr) Value: 6
  misc_feature: MA Experiment 20000173 PARAMETER Experiment Name: At_42deg_Heat_P Parameter: Tissue Value: Aerial
  misc_feature: MA Experiment ID: 20000184 Result: Down-regulated in Transcription
  misc_feature: MA Experiment 20000184 PARAMETER Experiment Name: At_Shoots__P Parameter: Age (day) Value: 7
  misc_feature: MA Experiment 20000184 PARAMETER Experiment Name: At_Shoots__P Parameter: Tissue Value: Shoots vs. Whole Plant
  misc_feature: MA Experiment ID: 20000496 Result: Up-regulated in Transcription
  misc_feature: MA Experiment 20000496 PARAMETER Experiment Name: At_Guard_Cells_P Parameter: Harvest Date Value: 7/19/2002
  misc_feature: MA Experiment 20000496 PARAMETER Experiment Name: At_Guard_Cells_P Parameter: Organism Value: Canola
  misc_feature: MA Experiment 20000496 PARAMETER Experiment Name: At_Guard_Cells_P Parameter: Tissue Value: Guard Cells vs. Leaves
attttctgtttggaatcttggatctttctttctgagatcattcgtcttttgtactgattttgagagatttcatttttgtttgtttaccgatccgccgccgtggatttttgttttccgatgacgatcaaagatgagtcggagagttgcggtagcagagccgtcgttgcttcgccgtcacaagaaaaccctagacattaccggatgaaacttgatgtctatagtgaggttttacagcgacttcaagaatctaattacgaagaagccactcttcctgatttcgaggatcaactttggctccatttcaatcgtcttcctgctcgatatgctcttgatgttaaagtcgagagagcggaagatgttctcacacatcagagattgctaaaattggctgcagatcctgctactaggcctgtctttgaagttcgaagtgtacaggtttctcccagaatctctgctgactctgaccctgcggtggaggaagatgctcaaagctctcaccaaccaagcggaccgggggttcttgctcctccaacttttggttcttctccaaattttgaggctattactcagggaagtaaaattgttgaagatgttgatagtgttgtgaatgcaacattgtctacacgaccgatgcacgagatcactttttcaaccattgataaaccgaaactccttagccagctaacttccctgcttggtgagcttggactgaatatacaagaggctcatgctttttccactgtagatggtttctctttagatgtctttgtagttgacggttggtctcaggaggaaactgatggcctaagagatgcattgagcaaagaaatactgaagcttaaggatcaacctggttcaaaacagaaatctatttctttctttgagcatgacaaatcaagcaatgagcttatacccgcctgcattgaaatacccacggatggaactgatgagtgggaaatcgacgtgactcagctcaaaattgaaaagaaagtggcatctggttcatatggggatctgcatagaggcacttattgcagtcaggaagtagctatcaaatttctcaagcctgatcgtgtaaacaatgagatgctgagagaattttctcaagaagtttttataatgaggaaagttcgacacaaaaacgtcgttcaatttttgggtgcatgcacaagatctccaaccctctgtatagtgactgagtttatggctcgagggagcatatatgattttcttcacaaacagaaatgcgctttcaaacttcaaactttactcaaagttgcacttgatgtcgcaaaaggaatgagctatttgcatcaaaacaacattattcacagggaccttaagactgcgaatcttcttatggatgaacatggacttgtcaaggttgctgatttcggagttgccagagtgcagattgaatcaggggtcatgactgctgaaactgggacataccggtggatggctccagaggtcattgagcacaaaccttacaatcacaaggcagatgtgttcagttatgcgatagtgctatgggaacttctgactggtgacatcccatatgctttcttgactccactacaagcagctgttggcgttgtccaaaaggggcttcgacccaaaatcccaaagaaaacacacccaaaagtgaaggggcttctagagagatgctggcatcaagacccagaacagagaccactgtttgaggaaatcatagaaatgctacaacagataatgaaagaggtaaacgtcgtagtgtgatctcccgagtaaaaaaaacaccttacaagggcgagaatctcagagcaggatgtggtgaaaacaaagcaggttggagatgaggaccctagcaaggacaagcactgcatatctttctttactcccttcagaaagccccgttactagttcttctgatcatcaacagttacacgattcaaggcattattttctggcctgccttgtacagtttcttttttgcttgacctagtttttgaccttagagactgtttttctccttttagttactctttgattcctttccacttagaaattagaaacgctctattacgttttcctcttttttttaccttcataagaaaggaagttt

SEQ ID NO: 89756 - protein, 546 aa, Arabidopsis thaliana
  peptide (1)..(546): Ceres Seq. ID no. 12720328
  misc_feature (173)..(246): Pfam Name: ACT domain Pfam Description: ACT domain
  misc_feature (1)..(546): Homolog of NCBI NO: 15227883 NR Description: putative protein kinase; protein id: At2g17700.1, by cDNA: gi_17979170, supported by cDNA: gi_20465914 [Arabidopsis >gi|25411811|pir||D84555 probable protein kinase putative protein
  misc_feature (1)..(542): Homolog of NCBI NO: 22329194 NR Description: putative protein; protein id: At4g35780.1, by cDNA: gi_20260235 [Arabidopsis thaliana] putative protein [Arabidopsis thaliana]
  misc_feature (1)..(542): Homolog of NCBI NO: 7486654 NR Description: hypothetical protein F8D20.290 - Arabidopsis >gi|3367596|emb|CAA20048.1| putative protein [Arabidopsis >gi|7270530|emb|CAB81487.1| putative protein [Arabidopsis
  misc_feature (3)..(542): Homolog of NCBI NO: 18420244 NR Description: protein kinase like protein; protein id:
  misc_feature (2)..(542): Homolog of NCBI NO: 32490474 NR Description: putative serine/threonine-protein kinase ctr1
  misc_feature (1)..(374): Homolog of NCBI NO: 7486398 NR Description: hypothetical protein F4B14.50 - Arabidopsis
  misc_feature (384)..(478): Homolog of NCBI NO: 7486398 NR Description: hypothetical protein F4B14.50 - Arabidopsis
  misc_feature (496)..(542): Homolog of NCBI NO: 7486398 NR Description: hypothetical protein F4B14.50 - Arabidopsis
  misc_feature (139)..(543): Homolog of NCBI NO: 34901608 NR Description: P0571D04.18 [Oryza sativa (japonica
  misc_feature (7)..(132): Homolog of NCBI NO: 34901608 NR Description: P0571D04.18 [Oryza sativa (japonica
MTIKDESESCGSRAVVASPSQENPRHYRMKLDVYSEVLQRLQESNYEEATLPDFEDQLWLHFNRLPARYALDVKVERAEDVLTHQRLLKLAADPATRPVFEVRSVQVSPRISADSDPAVEEDAQSSHQPSGPGVLAPPTFGSSPNFEAITQGSKIVEDVDSVVNATLSTRPMHEITFSTIDKPKLLSQLTSLLGELGLNIQEAHAFSTVDGFSLDVFVVDGWSQEETDGLRDALSKEILKLKDQPGSKQKSISFFEHDKSSNELIPACIEIPTDGTDEWEIDVTQLKIEKKVASGSYGDLHRGTYCSQEVAIKFLKPDRVNNEMLREFSQEVFIMRKVRHKNVVQFLGACTRSPTLCIVTEFMARGSIYDFLHKQKCAFKLQTLLKVALDVAKGMSYLHQNNIIHRDLKTANLLMDEHGLVKVADFGVARVQIESGVMTAETGTYRWMAPEVIEHKPYNHKADVFSYAIVLWELLTGDIPYAFLTPLQAAVGVVQKGLRPKIPKKTHPKVKGLLERCWHQDPEQRPLFEEIIEMLQQIMKEVNVVV

SEQ ID NO: 89757 - protein, 518 aa, Arabidopsis thaliana
  peptide (1)..(518): Ceres Seq. ID no. 12720329
  misc_feature (145)..(218): Pfam Name: ACT domain Pfam Description: ACT domain
  misc_feature (1)..(518): Homolog of NCBI NO: 15227883 NR Description: putative protein kinase; protein id: At2g17700.1, by cDNA: gi_17979170, supported by cDNA: gi_20465914 [Arabidopsis >gi|25411811|pir||D84555 probable protein kinase putative protein
  misc_feature (1)..(514): Homolog of NCBI NO: 22329194 NR Description: putative protein; protein id: At4g35780.1, by cDNA: gi_20260235 [Arabidopsis thaliana] putative protein [Arabidopsis thaliana]
  misc_feature (1)..(514): Homolog of NCBI NO: 7486654 NR Description: hypothetical protein F8D20.290 - Arabidopsis >gi|3367596|emb|CAA20048.1| putative protein [Arabidopsis >gi|7270530|emb|CAB81487.1| putative protein [Arabidopsis
  misc_feature (1)..(514): Homolog of NCBI NO: 18420244 NR Description: protein kinase like protein; protein id:
  misc_feature (1)..(514): Homolog of NCBI NO: 32490474 NR Description: putative serine/threonine-protein kinase ctr1
  misc_feature (1)..(346): Homolog of NCBI NO: 7486398 NR Description: hypothetical protein F4B14.50 - Arabidopsis
  misc_feature (356)..(450): Homolog of NCBI NO: 7486398 NR Description: hypothetical protein F4B14.50 - Arabidopsis
  misc_feature (468)..(514): Homolog of NCBI NO: 7486398 NR Description: hypothetical protein F4B14.50 - Arabidopsis
  misc_feature (111)..(515): Homolog of NCBI NO: 34901608 NR Description: P0571D04.18 [Oryza sativa (japonica
  misc_feature (1)..(104): Homolog of NCBI NO: 34901608 NR Description: P0571D04.18 [Oryza sativa (japonica
MKLDVYSEVLQRLQESNYEEATLPDFEDQLWLHFNRLPARYALDVKVERAEDVLTHQRLLKLAADPATRPVFEVRSVQVSPRISADSDPAVEEDAQSSHQPSGPGVLAPPTFGSSPNFEAITQGSKIVEDVDSVVNATLSTRPMHEITFSTIDKPKLLSQLTSLLGELGLNIQEAHAFSTVDGFSLDVFVVDGWSQEETDGLRDALSKEILKLKDQPGSKQKSISFFEHDKSSNELIPACIEIPTDGTDEWEIDVTQLKIEKKVASGSYGDLHRGTYCSQEVAIKFLKPDRVNNEMLREFSQEVFIMRKVRHKNVVQFLGACTRSPTLCIVTEFMARGSIYDFLHKQKCAFKLQTLLKVALDVAKGMSYLHQNNIIHRDLKTANLLMDEHGLVKVADFGVARVQIESGVMTAETGTYRWMAPEVIEHKPYNHKADVFSYAIVLWELLTGDIPYAFLTPLQAAVGVVQKGLRPKIPKKTHPKVKGLLERCWHQDPEQRPLFEEIIEMLQQIMKEVNVVV

SEQ ID NO: 89758 - protein, 375 aa, Arabidopsis thaliana
  peptide (1)..(375): Ceres Seq. ID no. 12720330
  misc_feature (2)..(75): Pfam Name: ACT domain Pfam Description: ACT domain
  misc_feature (1)..(375): Homolog of NCBI NO: 15227883 NR Description: putative protein kinase; protein id: At2g17700.1, by cDNA: gi_17979170, supported by cDNA: gi_20465914 [Arabidopsis >gi|25411811|pir||D84555 probable protein kinase putative protein
  misc_feature (1)..(371): Homolog of NCBI NO: 22329194 NR Description: putative protein; protein id: At4g35780.1, by cDNA: gi_20260235 [Arabidopsis thaliana] putative protein [Arabidopsis thaliana]
  misc_feature (1)..(371): Homolog of NCBI NO: 7486654 NR Description: hypothetical protein F8D20.290 - Arabidopsis >gi|3367596|emb|CAA20048.1| putative protein [Arabidopsis >gi|7270530|emb|CAB81487.1| putative protein [Arabidopsis
  misc_feature (1)..(371): Homolog of NCBI NO: 18420244 NR Description: protein kinase like protein; protein id:
  misc_feature (1)..(371): Homolog of NCBI NO: 32490474 NR Description: putative serine/threonine-protein kinase ctr1
  misc_feature (1)..(203): Homolog of NCBI NO: 7486398 NR Description: hypothetical protein F4B14.50 - Arabidopsis
  misc_feature (213)..(307): Homolog of NCBI NO: 7486398 NR Description: hypothetical protein F4B14.50 - Arabidopsis
  misc_feature (325)..(371): Homolog of NCBI NO: 7486398 NR Description: hypothetical protein F4B14.50 - Arabidopsis
  misc_feature (1)..(372): Homolog of NCBI NO: 34901608 NR Description: P0571D04.18 [Oryza sativa (japonica
  misc_feature (130)..(370): Homolog of NCBI NO: 7485889 NR Description: hypothetical protein F20M13.30 - Arabidopsis >gi|4467134|emb|CAB37503.1| protein kinase like protein thaliana] >gi|7270830|emb|CAB80511.1| protein kinase like protein
MHEITFSTIDKPKLLSQLTSLLGELGLNIQEAHAFSTVDGFSLDVFVVDGWSQEETDGLRDALSKEILKLKDQPGSKQKSISFFEHDKSSNELIPACIEIPTDGTDEWEIDVTQLKIEKKVASGSYGDLHRGTYCSQEVAIKFLKPDRVNNEMLREFSQEVFIMRKVRHKNVVQFLGACTRSPTLCIVTEFMARGSIYDFLHKQKCAFKLQTLLKVALDVAKGMSYLHQNNIIHRDLKTANLLMDEHGLVKVADFGVARVQIESGVMTAETGTYRWMAPEVIEHKPYNHKADVFSYAIVLWELLTGDIPYAFLTPLQAAVGVVQKGLRPKIPKKTHPKVKGLLERCWHQDPEQRPLFEEIIEMLQQIMKEVNVVV

SEQ ID NO: 89759 - DNA, 1098 bp, Arabidopsis thaliana
  misc_feature (1)..(1098): Ceres Seq. ID no. 12720381
  misc_feature: MA Experiment ID: 20000227 Result: Up-regulated in Transcription
  misc_feature: MA Experiment 20000227 PARAMETER Experiment Name: At_Root-Tips-vs-Tops_P Parameter: Tissue Value: Root Tips vs. Root Tops
  misc_feature: MA Experiment ID: 20000234 Result: Up-regulated in Transcription
  misc_feature: MA Experiment 20000234 PARAMETER Experiment Name: At_Siliques_P Parameter: Age (day) Value: 21
  misc_feature: MA Experiment 20000234 PARAMETER Experiment Name: At_Siliques_P Parameter: Organism Value: A. thaliana
  misc_feature: MA Experiment 20000234 PARAMETER Experiment Name: At_Siliques_P Parameter: Plant Line Value: WS
  misc_feature: MA Experiment 20000234 PARAMETER Experiment Name: At_Siliques_P Parameter: Tissue Value: Less Than 5mm Siliques vs. Whole Plant
  misc_feature: MA Experiment ID: 20000235 Result: Up-regulated in Transcription
  misc_feature: MA Experiment 20000235 PARAMETER Experiment Name: At_Siliques_P Parameter: Age (day) Value: 21
  misc_feature: MA Experiment 20000235 PARAMETER Experiment Name: At_Siliques_P Parameter: Organism Value: A. thaliana
  misc_feature: MA Experiment 20000235 PARAMETER Experiment Name: At_Siliques_P Parameter: Plant Line Value: WS
  misc_feature: MA Experiment 20000235 PARAMETER Experiment Name: At_Siliques_P Parameter: Tissue Value: 5-10mm Siliques vs. Whole Plant
  misc_feature: MA Experiment ID: 20000495 Result: Up-regulated in Transcription
  misc_feature: MA Experiment 20000495 PARAMETER Experiment Name: At_Guard_Cells_P Parameter: Harvest Date Value: 8/2/2002
  misc_feature: MA Experiment 20000495 PARAMETER Experiment Name: At_Guard_Cells_P Parameter: Organism Value: A. thaliana
  misc_feature: MA Experiment 20000495 PARAMETER Experiment Name: At_Guard_Cells_P Parameter: Tissue Value: Guard Cells vs. Leaves
atggagccaatggaatcttgtagcgttcctccaggatttaggttccatccgacggacgaagagcttgtcgggtactatctaaggaagaaaatcgcatcgcaaaagattgatctcgacgtcatcagagacatcgatctctacagaatagaaccatgggatctacaagaacaatgtcgaatcggttatgaggaacaaaatgaatggtatttttttagtcacaaggacaagaaatatccaacggggacaagaactaatagagcgaccatggctggattttggaaagccacgggaagagacaaagctgtttacgacaaaacaaaactaattggtatgaggaaaacacttgtgttctacaaaggacgtgcacctaatggcaagaaatccgattggatcatgcatgagtaccggctcgagtcagatgagaatgcaccgccccaggaagaaggatgggtggtttgtagagcattcaaaaaaagagctacagggcaagccaagaacacggaaacttggagctcaagttacttttacgatgaagttgcaccgaatggagttaactcggttatggaccccattgattacatatctaagcagcaacataacatttttgggaaaggtttgatgtgtaagcaagaactagaaggaatggttgatggtataaactatatacaatcgaatcaattcattcagctcccacaactccaaagcccttctctcccgctgatgaaaagaccttcaagctcgatgtccataacatcaatggataacaattacaactataaactcccattagcggatgaagaaagcttcgagtcattcataagaggagaggatagaaggaagaagaaaaagcaagtaatgatgacgggaaattggagagagttagacaagtttgttgcttcacaacttatgagccaagaagacaatggaacttcaagtttcgcaggtcatcatatagttaatgaagataaaaacaacaatgatgtggagatggattcgtcaatgtttttgagcgaaagagaagaagaaaacaggttcgtcagtgaattcttgagtacaaactcggattatgatattgggatttgcgtatttgataattga

SEQ ID NO: 89760 - protein, 365 aa, Arabidopsis thaliana
  peptide (1)..(365): Ceres Seq. ID no. 12720382
  misc_feature (9)..(138): Pfam Name: No apical meristem (NAM) protein Pfam Description: No apical meristem (NAM) protein
  misc_feature (1)..(365): Homolog of NCBI NO: 15227958 NR Description: putative NAM (no apical meristem)-like protein; id: At2g18060.1 [Arabidopsis thaliana] >gi|25352296|pir||G84559
  misc_feature (1)..(358): Homolog of NCBI NO: 15234325 NR Description: NAM like protein; protein id: At4g36160.1
  misc_feature (4)..(364): Homolog of NCBI NO: 34902254 NR Description: Putative NAM-like protein [Oryza sativa (japonica
  misc_feature (6)..(267): Homolog of NCBI NO: 15239338 NR Description: NAM (no apical meristem)-like protein; protein At5g66300.1 [Arabidopsis thaliana] >gi|10177424|dbj|BAB10709.1|
  misc_feature (5)..(308): Homolog of NCBI NO: 24413978 NR Description: NAM-like protein [Oryza sativa (japonica
  misc_feature (4)..(199): Homolog of NCBI NO: 15221256 NR Description: unknown protein; protein id: At1g12260.1
  misc_feature (1)..(269): Homolog of NCBI NO: 15217612 NR Description: NAM-like protein; protein id: At1g71930.1,
  misc_feature (4)..(178): Homolog of NCBI NO: 15221554 NR Description: unknown protein; protein id: At1g62700.1
  misc_feature (4)..(146): Homolog of NCBI NO: 37536380 NR Description: putative NAM (no apical meristem) protein [Oryza
  misc_feature (4)..(199): Homolog of NCBI NO: 25402716 NR Description: hypothetical protein [imported] - Arabidopsis >gi|10086508|gb|AAG12568.1|AC022522_1 Hypothetical protein
MEPMESCSVPPGFRFHPTDEELVGYYLRKKIASQKIDLDVIRDIDLYRIEPWDLQEQCRIGYEEQNEWYFFSHKDKKYPTGTRTNRATMAGFWKATGRDKAVYDKTKLIGMRKTLVFYKGRAPNGKKSDWIMHEYRLESDENAPPQEEGWVVCRAFKKRATGQAKNTETWSSSYFYDEVAPNGVNSVMDPIDYISKQQHNIFGKGLMCKQELEGMVDGINYIQSNQFIQLPQLQSPSLPLMKRPSSSMSITSMDNNYNYKLPLADEESFESFIRGEDRRKKKKQVMMTGNWRELDKFVASQLMSQEDNGTSSFAGHHIVNEDKNNNDVEMDSSMFLSEREEENRFVSEFLSTNSDYDIGICVFDN

SEQ ID NO: 89761 - protein, 362 aa, Arabidopsis thaliana
  peptide (1)..(362): Ceres Seq. ID no. 12720383
  misc_feature (6)..(135): Pfam Name: No apical meristem (NAM) protein Pfam Description: No apical meristem (NAM) protein
  misc_feature (1)..(362): Homolog of NCBI NO: 15227958 NR Description: putative NAM (no apical meristem)-like protein; id: At2g18060.1 [Arabidopsis thaliana] >gi|25352296|pir||G84559
  misc_feature (1)..(355): Homolog of NCBI NO: 15234325 NR Description: NAM like protein; protein id: At4g36160.1
  misc_feature (1)..(361): Homolog of NCBI NO: 34902254 NR Description: Putative NAM-like protein [Oryza sativa (japonica
  misc_feature (3)..(264): Homolog of NCBI NO: 15239338 NR Description: NAM (no apical meristem)-like protein; protein At5g66300.1 [Arabidopsis thaliana] >gi|10177424|dbj|BAB10709.1|
  misc_feature (2)..(305): Homolog of NCBI NO: 24413978 NR Description: NAM-like protein [Oryza sativa (japonica
  misc_feature (1)..(196): Homolog of NCBI NO: 15221256 NR Description: unknown protein; protein id: At1g12260.1
  misc_feature (1)..(266): Homolog of NCBI NO: 15217612 NR Description: NAM-like protein; protein id: At1g71930.1,
  misc_feature (1)..(175): Homolog of NCBI NO: 15221554 NR Description: unknown protein; protein id: At1g62700.1
  misc_feature (1)..(143): Homolog of NCBI NO: 37536380 NR Description: putative NAM (no apical meristem) protein [Oryza
  misc_feature (1)..(196): Homolog of NCBI NO: 25402716 NR Description: hypothetical protein [imported] - Arabidopsis >gi|10086508|gb|AAG12568.1|AC022522_1 Hypothetical protein
MESCSVPPGFRFHPTDEELVGYYLRKKIASQKIDLDVIRDIDLYRIEPWDLQEQCRIGYEEQNEWYFFSHKDKKYPTGTRTNRATMAGFWKATGRDKAVYDKTKLIGMRKTLVFYKGRAPNGKKSDWIMHEYRLESDENAPPQEEGWVVCRAFKKRATGQAKNTETWSSSYFYDEVAPNGVNSVMDPIDYISKQQHNIFGKGLMCKQELEGMVDGINYIQSNQFIQLPQLQSPSLPLMKRPSSSMSITSMDNNYNYKLPLADEESFESFIRGEDRRKKKKQVMMTGNWRELDKFVASQLMSQEDNGTSSFAGHHIVNEDKNNNDVEMDSSMFLSEREEENRFVSEFLSTNSDYDIGICVFDN

SEQ ID NO: 89762 - protein, 277 aa, Arabidopsis thaliana
  peptide (1)..(277): Ceres Seq. ID no. 12720384
  misc_feature (1)..(277): Homolog of NCBI NO: 15227958 NR Description: putative NAM (no apical meristem)-like protein; id: At2g18060.1 [Arabidopsis thaliana] >gi|25352296|pir||G84559
  misc_feature (1)..(270): Homolog of NCBI NO: 15234325 NR Description: NAM like protein; protein id: At4g36160.1
  misc_feature (1)..(276): Homolog of NCBI NO: 34902254 NR Description: Putative NAM-like protein [Oryza sativa (japonica
  misc_feature (1)..(179): Homolog of NCBI NO: 15239338 NR Description: NAM (no apical meristem)-like protein; protein At5g66300.1 [Arabidopsis thaliana] >gi|10177424|dbj|BAB10709.1|
  misc_feature (1)..(220): Homolog of NCBI NO: 24413978 NR Description: NAM-like protein [Oryza sativa (japonica
  misc_feature (1)..(111): Homolog of NCBI NO: 15221256 NR Description: unknown protein; protein id: At1g12260.1
  misc_feature (1)..(181): Homolog of NCBI NO: 15217612 NR Description: NAM-like protein; protein id: At1g71930.1,
  misc_feature (1)..(90): Homolog of NCBI NO: 15221554 NR Description: unknown protein; protein id: At1g62700.1
  misc_feature (1)..(58): Homolog of NCBI NO: 37536380 NR Description: putative NAM (no apical meristem) protein [Oryza
  misc_feature (1)..(111): Homolog of NCBI NO: 25402716 NR Description: hypothetical protein [imported] - Arabidopsis >gi|10086508|gb|AAG12568.1|AC022522_1 Hypothetical protein
MAGFWKATGRDKAVYDKTKLIGMRKTLVFYKGRAPNGKKSDWIMHEYRLESDENAPPQEEGWVVCRAFKKRATGQAKNTETWSSSYFYDEVAPNGVNSVMDPIDYISKQQHNIFGKGLMCKQELEGMVDGINYIQSNQFIQLPQLQSPSLPLMKRPSSSMSITSMDNNYNYKLPLADEESFESFIRGEDRRKKKKQVMMTGNWRELDKFVASQLMSQEDNGTSSFAGHHIVNEDKNNNDVEMDSSMFLSEREEENRFVSEFLSTNSDYDIGICVFDN

SEQ ID NO: 89763 - DNA, 1014 bp, Arabidopsis thaliana
  misc_feature (1)..(1014): Ceres Seq. ID no. 12720392
  misc_feature: MA Experiment ID: 20000184 Result: Up-regulated in Transcription
  misc_feature: MA Experiment 20000184 PARAMETER Experiment Name: At_Shoots__P Parameter: Age (day) Value: 7
  misc_feature: MA Experiment 20000184 PARAMETER Experiment Name: At_Shoots__P Parameter: Tissue Value: Shoots vs. Whole Plant
atggcaagaatcgggagctttctcattcttctgtctctcacttacgctcttactctctgcatctgtgacaacgcgagtaactttggcggcaacaaaaggaacctcttcccagatttctacaggagctcgtgccctagagcggaggagatcgtgaggtccgttgtagccaaggcatttgaaagggagactcgtatggctgcttctctcatgaggctccatttccacgattgtttcgttcagggttgtgatggatcgttgcttctagacaccagtgggagtatagttactgagaagaactctaaccctaacagcagatcggctcgcgggtttgaagttgttgacgagatcaaggcagcattagagaatgaatgccctaacactgtctcttgtgctgacgccttaactctagctgctagagactcctctgttcttacaggtgggccaagctggacggttcctttgggaagaagagattcggcaactgcaagccgggctaaaccaaacaaagaccttcctgaacccgacaacttgttcgacacaattttcttgagatttagcaatgaaggtctcaatctgactgacctcgttgctctatccgggagccacaccattggattctcaagatgcactagtttcagacagagactttacaatcaatccggaagcggaagtcccgacacaaccttagagaaatcctacgctgctatcttgcgccaaaggtgccctagatcgggtggggaccagaacctttccgagcttgacatcaacagtgctggaagatttgataacagctactttaagaacttgattgagaacatgggactgttgaattccgaccaagtcttgttctctagcaacgaacaatcgagagagctcgtgaagaagtatgcagaggatcaagaagagttcttcgagcaattcgcggaatcgatgatcaagatggggaagatctctcccttgacaggttcgagtggtgagatcagaaagaaatgcaggaaaattaataactcctga

SEQ ID NO: 89764 - protein, 337 aa, Arabidopsis thaliana
  peptide (1)..(337): Ceres Seq. ID no. 12720393
  misc_feature (51)..(299): Pfam Name: Peroxidase Pfam Description: Peroxidase
  misc_feature (1)..(337): Homolog of NCBI NO: 15224114 NR Description: peroxidase, putative; protein id: At2g18140.1 thaliana] >gi|25453216|sp|Q9SI17|PE14_ARATH Peroxidase 14 (Atperox P14) >gi|25285614|pir||G84560 probable peroxidase
  misc_feature (1)..(337): Homolog of NCBI NO: 21537275 NR Description: putative peroxidase [Arabidopsis thaliana]
  misc_feature (1)..(337): Homolog of NCBI NO: 15224116 NR Description: peroxidase, putative; protein id: At2g18150.1, by cDNA: 126030., supported by cDNA: gi_19698902 [Arabidopsis >gi|25453215|sp|Q9SI16|PE15_ARATH Peroxidase 15 precursor
  misc_feature (1)..(336): Homolog of NCBI NO: 15234394 NR Description: peroxidase, putative; protein id: At4g36430.1, by cDNA: gi_17530561, supported by cDNA: gi_18377685 [Arabidopsis
  misc_feature (1)..(337): Homolog of NCBI NO: 15239370 NR Description: peroxidase, putative; protein id: At5g66390.1 thaliana] >gi|26397792|sp|Q9FJZ9|PE72_ARATH Peroxidase 72 (Atperox P72) (PRXR8) (ATP6a) >gi|10177520|dbj|BAB10915.1|
  misc_feature (1)..(337): Homolog of NCBI NO: 1402918 NR Description: peroxidase [Arabidopsis thaliana]
  misc_feature (7)..(336): Homolog of NCBI NO: 7658147 NR Description: peroxidase [Asparagus officinalis]
  misc_feature (8)..(336): Homolog of NCBI NO: 34903044 NR Description: unnamed protein product [Oryza sativa (japonica group)] >gi|7242902|dbj|BAA92500.1| unnamed protein product
  misc_feature (1)..(335): Homolog of NCBI NO: 7453855 NR Description: peroxidase prx15 precursor [Spinacia oleracea]
  misc_feature (1)..(335): Homolog of NCBI NO: 7453853 NR Description: peroxidase prx14 precursor [Spinacia oleracea]
MARIGSFLILLSLTYALTLCICDNASNFGGNKRNLFPDFYRSSCPRAEEIVRSVVAKAFERETRMAASLMRLHFHDCFVQGCDGSLLLDTSGSIVTEKNSNPNSRSARGFEVVDEIKAALENECPNTVSCADALTLAARDSSVLTGGPSWTVPLGRRDSATASRAKPNKDLPEPDNLFDTIFLRFSNEGLNLTDLVALSGSHTIGFSRCTSFRQRLYNQSGSGSPDTTLEKSYAAILRQRCPRSGGDQNLSELDINSAGRFDNSYFKNLIENMGLLNSDQVLFSSNEQSRELVKKYAEDQEEFFEQFAESMIKMGKISPLTGSSGEIRKKCRKINNS

SEQ ID NO: 89765 - protein, 273 aa, Arabidopsis thaliana
  peptide (1)..(273): Ceres Seq. ID no. 12720394
  misc_feature (1)..(235): Pfam Name: Peroxidase Pfam Description: Peroxidase
  misc_feature (1)..(273): Homolog of NCBI NO: 15224114 NR Description: peroxidase, putative; protein id: At2g18140.1 thaliana] >gi|25453216|sp|Q9SI17|PE14_ARATH Peroxidase 14 (Atperox P14) >gi|25285614|pir||G84560 probable peroxidase
  misc_feature (1)..(273): Homolog of NCBI NO: 21537275 NR Description: putative peroxidase [Arabidopsis thaliana]
  misc_feature (1)..(273): Homolog of NCBI NO: 15224116 NR Description: peroxidase, putative; protein id: At2g18150.1, by cDNA: 126030., supported by cDNA: gi_19698902 [Arabidopsis >gi|25453215|sp|Q9SI16|PE15_ARATH Peroxidase 15 precursor
  misc_feature (1)..(272): Homolog of NCBI NO: 15234394 NR Description: peroxidase, putative; protein id: At4g36430.1, by cDNA: gi_17530561, supported by cDNA: gi_18377685 [Arabidopsis
  misc_feature (1)..(273): Homolog of NCBI NO: 15239370 NR Description: peroxidase, putative; protein id: At5g66390.1 thaliana] >gi|26397792|sp|Q9FJZ9|PE72_ARATH Peroxidase 72 (Atperox P72) (PRXR8) (ATP6a) >gi|10177520|dbj|BAB10915.1|
  misc_feature (1)..(273): Homolog of NCBI NO: 1402918 NR Description: peroxidase [Arabidopsis thaliana]
  misc_feature (1)..(272): Homolog of NCBI NO: 7658147 NR Description: peroxidase [Asparagus officinalis]
  misc_feature (1)..(272): Homolog of NCBI NO: 34903044 NR Description: unnamed protein product [Oryza sativa (japonica group)] >gi|7242902|dbj|BAA92500.1| unnamed protein product
  misc_feature (1)..(271): Homolog of NCBI NO: 7453855 NR Description: peroxidase prx15 precursor [Spinacia oleracea]
  misc_feature (1)..(271): Homolog of NCBI NO: 7453853 NR Description: peroxidase prx14 precursor [Spinacia oleracea]
MAASLMRLHFHDCFVQGCDGSLLLDTSGSIVTEKNSNPNSRSARGFEVVDEIKAALENECPNTVSCADALTLAARDSSVLTGGPSWTVPLGRRDSATASRAKPNKDLPEPDNLFDTIFLRFSNEGLNLTDLVALSGSHTIGFSRCTSFRQRLYNQSGSGSPDTTLEKSYAAILRQRCPRSGGDQNLSELDINSAGRFDNSYFKNLIENMGLLNSDQVLFSSNEQSRELVKKYAEDQEEFFEQFAESMIKMGKISPLTGSSGEIRKKCRKINNS

SEQ ID NO: 89766 - protein, 268 aa, Arabidopsis thaliana
  peptide (1)..(268): Ceres Seq. ID no. 12720395
  misc_feature (1)..(230): Pfam Name: Peroxidase Pfam Description: Peroxidase
  misc_feature (1)..(268): Homolog of NCBI NO: 15224114 NR Description: peroxidase, putative; protein id: At2g18140.1 thaliana] >gi|25453216|sp|Q9SI17|PE14_ARATH Peroxidase 14 (Atperox P14) >gi|25285614|pir||G84560 probable peroxidase
  misc_feature (1)..(268): Homolog of NCBI NO: 21537275 NR Description: putative peroxidase [Arabidopsis thaliana]
  misc_feature (1)..(268): Homolog of NCBI NO: 15224116 NR Description: peroxidase, putative; protein id: At2g18150.1, by cDNA: 126030., supported by cDNA: gi_19698902 [Arabidopsis >gi|25453215|sp|Q9SI16|PE15_ARATH Peroxidase 15 precursor
  misc_feature (1)..(267): Homolog of NCBI NO: 15234394 NR Description: peroxidase, putative; protein id: At4g36430.1, by cDNA: gi_17530561, supported by cDNA: gi_18377685 [Arabidopsis
  misc_feature (1)..(268): Homolog of NCBI NO: 15239370 NR Description: peroxidase, putative; protein id: At5g66390.1 thaliana] >gi|26397792|sp|Q9FJZ9|PE72_ARATH Peroxidase 72 (Atperox P72) (PRXR8) (ATP6a) >gi|10177520|dbj|BAB10915.1|
  misc_feature (1)..(268): Homolog of NCBI NO: 1402918 NR Description: peroxidase [Arabidopsis thaliana]
  misc_feature (1)..(267): Homolog of NCBI NO: 7658147 NR Description: peroxidase [Asparagus officinalis]
  misc_feature (1)..(267): Homolog of NCBI NO: 34903044 NR Description: unnamed protein product [Oryza sativa (japonica group)] >gi|7242902|dbj|BAA92500.1| unnamed protein product
  misc_feature (1)..(266): Homolog of NCBI NO: 7453855 NR Description: peroxidase prx15 precursor [Spinacia oleracea]
  misc_feature (1)..(266): Homolog of NCBI NO: 7453853 NR Description: peroxidase prx14 precursor [Spinacia oleracea]
MRLHFHDCFVQGCDGSLLLDTSGSIVTEKNSNPNSRSARGFEVVDEIKAALENECPNTVSCADALTLAARDSSVLTGGPSWTVPLGRRDSATASRAKPNKDLPEPDNLFDTIFLRFSNEGLNLTDLVALSGSHTIGFSRCTSFRQRLYNQSGSGSPDTTLEKSYAAILRQRCPRSGGDQNLSELDINSAGRFDNSYFKNLIENMGLLNSDQVLFSSNEQSRELVKKYAEDQEEFFEQFAESMIKMGKISPLTGSSGEIRKKCRKINNS

SEQ ID NO: 89767 - DNA, 531 bp, Arabidopsis thaliana
  misc_feature (1)..(531): Ceres Seq. ID no. 12720402
  misc_feature: MA Experiment ID: 20000315 Result: Down-regulated in Transcription
  misc_feature: MA Experiment 20000315 PARAMETER Experiment Name: At_14day_Shoots-Roots_Sub_P Parameter: Age (day) Value: 14
  misc_feature: MA Experiment 20000315 PARAMETER Experiment Name: At_14day_Shoots-Roots_Sub_P Parameter: Organism Value: A. thaliana
  misc_feature: MA Experiment 20000315 PARAMETER Experiment Name: At_14day_Shoots-Roots_Sub_P Parameter: Plant Line Value: WS
  misc_feature: MA Experiment 20000315 PARAMETER Experiment Name: At_14day_Shoots-Roots_Sub_P Parameter: Tissue Value: Shoots vs. Whole Plant
atggcagctccggaagattcaaagatgtctccggcgaattcgtttggagctgtcgttctcggcggtacgtttgatcgattacacgatgggcatcgaatgttcctcaaggcggcggcggagctggccagggatcggatcgtagtgggagtctgtgatggcccaatgttgacgaaaaagcaattctctgacatgattcaacccattgaagaaaggatgcgtaatgtggagacctatgtcaagtctatcaagcccgagctggttgtacaagccgaacccattacagatccatatggcccttctatcgtagatgaaaatttggaagctattgttgtcagcaaagagacattacctggtggcttgtcagttaacagaaaaagagcagaaagaggtctttcacagcttaagattgaagttgtggaaatagtttctgatggatcgagtggaaataagataagttcaagtactctgagaaaaatggaggctgagaaagcgtctaaacaaaaacaaccagcagaagaaaaagcatcatga

SEQ ID NO: 89768 - protein, 176 aa, Arabidopsis thaliana
  peptide (1)..(176): Ceres Seq. ID no. 12720403
  misc_feature (1)..(176): Homolog of NCBI NO: 15224138 NR Description: hypothetical protein; protein id: At2g18250.1
  misc_feature (2)..(173): Homolog of NCBI NO: 34393473 NR Description: bifunctional phosphopantetheine adenylyl
  misc_feature (4)..(169): Homolog of NCBI NO: 39589394 NR Description: Hypothetical protein CBG22156 [Caenorhabditis
  misc_feature (8)..(158): Homolog of NCBI NO: 25143409 NR Description: Cytidylyltransferase and Dephospho-CoA kinase kD) [Caenorhabditis elegans] >gi|25167211|gb|AAK29952.3|
  misc_feature (7)..(158): Homolog of NCBI NO: 27229125 NR Description: CoA synthase; 4'-phosphopantetheine
  misc_feature (7)..(158): Homolog of NCBI NO: 40555799 NR Description: 1300003G02Rik protein [Mus musculus]
  misc_feature (12)..(170): Homolog of NCBI NO: 6321716 NR Description: Protein required for cell viability; Ygr277cp cerevisiae] >gi|1723781|sp|P53332|YG5T_YEAST HYPOTHETICAL 34.3 KD
  misc_feature (16)..(158): Homolog of NCBI NO: 20465246 NR Description: bifunctional phosphopantetheine adenylyl
  misc_feature (2)..(158): Homolog of NCBI NO: 17981025 NR Description: phosphopantetheine adenylyltransferase /
  misc_feature (2)..(158): Homolog of NCBI NO: 22095395 NR Description: nucleotide binding protein; phosphopantetheine / dephosphocoenzyme A kinase; coenzyme A synthase [Homo sapiens] bifunctional phosphopantetheine adenylyl transferase / dephospho
MAAPEDSKMSPANSFGAVVLGGTFDRLHDGHRMFLKAAAELARDRIVVGVCDGPMLTKKQFSDMIQPIEERMRNVETYVKSIKPELVVQAEPITDPYGPSIVDENLEAIVVSKETLPGGLSVNRKRAERGLSQLKIEVVEIVSDGSSGNKISSSTLRKMEAEKASKQKQPAEEKAS

SEQ ID NO: 89769 - protein, 168 aa, Arabidopsis thaliana
  peptide (1)..(168): Ceres Seq. ID no. 12720404
  misc_feature (1)..(168): Homolog of NCBI NO: 15224138 NR Description: hypothetical protein; protein id: At2g18250.1
  misc_feature (1)..(165): Homolog of NCBI NO: 34393473 NR Description: bifunctional phosphopantetheine adenylyl
  misc_feature (1)..(161): Homolog of NCBI NO: 39589394 NR Description: Hypothetical protein CBG22156 [Caenorhabditis
  misc_feature (1)..(150): Homolog of NCBI NO: 25143409 NR Description: Cytidylyltransferase and Dephospho-CoA kinase kD) [Caenorhabditis elegans] >gi|25167211|gb|AAK29952.3|
  misc_feature (1)..(150): Homolog of NCBI NO: 27229125 NR Description: CoA synthase; 4'-phosphopantetheine
  misc_feature (1)..(150): Homolog of NCBI NO: 40555799 NR Description: 1300003G02Rik protein [Mus musculus]
  misc_feature (4)..(162): Homolog of NCBI NO: 6321716 NR Description: Protein required for cell viability; Ygr277cp cerevisiae] >gi|1723781|sp|P53332|YG5T_YEAST HYPOTHETICAL 34.3 KD
  misc_feature (8)..(150): Homolog of NCBI NO: 20465246 NR Description: bifunctional phosphopantetheine adenylyl
  misc_feature (1)..(150): Homolog of NCBI NO: 17981025 NR Description: phosphopantetheine adenylyltransferase /
  misc_feature (1)..(150): Homolog of NCBI NO: 22095395 NR Description: nucleotide binding protein; phosphopantetheine / dephosphocoenzyme A kinase; coenzyme A synthase [Homo sapiens] bifunctional phosphopantetheine adenylyl transferase / dephospho
MSPANSFGAVVLGGTFDRLHDGHRMFLKAAAELARDRIVVGVCDGPMLTKKQFSDMIQPIEERMRNVETYVKSIKPELVVQAEPITDPYGPSIVDENLEAIVVSKETLPGGLSVNRKRAERGLSQLKIEVVEIVSDGSSGNKISSSTLRKMEAEKASKQKQPAEEKAS

SEQ ID NO: 89770 - protein, 144 aa, Arabidopsis thaliana
  peptide (1)..(144): Ceres Seq. ID no. 12720405
  misc_feature (1)..(144): Homolog of NCBI NO: 15224138 NR Description: hypothetical protein; protein id: At2g18250.1
  misc_feature (1)..(141): Homolog of NCBI NO: 34393473 NR Description: bifunctional phosphopantetheine adenylyl
  misc_feature (1)..(137): Homolog of NCBI NO: 39589394 NR Description: Hypothetical protein CBG22156 [Caenorhabditis
  misc_feature (1)..(126): Homolog of NCBI NO: 25143409 NR Description: Cytidylyltransferase and Dephospho-CoA kinase kD) [Caenorhabditis elegans] >gi|25167211|gb|AAK29952.3|
  misc_feature (1)..(126): Homolog of NCBI NO: 27229125 NR Description: CoA synthase; 4'-phosphopantetheine
  misc_feature (1)..(126): Homolog of NCBI NO: 40555799 NR Description: 1300003G02Rik protein [Mus musculus]
  misc_feature (1)..(138): Homolog of NCBI NO: 6321716 NR Description: Protein required for cell viability; Ygr277cp cerevisiae] >gi|1723781|sp|P53332|YG5T_YEAST HYPOTHETICAL 34.3 KD
  misc_feature (1)..(126): Homolog of NCBI NO: 20465246 NR Description: bifunctional phosphopantetheine adenylyl
  misc_feature (1)..(126): Homolog of NCBI NO: 17981025 NR Description: phosphopantetheine adenylyltransferase /
  misc_feature (1)..(126): Homolog of NCBI NO: 22095395 NR Description: nucleotide binding protein; phosphopantetheine / dephosphocoenzyme A kinase; coenzyme A synthase [Homo sapiens] bifunctional phosphopantetheine adenylyl transferase / dephospho
MFLKAAAELARDRIVVGVCDGPMLTKKQFSDMIQPIEERMRNVETYVKSIKPELVVQAEPITDPYGPSIVDENLEAIVVSKETLPGGLSVNRKRAERGLSQLKIEVVEIVSDGSSGNKISSSTLRKMEAEKASKQKQPAEEKAS

SEQ ID NO: 89771 - DNA, 624 bp, Arabidopsis thaliana
  misc_feature (1)..(624): Ceres Seq. ID no. 12720414
  misc_feature: MA Experiment ID: 20000355 Result: Up-regulated in Transcription
  misc_feature: MA Experiment 20000355 PARAMETER Experiment Name: At_Siliques_Sub_P Parameter: Age (day) Value: 21
  misc_feature: MA Experiment 20000355 PARAMETER Experiment Name: At_Siliques_Sub_P Parameter: Organism Value: A. thaliana
  misc_feature: MA Experiment 20000355 PARAMETER Experiment Name: At_Siliques_Sub_P Parameter: Plant Line Value: WS
  misc_feature: MA Experiment 20000355 PARAMETER Experiment Name: At_Siliques_Sub_P Parameter: Tissue Value: Less Than 5mm Siliques vs. Whole Plant
atgggataccaaacaaactctaatttctccatgtttttttcctcggaaaatgacgaccaaaaccaccacaactacgatccttataataatttctcttcatcaacttctgttgattgcactctctcacttggaacaccctctactcgtctcgacgaccaccatagattttcttctgctaattctaacaacatctccggcgacttttatattcacggaggaaacgctaagacttcttcgtacaagaagggtggtgttgctcatagcctacctcgccgttgtgctagctgcgacaccacttcaactcctctatggagaaacggaccaaaaggacctaagtcgttatgtaacgcgtgtggaatccgattcaagaaagaggagaggcgtgcgacggccagaaacttaacgatctccggtggaggttcatcagcggcagaagtcccagtagagaattcgtacaacggaggtggaaactattacagtcatcatcatcatcactatgcctcgtcgtcgccgtcgtgggctcatcagaacacacaaagagttccatatttctcaccggttccggagatggaatatccctacgtggataacgtcacggcttcttcttttatgtcttggaattga

SEQ ID NO: 89772 - protein, 207 aa, Arabidopsis thaliana
  peptide (1)..(207): Ceres Seq. ID no. 12720415
  misc_feature (1)..(207): Homolog of NCBI NO: 15224164 NR Description: GATA zinc finger protein; protein id: At2g18380.1
  misc_feature (9)..(206): Homolog of NCBI NO: 15234463 NR Description: GATA zinc finger protein; protein id: At4g36620.1
  misc_feature (83)..(192): Homolog of NCBI NO: 7488381 NR Description: transcription factor homolog F18B3.150 -
  misc_feature (83)..(192): Homolog of NCBI NO: 18409199 NR Description: GATA zinc finger protein; protein id:
  misc_feature (83)..(192): Homolog of NCBI NO: 21555178 NR Description: transcription factor-like protein [Arabidopsis
  misc_feature (6)..(80): Homolog of NCBI NO: 7488381 NR Description: transcription factor homolog F18B3.150 -
  misc_feature (6)..(80): Homolog of NCBI NO: 21555178 NR Description: transcription factor-like protein [Arabidopsis
  misc_feature (6)..(80): Homolog of NCBI NO: 18409199 NR Description: GATA zinc finger protein; protein id:
  misc_feature (31)..(131): Homolog of NCBI NO: 34912080 NR Description: P0671D01.19 [Oryza sativa (japonica
  misc_feature (73)..(112): Homolog of NCBI NO: 5091599 NR Description: 10A19I.2 [Oryza sativa]
MGYQTNSNFSMFFSSENDDQNHHNYDPYNNFSSSTSVDCTLSLGTPSTRLDDHHRFSSANSNNISGDFYIHGGNAKTSSYKKGGVAHSLPRRCASCDTTSTPLWRNGPKGPKSLCNACGIRFKKEERRATARNLTISGGGSSAAEVPVENSYNGGGNYYSHHHHHYASSSPSWAHQNTQRVPYFSPVPEMEYPYVDNVTASSFMSWN

SEQ ID NO: 89773 - protein, 197 aa, Arabidopsis thaliana
  peptide (1)..(197): Ceres Seq. ID no. 12720416
  misc_feature (1)..(197): Homolog of NCBI NO: 15224164 NR Description: GATA zinc finger protein; protein id: At2g18380.1
  misc_feature (1)..(196): Homolog of NCBI NO: 15234463 NR Description: GATA zinc finger protein; protein id: At4g36620.1
  misc_feature (73)..(182): Homolog of NCBI NO: 7488381 NR Description: transcription factor homolog F18B3.150 -
  misc_feature (73)..(182): Homolog of NCBI NO: 18409199 NR Description: GATA zinc finger protein; protein id:
  misc_feature (73)..(182): Homolog of NCBI NO: 21555178 NR Description: transcription factor-like protein [Arabidopsis
  misc_feature (1)..(70): Homolog of NCBI NO: 7488381 NR Description: transcription factor homolog F18B3.150 -
  misc_feature (1)..(70): Homolog of NCBI NO: 18409199 NR Description: GATA zinc finger protein; protein id:
  misc_feature (1)..(70): Homolog of NCBI NO: 21555178 NR Description: transcription factor-like protein [Arabidopsis
  misc_feature (21)..(121): Homolog of NCBI NO: 34912080 NR Description: P0671D01.19 [Oryza sativa (japonica
  misc_feature (63)..(102): Homolog of NCBI NO: 5091599 NR Description: 10A19I.2 [Oryza sativa]
MFFSSENDDQNHHNYDPYNNFSSSTSVDCTLSLGTPSTRLDDHHRFSSANSNNISGDFYIHGGNAKTSSYKKGGVAHSLPRRCASCDTTSTPLWRNGPKGPKSLCNACGIRFKKEERRATARNLTISGGGSSAAEVPVENSYNGGGNYYSHHHHHYASSSPSWAHQNTQRVPYFSPVPEMEYPYVDNVTASSFMSWN

SEQ ID NO: 89774 - protein, 133 aa, Arabidopsis thaliana
  peptide (1)..(133): Ceres Seq. ID no. 12720417
WDTKQTLISPCFFPRKMTTKTTTTTILIIISLHQLLLIALSHLEHPLLVSTTTIDFLLLILTTSPATFIFTEETLRLLRTRRVVLLIAYLAVVLAATPLQLLYGETDQKDLSRYVTRVESDSRKRRGVRRPET

SEQ ID NO: 89775 - DNA, 663 bp, Arabidopsis thaliana
  misc_feature (1)..(663): Ceres Seq. ID no. 12720425
  misc_feature: MA Experiment ID: 20000169 Result: Up-regulated in Transcription
  misc_feature: MA Experiment 20000169 PARAMETER Experiment Name: At_100uM_ABA_P Parameter: Age (day) Value: 14
  misc_feature: MA Experiment 20000169 PARAMETER Experiment Name: At_100uM_ABA_P Parameter: Organism Value: A. thaliana
  misc_feature: MA Experiment 20000169 PARAMETER Experiment Name: At_100uM_ABA_P Parameter: Plant Line Value: WS
  misc_feature: MA Experiment 20000169 PARAMETER Experiment Name: At_100uM_ABA_P Parameter: Timepoint (hr) Value: 6
  misc_feature: MA Experiment 20000169 PARAMETER Experiment Name: At_100uM_ABA_P Parameter: Tissue Value: Aerial
  misc_feature: MA Experiment 20000169 PARAMETER Experiment Name: At_100uM_ABA_P Parameter: Treatment Value: 100uM ABA vs. No Treatment
  misc_feature: MA Experiment ID: 20000182 Result: Up-regulated in Transcription
  misc_feature: MA Experiment 20000182 PARAMETER Experiment Name: At_2mM_SA_P Parameter: Age (day) Value: 14
  misc_feature: MA Experiment 20000182 PARAMETER Experiment Name: At_2mM_SA_P Parameter: Organism Value: A. thaliana
  misc_feature: MA Experiment 20000182 PARAMETER Experiment Name: At_2mM_SA_P Parameter: Plant Line Value: WS
  misc_feature: MA Experiment 20000182 PARAMETER Experiment Name: At_2mM_SA_P Parameter: Timepoint (hr) Value: 6
  misc_feature: MA Experiment 20000182 PARAMETER Experiment Name: At_2mM_SA_P Parameter: Tissue Value: Aerial
  misc_feature: MA Experiment 20000182 PARAMETER Experiment Name: At_2mM_SA_P Parameter: Treatment Value: 2mM SA vs. No Treatment
  misc_feature: MA Experiment ID: 20000184 Result: Down-regulated in Transcription
  misc_feature: MA Experiment 20000184 PARAMETER Experiment Name: At_Shoots__P Parameter: Age (day) Value: 7
  misc_feature: MA Experiment 20000184 PARAMETER Experiment Name: At_Shoots__P Parameter: Tissue Value: Shoots vs. Whole Plant
  misc_feature: MA Experiment ID: 20000185 Result: Down-regulated in Transcription
  misc_feature: MA Experiment 20000185 PARAMETER Experiment Name: At_Roots__P Parameter: Age (day) Value: 7 vs. 21
  misc_feature: MA Experiment 20000185 PARAMETER Experiment Name: At_Roots__P Parameter: Organism Value: A. thaliana
  misc_feature: MA Experiment 20000185 PARAMETER Experiment Name: At_Roots__P Parameter: Tissue Value: Roots vs. Whole Plant
  misc_feature: MA Experiment ID: 20000436 Result: Up-regulated in Transcription
  misc_feature: MA Experiment 20000436 PARAMETER Experiment Name: At_Drought_P Parameter: Age (day) Value: 7
  misc_feature: MA Experiment 20000436 PARAMETER Experiment Name: At_Drought_P Parameter: Organism Value: A. thaliana
  misc_feature: MA Experiment 20000436 PARAMETER Experiment Name: At_Drought_P Parameter: Plant Line Value: WS
  misc_feature: MA Experiment 20000436 PARAMETER Experiment Name: At_Drought_P Parameter: Timepoint (hr) Value: 12
  misc_feature: MA Experiment 20000436 PARAMETER Experiment Name: At_Drought_P Parameter: Tissue Value: Whole Plant
  misc_feature: MA Experiment 20000436 PARAMETER Experiment Name: At_Drought_P Parameter: Treatment Value: Drought vs. No Drought
  misc_feature: MA Experiment ID: 20000437 Result: Up-regulated in Transcription
  misc_feature: MA Experiment 20000437 PARAMETER Experiment Name: At_Drought_P Parameter: Age (day) Value: 8
  misc_feature: MA Experiment 20000437 PARAMETER Experiment Name: At_Drought_P Parameter: Organism Value: A. thaliana
  misc_feature: MA Experiment 20000437 PARAMETER Experiment Name: At_Drought_P Parameter: Plant Line Value: WS
  misc_feature: MA Experiment 20000437 PARAMETER Experiment Name: At_Drought_P Parameter: Timepoint (hr) Value: 24
  misc_feature: MA Experiment 20000437 PARAMETER Experiment Name: At_Drought_P Parameter: Tissue Value: Whole Plant
  misc_feature: MA Experiment 20000437 PARAMETER Experiment Name: At_Drought_P Parameter: Treatment Value: Drought vs. No Drought
  misc_feature: MA Experiment ID: 20000438 Result: Down-regulated in Transcription
  misc_feature: MA Experiment 20000438 PARAMETER Experiment Name: At_Shoots__P Parameter: Age (day) Value: 14
  misc_feature: MA Experiment 20000438 PARAMETER Experiment Name: At_Shoots__P Parameter: Tissue Value: Shoots vs. Whole Plant
  misc_feature: MA Experiment ID: 20000439 Result: Down-regulated in Transcription
  misc_feature: MA Experiment 20000439 PARAMETER Experiment Name: At_Roots__P Parameter: Age (day) Value: 14 vs. 21
  misc_feature: MA Experiment 20000439 PARAMETER Experiment Name: At_Roots__P Parameter: Organism Value: A. thaliana
  misc_feature: MA Experiment 20000439 PARAMETER Experiment Name: At_Roots__P Parameter: Tissue Value: Roots vs. Whole Plant
  misc_feature: MA Experiment ID: 20000451 Result: Up-regulated in Transcription
  misc_feature: MA Experiment 20000451 PARAMETER Experiment Name: At_CS6879_Shoots-Roots_P Parameter: Age (day) Value: 14
  misc_feature: MA Experiment 20000451 PARAMETER Experiment Name: At_CS6879_Shoots-Roots_P Parameter: Organism Value: A. thaliana
  misc_feature: MA Experiment 20000451 PARAMETER Experiment Name: At_CS6879_Shoots-Roots_P Parameter: Plant Line Value: CS6879 vs. WS
  misc_feature: MA Experiment 20000451 PARAMETER Experiment Name: At_CS6879_Shoots-Roots_P Parameter: Tissue Value: Roots
  misc_feature: MA Experiment ID: 20000453 Result: Up-regulated in Transcription
  misc_feature: MA Experiment 20000453 PARAMETER Experiment Name: At_100uM_ABA_P Parameter: Age (day) Value: 15
  misc_feature: MA Experiment 20000453 PARAMETER Experiment Name: At_100uM_ABA_P Parameter: Organism Value: A. thaliana
  misc_feature: MA Experiment 20000453 PARAMETER Experiment Name: At_100uM_ABA_P Parameter: Plant Line Value: WS
  misc_feature: MA Experiment 20000453 PARAMETER Experiment Name: At_100uM_ABA_P Parameter: Timepoint (hr) Value: 24
  misc_feature: MA Experiment 20000453 PARAMETER Experiment Name: At_100uM_ABA_P Parameter: Tissue Value: Aerial
  misc_feature: MA Experiment 20000453 PARAMETER Experiment Name: At_100uM_ABA_P Parameter: Treatment Value: 100uM ABA vs. No Treatment
  misc_feature: MA Experiment ID: 20000794 Result: Up-regulated in Transcription
  misc_feature: MA Experiment 20000794 PARAMETER Experiment Name: At_Petals_P Parameter: Age (day) Value: 23-25 days
  misc_feature: MA Experiment 20000794 PARAMETER Experiment Name: At_Petals_P Parameter: Plant Line Value: WS
  misc_feature: MA Experiment 20000794 PARAMETER Experiment Name: At_Petals_P Parameter: Tissue Value: Petals vs. Whole plant
  misc_feature: MA Experiment ID: 20001554 Result: Up-regulated in Transcription
  misc_feature: MA Experiment 20001554 PARAMETER Experiment Name: At_Drought_Soil_Dry_P Parameter: Age (day) Value: 21
  misc_feature: MA Experiment 20001554 PARAMETER Experiment Name: At_Drought_Soil_Dry_P Parameter: Organism Value: A. thaliana
  misc_feature: MA Experiment 20001554 PARAMETER Experiment Name: At_Drought_Soil_Dry_P Parameter: Plant Line Value: WS
  misc_feature: MA Experiment 20001554 PARAMETER Experiment Name: At_Drought_Soil_Dry_P Parameter: Post Timepoint (hr) Value: None
  misc_feature: MA Experiment 20001554 PARAMETER Experiment Name: At_Drought_Soil_Dry_P Parameter: Post-Treatment Value: None
  misc_feature: MA Experiment 20001554 PARAMETER Experiment Name: At_Drought_Soil_Dry_P Parameter: Timepoint (day) Value: 7
  misc_feature: MA Experiment 20001554 PARAMETER Experiment Name: At_Drought_Soil_Dry_P Parameter: Treatment Value: Drought vs. No Drought
  misc_feature: MA Experiment ID: 20001905 Result: Up-regulated in Transcription
  misc_feature: MA Experiment 20001905 PARAMETER Experiment Name: At_Drought_Reproduction_P Parameter: Age (day) Value: 40
  misc_feature: MA Experiment 20001905 PARAMETER Experiment Name: At_Drought_Reproduction_P Parameter: Organism Value: A. thaliana
  misc_feature: MA Experiment 20001905 PARAMETER Experiment Name: At_Drought_Reproduction_P Parameter: Plant Line Value: WS
  misc_feature: MA Experiment 20001905 PARAMETER Experiment Name: At_Drought_Reproduction_P Parameter: Timepoint (day) Value: 10
  misc_feature: MA Experiment 20001905 PARAMETER Experiment Name: At_Drought_Reproduction_P Parameter: Tissue Value: Rosettes
  misc_feature: MA Experiment 20001905 PARAMETER Experiment Name: At_Drought_Reproduction_P Parameter: Treatment Value: Drought vs. No Drought
  misc_feature: MA Experiment ID: 20001906 Result: Up-regulated in Transcription
  misc_feature: MA Experiment 20001906 PARAMETER Experiment Name: At_Drought_Reproduction_P Parameter: Age (day) Value: 35
  misc_feature: MA Experiment 20001906 PARAMETER Experiment Name: At_Drought_Reproduction_P Parameter: Organism Value: A. thaliana
  misc_feature: MA Experiment 20001906 PARAMETER Experiment Name: At_Drought_Reproduction_P Parameter: Plant Line Value: WS
  misc_feature: MA Experiment 20001906 PARAMETER Experiment Name: At_Drought_Reproduction_P Parameter: Timepoint (day) Value: 5
  misc_feature: MA Experiment 20001906 PARAMETER Experiment Name: At_Drought_Reproduction_P Parameter: Tissue Value: Siliques
  misc_feature: MA Experiment 20001906 PARAMETER Experiment Name: At_Drought_Reproduction_P Parameter: Treatment Value: Drought vs. No Drought
  misc_feature: MA Experiment ID: 20001907 Result: Up-regulated in Transcription
  misc_feature: MA Experiment 20001907 PARAMETER Experiment Name: At_Drought_Reproduction_P Parameter: Age (day) Value: 37
  misc_feature: MA Experiment 20001907 PARAMETER Experiment Name: At_Drought_Reproduction_P Parameter: Organism Value: A. thaliana
  misc_feature: MA Experiment 20001907 PARAMETER Experiment Name: At_Drought_Reproduction_P Parameter: Plant Line Value: WS
  misc_feature: MA Experiment 20001907 PARAMETER Experiment Name: At_Drought_Reproduction_P Parameter: Timepoint (day) Value: 7
  misc_feature: MA Experiment 20001907 PARAMETER Experiment Name: At_Drought_Reproduction_P Parameter: Tissue Value: Siliques
  misc_feature: MA Experiment 20001907 PARAMETER Experiment Name: At_Drought_Reproduction_P Parameter: Treatment Value: Drought vs. No Drought
  misc_feature: MA Experiment ID: 20001908 Result: Up-regulated in Transcription
  misc_feature: MA Experiment 20001908 PARAMETER Experiment Name: At_Drought_Reproduction_P Parameter: Age (day) Value: 40
  misc_feature: MA Experiment 20001908 PARAMETER Experiment Name: At_Drought_Reproduction_P Parameter: Organism Value: A. thaliana
  misc_feature: MA Experiment 20001908 PARAMETER Experiment Name: At_Drought_Reproduction_P Parameter: Plant Line Value: WS
  misc_feature: MA Experiment 20001908 PARAMETER Experiment Name: At_Drought_Reproduction_P Parameter: Timepoint (day) Value: 10
  misc_feature: MA Experiment 20001908 PARAMETER Experiment Name: At_Drought_Reproduction_P Parameter: Tissue Value: Siliques
  misc_feature: MA Experiment 20001908 PARAMETER Experiment Name: At_Drought_Reproduction_P Parameter: Treatment Value: Drought vs. No Drought
  misc_feature: MA Experiment ID: 20001909 Result: Up-regulated in Transcription
  misc_feature: MA Experiment 20001909 PARAMETER Experiment Name: At_Drought_Reproduction_P Parameter: Age (day) Value: 35
  misc_feature: MA Experiment 20001909 PARAMETER Experiment Name: At_Drought_Reproduction_P Parameter: Organism Value: A. thaliana
  misc_feature: MA Experiment 20001909 PARAMETER Experiment Name: At_Drought_Reproduction_P Parameter: Plant Line Value: WS
  misc_feature: MA Experiment 20001909 PARAMETER Experiment Name: At_Drought_Reproduction_P Parameter: Timepoint (day) Value: 5
  misc_feature: MA Experiment 20001909 PARAMETER Experiment Name: At_Drought_Reproduction_P Parameter: Tissue Value: Flowers
  misc_feature: MA Experiment 20001909 PARAMETER Experiment Name: At_Drought_Reproduction_P Parameter: Treatment Value: Drought vs. No Drought
  misc_feature: MA Experiment ID: 20001910 Result: Up-regulated in Transcription
  misc_feature: MA Experiment 20001910 PARAMETER Experiment Name: At_Drought_Reproduction_P Parameter: Age (day) Value: 37
  misc_feature: MA Experiment 20001910 PARAMETER Experiment Name: At_Drought_Reproduction_P Parameter: Organism Value: A. thaliana
  misc_feature: MA Experiment 20001910 PARAMETER Experiment Name: At_Drought_Reproduction_P Parameter: Plant Line Value: WS
  misc_feature: MA Experiment 20001910 PARAMETER Experiment Name: At_Drought_Reproduction_P Parameter: Timepoint (day) Value: 7
  misc_feature: MA Experiment 20001910 PARAMETER Experiment Name: At_Drought_Reproduction_P Parameter: Tissue Value: Flowers
  misc_feature: MA Experiment 20001910 PARAMETER Experiment Name: At_Drought_Reproduction_P Parameter: Treatment Value: Drought vs. No Drought
  misc_feature: MA Experiment ID: 20001911 Result: Up-regulated in Transcription
  misc_feature: MA Experiment 20001911 PARAMETER Experiment Name: At_Drought_Reproduction_P Parameter: Age (day) Value: 40
  misc_feature: MA Experiment 20001911 PARAMETER Experiment Name: At_Drought_Reproduction_P Parameter: Organism Value: A. thaliana
  misc_feature: MA Experiment 20001911 PARAMETER Experiment Name: At_Drought_Reproduction_P Parameter: Plant Line Value: WS
  misc_feature: MA Experiment 20001911 PARAMETER Experiment Name: At_Drought_Reproduction_P Parameter: Timepoint (day) Value: 10
  misc_feature: MA Experiment 20001911 PARAMETER Experiment Name: At_Drought_Reproduction_P Parameter: Tissue Value: Flowers
  misc_feature: MA Experiment 20001911 PARAMETER Experiment Name: At_Drought_Reproduction_P Parameter: Treatment Value: Drought vs. No Drought
atgaataaccagaatgtagatgatcataatcttctactcatttctcaattgtaccctaatgtctatactccattagtaccacaacaaggaggagaagcaaaaccaacacggcggaggaaaaggaagagcaagagtgttgtggtggcagaggagggtgaaaacgaaggcaatgggtggtttagaaagagaaaattgagtgatgagcaagtaagaatgttggagattagctttgaagacgatcataagcttgaatccgagaggaaagatcggcttgcttctgagttagggcttgatcctcgtcaagtcgccgtctggttccaaaaccgccgtgcacggtggaagaacaaacgagtcgaggatgaatacactaaactcaagaatgcatacgaaaccaccgtcgttgagaaatgtcgtcttgattctgaggttattcacctaaaggaacaactttacgaggctgaaagagagatccaacggcttgcaaaaagagttgaaggaactttaagtaacagtcctatctcatcctctgtgaccattgaagccaatcatacgacaccgttttttggagattacgacatcggatttgacggtgaggctgacgagaacttgctctactcgccagattacattgatggattagactggatgagccaatttatgtaa

SEQ ID NO: 89776 - protein, 220 aa, Arabidopsis thaliana
  peptide (1)..(220): Ceres Seq. ID no. 12720426
  misc_feature (62)..(115): Pfam Name: Homeobox domain Pfam Description: Homeobox domain
  misc_feature (1)..(220): Homolog of NCBI NO: 15224190 NR Description: homeodomain protein; protein id: At2g18550.1 thaliana] >gi|25411880|pir||F84565 probable homeodomain
  misc_feature (3)..(220): Homolog of NCBI NO: 15234508 NR Description: homeodomain protein; protein id: At4g36740.1
  misc_feature (1)..(213): Homolog of NCBI NO: 15240052 NR Description: homeodomain transcription factor-like; protein At5g66700.1 [Arabidopsis thaliana] >gi|8843728|dbj|BAA97276.1|
  misc_feature (31)..(160): Homolog of NCBI NO: 33146844 NR Description: homeodomain protein-like [Oryza sativa (japonica
  misc_feature (105)..(216): Homolog of NCBI NO: 11231049 NR Description: homeobox-leucine zipper protein [Zinnia elegans]
  misc_feature (39)..(165): Homolog of NCBI NO: 3868839 NR Description: CRHB6 [Ceratopteris richardii]
  misc_feature (50)..(157): Homolog of NCBI NO: 7415622 NR Description: homeobox protein PpHB5 [Physcomitrella patens]
  misc_feature (39)..(158): Homolog of NCBI NO: 3868849 NR Description: CRHB11 [Ceratopteris richardii]
  misc_feature (48)..(192): Homolog of NCBI NO: 5006853 NR Description: homeodomain leucine zipper protein [Oryza sativa]
  misc_feature (32)..(180): Homolog of NCBI NO: 3868841 NR Description: CRHB7 [Ceratopteris richardii]
MNNQNVDDHNLLLISQLYPNVYTPLVPQQGGEAKPTRRRKRKSKSVVVAEEGENEGNGWFRKRKLSDEQVRMLEISFEDDHKLESERKDRLASELGLDPRQVAVWFQNRRARWKNKRVEDEYTKLKNAYETTVVEKCRLDSEVIHLKEQLYEAEREIQRLAKRVEGTLSNSPISSSVTIEANHTTPFFGDYDIGFDGEADENLLYSPDYIDGLDWMSQFM

SEQ ID NO: 89777 - protein, 149 aa, Arabidopsis thaliana
  peptide (1)..(149): Ceres Seq. ID no. 12720427
  misc_feature (1)..(44): Pfam Name: Homeobox domain Pfam Description: Homeobox domain
  misc_feature (1)..(149): Homolog of NCBI NO: 15224190 NR Description: homeodomain protein; protein id: At2g18550.1 thaliana] >gi|25411880|pir||F84565 probable homeodomain
  misc_feature (1)..(149): Homolog of NCBI NO: 15234508 NR Description: homeodomain protein; protein id: At4g36740.1
  misc_feature (1)..(142): Homolog of NCBI NO: 15240052 NR Description: homeodomain transcription factor-like; protein At5g66700.1 [Arabidopsis thaliana] >gi|8843728|dbj|BAA97276.1|
  misc_feature (1)..(89): Homolog of NCBI NO: 33146844 NR Description: homeodomain protein-like [Oryza sativa (japonica
  misc_feature (34)..(145): Homolog of NCBI NO: 11231049 NR Description: homeobox-leucine zipper protein [Zinnia elegans]
  misc_feature (1)..(94): Homolog of NCBI NO: 3868839 NR Description: CRHB6 [Ceratopteris richardii]
  misc_feature (1)..(86): Homolog of NCBI NO: 7415622 NR Description: homeobox protein PpHB5 [Physcomitrella patens]
  misc_feature (1)..(87): Homolog of NCBI NO: 3868849 NR Description: CRHB11 [Ceratopteris richardii]
  misc_feature (1)..(121): Homolog of NCBI NO: 5006853 NR Description: homeodomain leucine zipper protein [Oryza sativa]
  misc_feature (1)..(109): Homolog of NCBI NO: 3868841 NR Description: CRHB7 [Ceratopteris richardii]
MLEISFEDDHKLESERKDRLASELGLDPRQVAVWFQNRRARWKNKRVEDEYTKLKNAYETTVVEKCRLDSEVIHLKEQLYEAEREIQRLAKRVEGTLSNSPISSSVTIEANHTTPFFGDYDIGFDGEADENLLYSPDYIDGLDWMSQFM

SEQ ID NO: 89778 - DNA, 1335 bp, Arabidopsis thaliana
  misc_feature (1)..(1335): Ceres Seq. ID no. 12720428
  misc_feature: MA Experiment ID: 20000355 Result: Down-regulated in Transcription
  misc_feature: MA Experiment 20000355 PARAMETER Experiment Name: At_Siliques_Sub_P Parameter: Age (day) Value: 21
  misc_feature: MA Experiment 20000355 PARAMETER Experiment Name: At_Siliques_Sub_P Parameter: Organism Value: A. thaliana
  misc_feature: MA Experiment 20000355 PARAMETER Experiment Name: At_Siliques_Sub_P Parameter: Plant Line Value: WS
  misc_feature: MA Experiment 20000355 PARAMETER Experiment Name: At_Siliques_Sub_P Parameter: Tissue Value: Less Than 5mm Siliques vs. Whole Plant
  misc_feature: MA Experiment ID: 20001807 Result: Up-regulated in Transcription
  misc_feature: MA Experiment 20001807 PARAMETER Experiment Name: At_50mM_NH4NO3_L-to-H_Sub_P Parameter: Timepoint (hr) Value: 6
  misc_feature: MA Experiment 20001807 PARAMETER Experiment Name: At_50mM_NH4NO3_L-to-H_Sub_P Parameter: Tissue Value: Leaf
  misc_feature: MA Experiment 20001807 PARAMETER Experiment Name: At_50mM_NH4NO3_L-to-H_Sub_P Parameter: Treatment Value: 50mM NH4NO3 vs 100mM Mannitol
atggagcatcctcacgtgcttttagtcgctagccctggcttggggcaccttatccctgccctcgaactcggaaaccgtctctccttcgtcctcaacgtccacgtcaccattcttgcaatcacctccggctcctcttccctcacagaaaccgagaccatacatacagccgcggctagagggaccttgagcaagatgcgagaaatgaagtccacggttcgtgatgccgtgaaatcaatgaagcaaaaaccgacggtcatgattgttgacttttttggtacagcgttgttgtccataaccgatgtaggtgtgacgagtaagtatgtgtacataccgtctcacgcgtggttcttggcattaattgtctacttgccggtattggataaggtaatggaaggtgagtatgttgatattaaggagcctatgaaaataccaggttgtaaaccggtcggaccaaaagagcttttggacacaatgttagaccggtccgaccaacaataccgtgattgtgtacagattgggttggagatacctatgagcgatggagttttggtaaatacttggggggagttacaagggaagactctagctgcgctaagagaggacatagatttgaaccgggttataaaagtaccggtttatcctattggacctattgttaggactaatgtgcttattgaaaaaccaaacagtacattcgagtggctagacaaacaagaggaaagatctgttgtatatgtgtgtttagggagtggtggaacattgtcgtttgagcaaacgatggaactagcttgggggttagagttaagttgtcaaagtttcttatgggttctacgtaagcctccttcttaccttggagcaagctcaaaagatgatgatcaagtaagtgacggtctaccagaaggtttcttggaccgcacacgtggtgtagggcttgtggtaacgcaatgggcaccgcaagttgagatcttaagccatagatcaatcggtgggtttttgtcacattgtggttggagctcggtgttggagagtttaactaaaggagttccgatcatcgcttggcctctttatgcggagcaatggatgaatgccacgttgctgacggaggagattggtatggctattcgtacgtcagagttaccgtcgaagaaagtgatcagccgggaagaagtggcgtctttggtgaagaagattgtagcggaagaggataaagaaggacgaaagataaagactaaagctgaagaggtgagggttagctccgaacgagcttggactcatggtgggtcgtctcatagttctctctttgaatgggcaaaacgatgtgggcttgtatcttaa

SEQ ID NO: 89779 - protein, 444 aa, Arabidopsis thaliana
  peptide (1)..(444): Ceres Seq. ID no. 12720429
  misc_feature (5)..(444): Pfam Name: UDP-glucoronosyl and UDP-glucosyl transferase Pfam Description: UDP-glucoronosyl and UDP-glucosyl transferase
  misc_feature (1)..(444): Homolog of NCBI NO: 25286815 NR Description: probable flavonol 3-O-glucosyltransferase
  misc_feature (65)..(444): Homolog of NCBI NO: 30680413 NR Description: UDP-glucosyltransferase family [Arabidopsis
  misc_feature (65)..(444): Homolog of NCBI NO: 39104603 NR Description: putative flavonol 3-O-glucosyltransferase
  misc_feature (64)..(443): Homolog of NCBI NO: 25286819 NR Description: probable flavonol 3-O-glucosyltransferase
  misc_feature (1)..(70): Homolog of NCBI NO: 25286819 NR Description: probable flavonol 3-O-glucosyltransferase
  misc_feature (178)..(443): Homolog of NCBI NO: 30680415 NR Description: glycosyltransferase family [Arabidopsis thaliana]
  misc_feature (65)..(438): Homolog of NCBI NO: 2501494 NR Description: Flavonol 3-O-glucosyltransferase 5 (UDP-glucose
  misc_feature (4)..(56): Homolog of NCBI NO: 2501494 NR Description: Flavonol 3-O-glucosyltransferase 5 (UDP-glucose
  misc_feature (62)..(433): Homolog of NCBI NO: 18409172 NR Description: UTP-glucose glucosyltransferase - like protein; id: At3g50740.1, supported by cDNA: gi_15146271 [Arabidopsis >gi|15146272|gb|AAK83619.1| AT3g50740/T3A5_120 [Arabidopsis
  misc_feature (4)..(46): Homolog of NCBI NO: 18409172 NR Description: UTP-glucose glucosyltransferase - like protein; id: At3g50740.1, supported by cDNA: gi_15146271 [Arabidopsis >gi|15146272|gb|AAK83619.1| AT3g50740/T3A5_120 [Arabidopsis
MEHPHVLLVASPGLGHLIPALELGNRLSFVLNVHVTILAITSGSSSLTETETIHTAAARGTLSKMREMKSTVRDAVKSMKQKPTVMIVDFFGTALLSITDVGVTSKYVYIPSHAWFLALIVYLPVLDKVMEGEYVDIKEPMKIPGCKPVGPKELLDTMLDRSDQQYRDCVQIGLEIPMSDGVLVNTWGELQGKTLAALREDIDLNRVIKVPVYPIGPIVRTNVLIEKPNSTFEWLDKQEERSVVYVCLGSGGTLSFEQTMELAWGLELSCQSFLWVLRKPPSYLGASSKDDDQVSDGLPEGFLDRTRGVGLVVTQWAPQVEILSHRSIGGFLSHCGWSSVLESLTKGVPIIAWPLYAEQWMNATLLTEEIGMAIRTSELPSKKVISREEVASLVKKIVAEEDKEGRKIKTKAEEVRVSSERAWTHGGSSHSSLFEWAKRCGLVS

SEQ ID NO: 89780 - protein, 380 aa, Arabidopsis thaliana
  peptide (1)..(380): Ceres Seq. ID no. 12720430
  misc_feature (1)..(380): Pfam Name: UDP-glucoronosyl and UDP-glucosyl transferase Pfam Description: UDP-glucoronosyl and UDP-glucosyl transferase
  misc_feature (1)..(380): Homolog of NCBI NO: 25286815 NR Description: probable flavonol 3-O-glucosyltransferase
  misc_feature (1)..(380): Homolog of NCBI NO: 30680413 NR Description: UDP-glucosyltransferase family [Arabidopsis
  misc_feature (1)..(380): Homolog of NCBI NO: 39104603 NR Description: putative flavonol 3-O-glucosyltransferase
  misc_feature (1)..(379): Homolog of NCBI NO: 25286819 NR Description: probable flavonol 3-O-glucosyltransferase
  misc_feature (114)..(379): Homolog of NCBI NO: 30680415 NR Description: glycosyltransferase family [Arabidopsis thaliana]
  misc_feature (1)..(374): Homolog of NCBI NO: 2501494 NR Description: Flavonol 3-O-glucosyltransferase 5 (UDP-glucose
  misc_feature (1)..(369): Homolog of NCBI NO: 18409172 NR Description: UTP-glucose glucosyltransferase - like protein; id: At3g50740.1, supported by cDNA: gi_15146271 [Arabidopsis >gi|15146272|gb|AAK83619.1| AT3g50740/T3A5_120 [Arabidopsis
  misc_feature (1)..(369): Homolog of NCBI NO: 7433913 NR Description: UTP-glucose glucosyltransferase-like protein -
  misc_feature (1)..(376): Homolog of NCBI NO: 15240051 NR Description: UTP-glucose glucosyltransferase; protein id: supported by cDNA: 151441., supported by cDNA: gi_17065119,
  misc_feature (1)..(376): Homolog of NCBI NO: 15240305 NR Description: UTP-glucose glucosyltransferase - like protein;
MREMKSTVRDAVKSMKQKPTVMIVDFFGTALLSITDVGVTSKYVYIPSHAWFLALIVYLPVLDKVMEGEYVDIKEPMKIPGCKPVGPKELLDTMLDRSDQQYRDCVQIGLEIPMSDGVLVNTWGELQGKTLAALREDIDLNRVIKVPVYPIGPIVRTNVLIEKPNSTFEWLDKQEERSVVYVCLGSGGTLSFEQTMELAWGLELSCQSFLWVLRKPPSYLGASSKDDDQVSDGLPEGFLDRTRGVGLVVTQWAPQVEILSHRSIGGFLSHCGWSSVLESLTKGVPIIAWPLYAEQWMNATLLTEEIGMAIRTSELPSKKVISREEVASLVKKIVAEEDKEGRKIKTKAEEVRVSSERAWTHGGSSHSSLFEWAKRCGLVS

SEQ ID NO: 89781 - protein, 377 aa, Arabidopsis thaliana
  peptide (1)..(377): Ceres Seq. ID no. 12720431
  misc_feature (1)..(377): Pfam Name: UDP-glucoronosyl and UDP-glucosyl transferase Pfam Description: UDP-glucoronosyl and UDP-glucosyl transferase
  misc_feature (1)..(377): Homolog of NCBI NO: 25286815 NR Description: probable flavonol 3-O-glucosyltransferase
  misc_feature (1)..(377): Homolog of NCBI NO: 30680413 NR Description: UDP-glucosyltransferase family [Arabidopsis
  misc_feature (1)..(377): Homolog of NCBI NO: 39104603 NR Description: putative flavonol 3-O-glucosyltransferase
  misc_feature (1)..(376): Homolog of NCBI NO: 25286819 NR Description: probable flavonol 3-O-glucosyltransferase
  misc_feature (111)..(376): Homolog of NCBI NO: 30680415 NR Description: glycosyltransferase family [Arabidopsis thaliana]
  misc_feature (1)..(371): Homolog of NCBI NO: 2501494 NR Description: Flavonol 3-O-glucosyltransferase 5 (UDP-glucose
  misc_feature (1)..(366): Homolog of NCBI NO: 18409172 NR Description: UTP-glucose glucosyltransferase - like protein; id: At3g50740.1, supported by cDNA: gi_15146271 [Arabidopsis >gi|15146272|gb|AAK83619.1| AT3g50740/T3A5_120 [Arabidopsis
  misc_feature (1)..(366): Homolog of NCBI NO: 7433913 NR Description: UTP-glucose glucosyltransferase-like protein -
  misc_feature (1)..(373): Homolog of NCBI NO: 15240051 NR Description: UTP-glucose glucosyltransferase; protein id: supported by cDNA: 151441., supported by cDNA: gi_17065119,
  misc_feature (1)..(373): Homolog of NCBI NO: 15240305 NR Description: UTP-glucose glucosyltransferase - like protein;
MKSTVRDAVKSMKQKPTVMIVDFFGTALLSITDVGVTSKYVYIPSHAWFLALIVYLPVLDKVMEGEYVDIKEPMKIPGCKPVGPKELLDTMLDRSDQQYRDCVQIGLEIPMSDGVLVNTWGELQGKTLAALREDIDLNRVIKVPVYPIGPIVRTNVLIEKPNSTFEWLDKQEERSVVYVCLGSGGTLSFEQTMELAWGLELSCQSFLWVLRKPPSYLGASSKDDDQVSDGLPEGFLDRTRGVGLVVTQWAPQVEILSHRSIGGFLSHCGWSSVLESLTKGVPIIAWPLYAEQWMNATLLTEEIGMAIRTSELPSKKVISREEVASLVKKIVAEEDKEGRKIKTKAEEVRVSSERAWTHGGSSHSSLFEWAKRCGLVS

SEQ ID NO: 89782 - DNA, 918 bp, Arabidopsis thaliana
  misc_feature (1)..(918): Ceres Seq. ID no. 12720464
  misc_feature: MA Experiment ID: 20000184 Result: Up-regulated in Transcription
  misc_feature: MA Experiment 20000184 PARAMETER Experiment Name: At_Shoots__P Parameter: Age (day) Value: 7
  misc_feature: MA Experiment 20000184 PARAMETER Experiment Name: At_Shoots__P Parameter: Tissue Value: Shoots vs. Whole Plant
  misc_feature: MA Experiment ID: 20000185 Result: Up-regulated in Transcription
  misc_feature: MA Experiment 20000185 PARAMETER Experiment Name: At_Roots__P Parameter: Age (day) Value: 7 vs. 21
  misc_feature: MA Experiment 20000185 PARAMETER Experiment Name: At_Roots__P Parameter: Organism Value: A. thaliana
  misc_feature: MA Experiment 20000185 PARAMETER Experiment Name: At_Roots__P Parameter: Tissue Value: Roots vs. Whole Plant
  misc_feature: MA Experiment ID: 20000267 Result: Down-regulated in Transcription
  misc_feature: MA Experiment 20000267 PARAMETER Experiment Name: At_Drought_P Parameter: Age (day) Value: 7
  misc_feature: MA Experiment 20000267 PARAMETER Experiment Name: At_Drought_P Parameter: Organism Value: A. thaliana
  misc_feature: MA Experiment 20000267 PARAMETER Experiment Name: At_Drought_P Parameter: Plant Line Value: WS
  misc_feature: MA Experiment 20000267 PARAMETER Experiment Name: At_Drought_P Parameter: Timepoint (hr) Value: 6
  misc_feature: MA Experiment 20000267 PARAMETER Experiment Name: At_Drought_P Parameter: Tissue Value: Whole Plant
  misc_feature: MA Experiment 20000267 PARAMETER Experiment Name: At_Drought_P Parameter: Treatment Value: Drought vs. No Drought
  misc_feature: MA Experiment ID: 20000436 Result: Down-regulated in Transcription
  misc_feature: MA Experiment 20000436 PARAMETER Experiment Name: At_Drought_P Parameter: Age (day) Value: 7
  misc_feature: MA Experiment 20000436 PARAMETER Experiment Name: At_Drought_P Parameter: Organism Value: A. thaliana
  misc_feature: MA Experiment 20000436 PARAMETER Experiment Name: At_Drought_P Parameter: Plant Line Value: WS
  misc_feature: MA Experiment 20000436 PARAMETER Experiment Name: At_Drought_P Parameter: Timepoint (hr) Value: 12
  misc_feature: MA Experiment 20000436 PARAMETER Experiment Name: At_Drought_P Parameter: Tissue Value: Whole Plant
  misc_feature: MA Experiment 20000436 PARAMETER Experiment Name: At_Drought_P Parameter: Treatment Value: Drought vs. No Drought
  misc_feature: MA Experiment ID: 20000437 Result: Down-regulated in Transcription
  misc_feature: MA Experiment 20000437 PARAMETER Experiment Name: At_Drought_P Parameter: Age (day) Value: 8
  misc_feature: MA Experiment 20000437 PARAMETER Experiment Name: At_Drought_P Parameter: Organism Value: A. thaliana
  misc_feature: MA Experiment 20000437 PARAMETER Experiment Name: At_Drought_P Parameter: Plant Line Value: WS
  misc_feature: MA Experiment 20000437 PARAMETER Experiment Name: At_Drought_P Parameter: Timepoint (hr) Value: 24
  misc_feature: MA Experiment 20000437 PARAMETER Experiment Name: At_Drought_P Parameter: Tissue Value: Whole Plant
  misc_feature: MA Experiment 20000437 PARAMETER Experiment Name: At_Drought_P Parameter: Treatment Value: Drought vs. No Drought
  misc_feature: MA Experiment ID: 20000439 Result: Up-regulated in Transcription
  misc_feature: MA Experiment 20000439 PARAMETER Experiment Name: At_Roots__P Parameter: Age (day) Value: 14 vs. 21
  misc_feature: MA Experiment 20000439 PARAMETER Experiment Name: At_Roots__P Parameter: Organism Value: A. thaliana
  misc_feature: MA Experiment 20000439 PARAMETER Experiment Name: At_Roots__P Parameter: Tissue Value: Roots vs. Whole Plant
  misc_feature: MA Experiment ID: 20000451 Result: Down-regulated in Transcription
  misc_feature: MA Experiment 20000451 PARAMETER Experiment Name: At_CS6879_Shoots-Roots_P Parameter: Age (day) Value: 14
  misc_feature: MA Experiment 20000451 PARAMETER Experiment Name: At_CS6879_Shoots-Roots_P Parameter: Organism Value: A. thaliana
  misc_feature: MA Experiment 20000451 PARAMETER Experiment Name: At_CS6879_Shoots-Roots_P Parameter: Plant Line Value: CS6879 vs. WS
  misc_feature: MA Experiment 20000451 PARAMETER Experiment Name: At_CS6879_Shoots-Roots_P Parameter: Tissue Value: Roots
atggtttctagtacacttttggttatgtcaatatctctctttcttggtttaagcatattgcttgttgtacacggtaaagatttcaaccaagacattgacataacctggggtgatggtagaggaaatattttgaacaatggtactcttctaaatctcggtcttgatcaatcttcgggttcagggtttcaatcgaaagccgagtatttgtacggaaaagttgatatgcagatcaaacttgtcccgggaaattcagccgggaccgtgaccaccttctacttgaagtctcaaggattaacatgggacgagatagatttcgagtttttggggaatgttagtggagatccatacattgttcacactaatgtttacactcaaggcaagggtgatagagagcaacaattctacctttggttcgatccaacagccgcgttccacaactactctattctatggaatccgagtcacatagtgttctatattgatgggaagccaatcagagaattcaagaacttggaagtattgggtgtggcttatccaaagaaccaacccatgagaatgtatggaagtctatggaacgcagacgattgggccacgaggggagggctggtaaagacaaactggtcacagggaccattcgtagcctctttcatgaactacaactccgagaatgcttgtgtttggtccatcgttaatggaaccacaactacttctccttgtagccccggtgactcgacttcttcttcttcgagcagtactagcgagtggttttcgcagagagggatggattcttcaagcaagaaagttcttagatgggttcagaggaagttcatggtttacaattattgtaaggacaagaagcgattctctaatggtttgcctgttgaatgcactgctaagaacaagaacacaaagtcttga

SEQ ID NO: 89783 - protein, 305 aa, Arabidopsis thaliana
  peptide (1)..(305): Ceres Seq. ID no. 12720465
  misc_feature (28)..(209): Pfam Name: Glycosyl hydrolases family 16 Pfam Description: Glycosyl hydrolases family 16
  misc_feature (1)..(305): Homolog of NCBI NO: 15224232 NR Description: xyloglucan endotransglycosylase, putative; id: At2g18800.1 [Arabidopsis thaliana] >gi|25313552|pir||G84568
  misc_feature (1)..(296): Homolog of NCBI NO: 29500893 NR Description: putative xyloglucan endotransglycosylase [Cucumis >gi|29500901|emb|CAD87534.1| putative xyloglucan
  misc_feature (11)..(298): Homolog of NCBI NO: 15242781 NR Description: xyloglucan endotransglycosylase (TCH4); protein At5g57560.1, supported by cDNA: gi_14194112, supported by cDNA:
  misc_feature (1)..(296): Homolog of NCBI NO: 29500891 NR Description: putative xyloglucan endotransglycosylase [Cucumis >gi|29500899|emb|CAD87533.1| putative xyloglucan
MVSSTLLVMSISLFLGLSILLVVHGKDFNQDIDITWGDGRGNILNNGTLLNLGLDQSSGSGFQSKAEYLYGKVDMQIKLVPGNSAGTVTTFYLKSQGLTWDEIDFEFLGNVSGDPYIVHTNVYTQGKGDREQQFYLWFDPTAAFHNYSILWNPSHIVFYIDGKPIREFKNLEVLGVAYPKNQPMRMYGSLWNADDWATRGGLVKTNWSQGPFVASFMNYNSENACVWSIVNGTTTTSPCSPGDSTSSSSSSTSEWFSQRGMDSSSKKVLRWVQRKFMVYNYCKDKKRFSNGLPVECTAKNKNTKS

SEQ ID NO: 89784 - protein, 297 aa, Arabidopsis thaliana
  peptide (1)..(297): Ceres Seq. ID no. 12720466
  misc_feature (20)..(201): Pfam Name: Glycosyl hydrolases family 16 Pfam Description: Glycosyl hydrolases family 16
  misc_feature (1)..(297): Homolog of NCBI NO: 15224232 NR Description: xyloglucan endotransglycosylase, putative; id: At2g18800.1 [Arabidopsis thaliana] >gi|25313552|pir||G84568
  misc_feature (1)..(288): Homolog of NCBI NO: 29500893 NR Description: putative xyloglucan endotransglycosylase [Cucumis >gi|29500901|emb|CAD87534.1| putative xyloglucan
  misc_feature (3)..(290): Homolog of NCBI NO: 15242781 NR Description: xyloglucan endotransglycosylase (TCH4); protein At5g57560.1, supported by cDNA: gi_14194112, supported by cDNA:
  misc_feature (1)..(288): Homolog of NCBI NO: 29500891 NR Description: putative xyloglucan endotransglycosylase [Cucumis >gi|29500899|emb|CAD87533.1| putative xyloglucan
MSISLFLGLSILLVVHGKDFNQDIDITWGDGRGNILNNGTLLNLGLDQSSGSGFQSKAEYLYGKVDMQIKLVPGNSAGTVTTFYLKSQGLTWDEIDFEFLGNVSGDPYIVHTNVYTQGKGDREQQFYLWFDPTAAFHNYSILWNPSHIVFYIDGKPIREFKNLEVLGVAYPKNQPMRMYGSLWNADDWATRGGLVKTNWSQGPFVASFMNYNSENACVWSIVNGTTTTSPCSPGDSTSSSSSSTSEWFSQRGMDSSSKKVLRWVQRKFMVYNYCKDKKRFSNGLPVECTAKNKNTKS

SEQ ID NO: 89785 - protein, 231 aa, Arabidopsis thaliana
  peptide (1)..(231): Ceres Seq. ID no. 12720467
  misc_feature (1)..(135): Pfam Name: Glycosyl hydrolases family 16 Pfam Description: Glycosyl hydrolases family 16
  misc_feature (1)..(231): Homolog of NCBI NO: 15224232 NR Description: xyloglucan endotransglycosylase, putative; id: At2g18800.1 [Arabidopsis thaliana] >gi|25313552|pir||G84568
  misc_feature (1)..(222): Homolog of NCBI NO: 29500893 NR Description: putative xyloglucan endotransglycosylase [Cucumis >gi|29500901|emb|CAD87534.1| putative xyloglucan
  misc_feature (1)..(224): Homolog of NCBI NO: 15242781 NR Description: xyloglucan endotransglycosylase (TCH4); protein At5g57560.1, supported by cDNA: gi_14194112, supported by cDNA:
  misc_feature (1)..(222): Homolog of NCBI NO: 29500891 NR Description: putative xyloglucan endotransglycosylase [Cucumis >gi|29500899|emb|CAD87533.1| putative xyloglucan
MQIKLVPGNSAGTVTTFYLKSQGLTWDEIDFEFLGNVSGDPYIVHTNVYTQGKGDREQQFYLWFDPTAAFHNYSILWNPSHIVFYIDGKPIREFKNLEVLGVAYPKNQPMRMYGSLWNADDWATRGGLVKTNWSQGPFVASFMNYNSENACVWSIVNGTTTTSPCSPGDSTSSSSSSTSEWFSQRGMDSSSKKVLRWVQRKFMVYNYCKDKKRFSNGLPVECTAKNKNTKS

SEQ ID NO: 89786 - DNA, 1319 bp, Arabidopsis thaliana
  misc_feature (1)..(1319): Ceres Seq. ID no. 12720490
  misc_feature: MA Experiment ID: 20000173 Result: Down-regulated in Transcription
  misc_feature: MA Experiment 20000173 PARAMETER Experiment Name: At_42deg_Heat_P Parameter: Age (day) Value: 14
  misc_feature: MA Experiment 20000173 PARAMETER Experiment Name: At_42deg_Heat_P Parameter: Organism Value: A. thaliana
  misc_feature: MA Experiment 20000173 PARAMETER Experiment Name: At_42deg_Heat_P Parameter: Plant Line Value: WS
  misc_feature: MA Experiment 20000173 PARAMETER Experiment Name: At_42deg_Heat_P Parameter: Temperature (deg C) Value: 42 vs. 22
  misc_feature: MA Experiment 20000173 PARAMETER Experiment Name: At_42deg_Heat_P Parameter: Timepoint (hr) Value: 6
  misc_feature: MA Experiment 20000173 PARAMETER Experiment Name: At_42deg_Heat_P Parameter: Tissue Value: Aerial
  misc_feature: MA Experiment ID: 20000234 Result: Down-regulated in Transcription
  misc_feature: MA Experiment 20000234 PARAMETER Experiment Name: At_Siliques_P Parameter: Age (day) Value: 21
  misc_feature: MA Experiment 20000234 PARAMETER Experiment Name: At_Siliques_P Parameter: Organism Value: A. thaliana
  misc_feature: MA Experiment 20000234 PARAMETER Experiment Name: At_Siliques_P Parameter: Plant Line Value: WS
  misc_feature: MA Experiment 20000234 PARAMETER Experiment Name: At_Siliques_P Parameter: Tissue Value: Less Than 5mm Siliques vs. Whole Plant
  misc_feature: MA Experiment ID: 20000235 Result: Down-regulated in Transcription
  misc_feature: MA Experiment 20000235 PARAMETER Experiment Name: At_Siliques_P Parameter: Age (day) Value: 21
  misc_feature: MA Experiment 20000235 PARAMETER Experiment Name: At_Siliques_P Parameter: Organism Value: A. thaliana
  misc_feature: MA Experiment 20000235 PARAMETER Experiment Name: At_Siliques_P Parameter: Plant Line Value: WS
  misc_feature: MA Experiment 20000235 PARAMETER Experiment Name: At_Siliques_P Parameter: Tissue Value: 5-10mm Siliques vs. Whole Plant
  misc_feature: MA Experiment ID: 20000264 Result: Down-regulated in Transcription
  misc_feature: MA Experiment 20000264 PARAMETER Experiment Name: At_Open_Flower_P Parameter: Age (day) Value: 21
  misc_feature: MA Experiment 20000264 PARAMETER Experiment Name: At_Open_Flower_P Parameter: Plant Line Value: WS
  misc_feature: MA Experiment 20000264 PARAMETER Experiment Name: At_Open_Flower_P Parameter: Tissue Value: Open Flower vs. Whole Plant
  misc_feature: MA Experiment ID: 20000438 Result: Up-regulated in Transcription
  misc_feature: MA Experiment 20000438 PARAMETER Experiment Name: At_Shoots__P Parameter: Age (day) Value: 14
  misc_feature: MA Experiment 20000438 PARAMETER Experiment Name: At_Shoots__P Parameter: Tissue Value: Shoots vs. Whole Plant
  misc_feature: MA Experiment ID: 20000439 Result: Down-regulated in Transcription
  misc_feature: MA Experiment 20000439 PARAMETER Experiment Name: At_Roots__P Parameter: Age (day) Value: 14 vs. 21
  misc_feature: MA Experiment 20000439 PARAMETER Experiment Name: At_Roots__P Parameter: Organism Value: A. thaliana
  misc_feature: MA Experiment 20000439 PARAMETER Experiment Name: At_Roots__P Parameter: Tissue Value: Roots vs. Whole Plant
  misc_feature: MA Experiment ID: 20000794 Result: Down-regulated in Transcription
  misc_feature: MA Experiment 20000794 PARAMETER Experiment Name: At_Petals_P Parameter: Age (day) Value: 23-25 days
  misc_feature: MA Experiment 20000794 PARAMETER Experiment Name: At_Petals_P Parameter: Plant Line Value: WS
  misc_feature: MA Experiment 20000794 PARAMETER Experiment Name: At_Petals_P Parameter: Tissue Value: Petals vs. Whole plant
  misc_feature: MA Experiment ID: 20001451 Result: Down-regulated in Transcription
  misc_feature: MA Experiment 20001451 PARAMETER Experiment Name: At_Far-red-induction_P Parameter: Age (day) Value: 7
  misc_feature: MA Experiment 20001451 PARAMETER Experiment Name: At_Far-red-induction_P Parameter: Light Value: Far-red vs. White
  misc_feature: MA Experiment 20001451 PARAMETER Experiment Name: At_Far-red-induction_P Parameter: Organism Value: A. thaliana
  misc_feature: MA Experiment 20001451 PARAMETER Experiment Name: At_Far-red-induction_P Parameter: Plant Line Value: Columbia
  misc_feature: MA Experiment 20001451 PARAMETER Experiment Name: At_Far-red-induction_P Parameter: Timepoint (hr) Value: 24
  misc_feature: MA Experiment 20001451 PARAMETER Experiment Name: At_Far-red-induction_P Parameter: Tissue Value: Whole Plant
gcagtttcaactttcaaagccagcaaataataaacagaggagaaatatggaaacacaaggcaaagtaatcacttgcaaagctgctgtggcatggggagctggagagcctctagtaatggaagatgtaaaagtggatcctcctcaaagattggaagtgagaattcgaatcctcttcacttccatctgtcacactgatctcagcgcatggaaaggcgagaacgaggctcagcgagcataccctcgaatccttggccatgaggcagcagggatagtggagagcgtaggggaaggtgtggaagagatgatggcaggagatcatgtgctccctattttcacaggagagtgtggagactgcagagtgtgcaagcgagacggagccaatctgtgcgagagattccgagtggatccgatgaagaaggtgatggtaaccgatggaaagaccagattcttcaccagcaaagacaacaaaccaatctaccattttctcaacacatccaccttctccgagtacacggtcatagactcggcctgcgtgctcaaggtggaccctctgtttcctctggagaagataagcctcctcagctgcggtgtctccactggagtcggtgcggcgtggaatgtggctgatattcaacctgcctccaccgtcgctatttttggacttggcgctgttggacttgccgtggctgaaggtgcaagagccagaggagcctctaaaatcattgggatcgacatcaaccctgacaagttccaactaggcagagaagcagggattagtgaattcataaatccaaaggagagtgacaaggcagttcatgagagagtaatggagataacagagggaggagtggagtacagcttcgagtgtgcaggaagtatagaagcacttagagaagcctttctgtctacaaactcaggagtgggagtgactgtcatgctgggcgttcacgcaagcccacagcttctccctatccatcccatggagctcttccaaggcagatccatcaccgcctctgttttcggaggcttcaaacccaaaacccaattaccctttttcatcacccagtgcctccaaggtcttctcaatctcgatctcttcatctctcaccagcttcccttccacgatatcaacgaagccatgcagctgcttcaccaaggcaaagctcttcgttgccttctccacctctaaactgaacaaacatcttttacattttccaaatccgtttgattgattgttctactgcttttagagtttccttattgggtctggtccacccccatactaaaataaaagttggaaatgttttctccaacttgct

SEQ ID NO: 89787 - protein, 395 aa, Arabidopsis thaliana
  peptide (1)..(395): Ceres Seq. ID no. 12720491
  misc_feature (16)..(395): Homolog of NCBI NO: 15217715 NR Description: alcohol dehydrogenase, putative; protein id: supported by cDNA: gi_17529031 [Arabidopsis thaliana]
  misc_feature (16)..(395): Homolog of NCBI NO: 25283039 NR Description: alcohol dehydrogenase (EC 1.-.-.-) [similarity] - thaliana >gi|5042408|gb|AAD38247.1|AC006193_3 very similar to
  misc_feature (17)..(395): Homolog of NCBI NO: 18398586 NR Description: alcohol dehydrogenase, putative; protein id:
  misc_feature (17)..(395): Homolog of NCBI NO: 21592656 NR Description: alcohol dehydrogenase, putative [Arabidopsis
  misc_feature (18)..(393): Homolog of NCBI NO: 113363 NR Description: ALCOHOL DEHYDROGENASE 1 >gi|279445|pir||DEPJA1
  misc_feature (20)..(393): Homolog of NCBI NO: 1362105 NR Description: alcohol dehydrogenase (EC 1.1.1.1) - common (fragment) >gi|551257|emb|CAA57446.1| alcohol dehydrogenase
  misc_feature (18)..(393): Homolog of NCBI NO: 7427629 NR Description: alcohol dehydrogenase (EC 1.1.1.1) - potato
  misc_feature (16)..(393): Homolog of NCBI NO: 6684345 NR Description: alcohol dehydrogenase [Arabis alpina]
  misc_feature (18)..(393): Homolog of NCBI NO: 113365 NR Description: Alcohol dehydrogenase 1 >gi|169467|gb|AAA33806.1|
  misc_feature (18)..(393): Homolog of NCBI NO: 113379 NR Description: ALCOHOL DEHYDROGENASE 2 >gi|169469|gb|AAA33807.1|
QFQLSKPANNKQRRNMETQGKVITCKAAVAWGAGEPLVMEDVKVDPPQRLEVRIRILFTSICHTDLSAWKGENEAQRAYPRILGHEAAGIVESVGEGVEEMMAGDHVLPIFTGECGDCRVCKRDGANLCERFRVDPMKKVMVTDGKTRFFTSKDNKPIYHFLNTSTFSEYTVIDSACVLKVDPLFPLEKISLLSCGVSTGVGAAWNVADIQPASTVAIFGLGAVGLAVAEGARARGASKIIGIDINPDKFQLGREAGISEFINPKESDKAVHERVMEITEGGVEYSFECAGSIEALREAFLSTNSGVGVTVMLGVHASPQLLPIHPMELFQGRSITASVFGGFKPKTQLPFFITQCLQGLLNLDLFISHQLPFHDINEAMQLLHQGKALRCLLHL

SEQ ID NO: 89788 - protein, 380 aa, Arabidopsis thaliana
  peptide (1)..(380): Ceres Seq. ID no. 12720492
  misc_feature (1)..(380): Homolog of NCBI NO: 15217715 NR Description: alcohol dehydrogenase, putative; protein id: supported by cDNA: gi_17529031 [Arabidopsis thaliana]
  misc_feature (1)..(380): Homolog of NCBI NO: 25283039 NR Description: alcohol dehydrogenase (EC 1.-.-.-) [similarity] - thaliana >gi|5042408|gb|AAD38247.1|AC006193_3 very similar to
  misc_feature (2)..(380): Homolog of NCBI NO: 18398586 NR Description: alcohol dehydrogenase, putative; protein id:
  misc_feature (2)..(380): Homolog of NCBI NO: 21592656 NR Description: alcohol dehydrogenase, putative [Arabidopsis
  misc_feature (3)..(378): Homolog of NCBI NO: 113363 NR Description: ALCOHOL DEHYDROGENASE 1 >gi|279445|pir||DEPJA1
  misc_feature (5)..(378): Homolog of NCBI NO: 1362105 NR Description: alcohol dehydrogenase (EC 1.1.1.1) - common (fragment) >gi|551257|emb|CAA57446.1| alcohol dehydrogenase
  misc_feature (3)..(378): Homolog of NCBI NO: 7427629 NR Description: alcohol dehydrogenase (EC 1.1.1.1) - potato
  misc_feature (1)..(378): Homolog of NCBI NO: 6684345 NR Description: alcohol dehydrogenase [Arabis alpina]
  misc_feature (3)..(378): Homolog of NCBI NO: 113365 NR Description: Alcohol dehydrogenase 1 >gi|169467|gb|AAA33806.1|
  misc_feature (3)..(378): Homolog of NCBI NO: 113379 NR Description: ALCOHOL DEHYDROGENASE 2 >gi|169469|gb|AAA33807.1|
METQGKVITCKAAVAWGAGEPLVMEDVKVDPPQRLEVRIRILFTSICHTDLSAWKGENEAQRAYPRILGHEAAGIVESVGEGVEEMMAGDHVLPIFTGECGDCRVCKRDGANLCERFRVDPMKKVMVTDGKTRFFTSKDNKPIYHFLNTSTFSEYTVIDSACVLKVDPLFPLEKISLLSCGVSTGVGAAWNVADIQPASTVAIFGLGAVGLAVAEGARARGASKIIGIDINPDKFQLGREAGISEFINPKESDKAVHERVMEITEGGVEYSFECAGSIEALREAFLSTNSGVGVTVMLGVHASPQLLPIHPMELFQGRSITASVFGGFKPKTQLPFFITQCLQGLLNLDLFISHQLPFHDINEAMQLLHQGKALRCLLHL

SEQ ID NO: 89789 - protein, 357 aa, Arabidopsis thaliana
  peptide (1)..(357): Ceres Seq. ID no. 12720493
  misc_feature (1)..(357): Homolog of NCBI NO: 15217715 NR Description: alcohol dehydrogenase, putative; protein id: supported by cDNA: gi_17529031 [Arabidopsis thaliana]
  misc_feature (1)..(357): Homolog of NCBI NO: 25283039 NR Description: alcohol dehydrogenase (EC 1.-.-.-) [similarity] - thaliana >gi|5042408|gb|AAD38247.1|AC006193_3 very similar to
  misc_feature (1)..(357): Homolog of NCBI NO: 18398586 NR Description: alcohol dehydrogenase, putative; protein id:
  misc_feature (1)..(357): Homolog of NCBI NO: 21592656 NR Description: alcohol dehydrogenase, putative [Arabidopsis
  misc_feature (1)..(355): Homolog of NCBI NO: 113363 NR Description: ALCOHOL DEHYDROGENASE 1 >gi|279445|pir||DEPJA1
  misc_feature (1)..(355): Homolog of NCBI NO: 1362105 NR Description: alcohol dehydrogenase (EC 1.1.1.1) - common (fragment) >gi|551257|emb|CAA57446.1| alcohol dehydrogenase
  misc_feature (1)..(355): Homolog of NCBI NO: 7427629 NR Description: alcohol dehydrogenase (EC 1.1.1.1) - potato
  misc_feature (1)..(355): Homolog of NCBI NO: 6684345 NR Description: alcohol dehydrogenase [Arabis alpina]
  misc_feature (1)..(355): Homolog of NCBI NO: 113365 NR Description: Alcohol dehydrogenase 1 >gi|169467|gb|AAA33806.1|
  misc_feature (1)..(355): Homolog of NCBI NO: 113379 NR Description: ALCOHOL DEHYDROGENASE 2 >gi|169469|gb|AAA33807.1|
MEDVKVDPPQRLEVRIRILFTSICHTDLSAWKGENEAQRAYPRILGHEAAGIVESVGEGVEEMMAGDHVLPIFTGECGDCRVCKRDGANLCERFRVDPMKKVMVTDGKTRFFTSKDNKPIYHFLNTSTFSEYTVIDSACVLKVDPLFPLEKISLLSCGVSTGVGAAWNVADIQPASTVAIFGLGAVGLAVAEGARARGASKIIGIDINPDKFQLGREAGISEFINPKESDKAVHERVMEITEGGVEYSFECAGSIEALREAFLSTNSGVGVTVMLGVHASPQLLPIHPMELFQGRSITASVFGGFKPKTQLPFFITQCLQGLLNLDLFISHQLPFHDINEAMQLLHQGKALRCLLHL

SEQ ID NO: 89790 - DNA, 1509 bp, Arabidopsis thaliana
  misc_feature (1)..(1509): Ceres Seq. ID no. 12720502
  misc_feature: MA Experiment ID: 20000306 Result: Down-regulated in Transcription
  misc_feature: MA Experiment 20000306 PARAMETER Experiment Name: At_Germinating_Seeds_Sub_P Parameter: Age (hr) Value: 6 vs. 0
  misc_feature: MA Experiment 20000306 PARAMETER Experiment Name: At_Germinating_Seeds_Sub_P Parameter: Organism Value: A. thaliana
  misc_feature: MA Experiment 20000306 PARAMETER Experiment Name: At_Germinating_Seeds_Sub_P Parameter: Plant Line Value: WS
  misc_feature: MA Experiment 20000306 PARAMETER Experiment Name: At_Germinating_Seeds_Sub_P Parameter: Tissue Value: Germinating Seeds
  misc_feature: MA Experiment ID: 20000307 Result: Down-regulated in Transcription
  misc_feature: MA Experiment 20000307 PARAMETER Experiment Name: At_Germinating_Seeds_Sub_P Parameter: Age (hr) Value: 24 vs. 0
  misc_feature: MA Experiment 20000307 PARAMETER Experiment Name: At_Germinating_Seeds_Sub_P Parameter: Organism Value: A. thaliana
  misc_feature: MA Experiment 20000307 PARAMETER Experiment Name: At_Germinating_Seeds_Sub_P Parameter: Plant Line Value: WS
  misc_feature: MA Experiment 20000307 PARAMETER Experiment Name: At_Germinating_Seeds_Sub_P Parameter: Tissue Value: Germinating Seeds
atggaaacggatttctcgttggtgcgtaaggaggaggaagaagaagaagataacaggaatgggatgagttatttgtcaatggagatgatgaagaaggtgagctccatggcggctccaatggtggcagtttcggtttctcaattcctccttcaagtcatctccatggttatggctggtcatttggacgagctctcgctctcagctgtcgcaattgccacttccctcaccaatgtcactggtttcagcctcatcgttgggtttgcaggtgcgttagacactctttgcggtcaagcttttggagcagaacaatttggaaaaattggtgcatacacttacagctcaatgctctgtcttctcgttttctgtttttcaatctctatcgtatggtttttcatggacaagctcttggagattttccatcaagatcctctcatctctcaattagcttgcagatactcaatctggctcataccggctttattcggattcactcttcttcaacctatgactcggtatttccagtcacaaggaataactcttcctctcttcgtgagctctcttggagctctttgttttcacattcctttctgttggcttcttgtctataaactgaaatttggaatagttggcgccgctttgtccatcggtttttcatattggctcaacgtatttttgctttggattttcatgagatactctgctttgcatcgtgaaatgaagaatcttggtttgcaagaactcatctcgagcatgaagcagttcatcgccctcgcgatcccctctgcaatgatgatatgcctggaatggtggtcgtttgagattctactactaatgtctggactcttaccaaactcaaagctcgaaacatcggtgatatccatttgcctcacaacatcggctgtgcatttcgttctggtgaatgcgataggagcatccgcaagcacacatgtctcaaacgagctaggagctggaaatcatagggcagctcgagccgcggttaattctgccattttccttggtggtgttggtgcattaataacaaccatcacactttacagttaccgaaaaagttggggttatgtattcagcaacgagagagaagtggttcgctacgcaacccaaatcacacccattctctgcctatccattttcgttaacagctttctcgccgtgctctcaggggttgccagaggatcagggtggcaacgtataggaggttatgcaagcttaggatcatattatcttgtcggaatcccgttaggatggttcttgtgttttgtcatgaaattgagagggaaaggactttggattggtatactcatagcctccactatccaactcattgtttttgctcttgtcaccttcttcaccaattgggaacaagaggcaacgaaagctagagacagagtattcgagatgacacctcaagtcaaaggcaaccaaaaaacacaaattatagtagaagaggatacacaagttttacttaatcatattgcagaaactgtgtaa

SEQ ID NO: 89791 - protein, 502 aa, Arabidopsis thaliana
  peptide (1)..(502): Ceres Seq. ID no. 12720503
  misc_feature (1)..(502): Homolog of NCBI NO: 15217763 NR Description: hypothetical protein; protein id: At1g64820.1
  misc_feature (1)..(266): Homolog of NCBI NO: 25404496 NR Description: hypothetical protein F13O11.12 [imported] - thaliana >gi|5042417|gb|AAD38256.1|AC006193_12 Hypothetical
  misc_feature (421)..(502): Homolog of NCBI NO: 25404496 NR Description: hypothetical protein F13O11.12 [imported] - thaliana >gi|5042417|gb|AAD38256.1|AC006193_12 Hypothetical
  misc_feature (315)..(394): Homolog of NCBI NO: 25404496 NR Description: hypothetical protein F13O11.12 [imported] - thaliana >gi|5042417|gb|AAD38256.1|AC006193_12 Hypothetical
  misc_feature (1)..(277): Homolog of NCBI NO: 15219745 NR Description: MATE efflux family protein, putative; protein id: [Arabidopsis thaliana] >gi|12597755|gb|AAG60068.1|AC013288_2 MATE
  misc_feature (273)..(476): Homolog of NCBI NO: 15219745 NR Description: MATE efflux family protein, putative; protein id: [Arabidopsis thaliana] >gi|12597755|gb|AAG60068.1|AC013288_2 MATE
  misc_feature (1)..(470): Homolog of NCBI NO: 13430684 NR Description: putative MATE efflux family protein [Arabidopsis
  misc_feature (1)..(470): Homolog of NCBI NO: 30697399 NR Description: MATE efflux protein - related [Arabidopsis >gi|12597760|gb|AAG60073.1|AC013288_7 MATE efflux family protein,
  misc_feature (30)..(480): Homolog of NCBI NO: 22325453 NR Description: hypothetical protein; protein id: At2g04100.1, by cDNA: gi_20260453 [Arabidopsis thaliana]
  misc_feature (30)..(470): Homolog of NCBI NO: 15228073 NR Description: hypothetical protein; protein id: At2g04050.1
METDFSLVRKEEEEEEDNRNGMSYLSMEMMKKVSSMAAPMVAVSVSQFLLQVISMVMAGHLDELSLSAVAIATSLTNVTGFSLIVGFAGALDTLCGQAFGAEQFGKIGAYTYSSMLCLLVFCFSISIVWFFMDKLLEIFHQDPLISQLACRYSIWLIPALFGFTLLQPMTRYFQSQGITLPLFVSSLGALCFHIPFCWLLVYKLKFGIVGAALSIGFSYWLNVFLLWIFMRYSALHREMKNLGLQELISSMKQFIALAIPSAMMICLEWWSFEILLLMSGLLPNSKLETSVISICLTTSAVHFVLVNAIGASASTHVSNELGAGNHRAARAAVNSAIFLGGVGALITTITLYSYRKSWGYVFSNEREVVRYATQITPILCLSIFVNSFLAVLSGVARGSGWQRIGGYASLGSYYLVGIPLGWFLCFVMKLRGKGLWIGILIASTIQLIVFALVTFFTNWEQEATKARDRVFEMTPQVKGNQKTQIIVEEDTQVLLNHIAETV

SEQ ID NO: 89792 - protein, 481 aa, Arabidopsis thaliana
  peptide (1)..(481): Ceres Seq. ID no. 12720504
  misc_feature (1)..(481): Homolog of NCBI NO: 15217763 NR Description: hypothetical protein; protein id: At1g64820.1
  misc_feature (1)..(245): Homolog of NCBI NO: 25404496 NR Description: hypothetical protein F13O11.12 [imported] - thaliana >gi|5042417|gb|AAD38256.1|AC006193_12 Hypothetical
  misc_feature (400)..(481): Homolog of NCBI NO: 25404496 NR Description: hypothetical protein F13O11.12 [imported] - thaliana >gi|5042417|gb|AAD38256.1|AC006193_12 Hypothetical
  misc_feature (294)..(373): Homolog of NCBI NO: 25404496 NR Description: hypothetical protein F13O11.12 [imported] - thaliana >gi|5042417|gb|AAD38256.1|AC006193_12 Hypothetical
  misc_feature (1)..(256): Homolog of NCBI NO: 15219745 NR Description: MATE efflux family protein, putative; protein id: [Arabidopsis thaliana] >gi|12597755|gb|AAG60068.1|AC013288_2 MATE
  misc_feature (252)..(455): Homolog of NCBI NO: 15219745 NR Description: MATE efflux family protein, putative; protein id: [Arabidopsis thaliana] >gi|12597755|gb|AAG60068.1|AC013288_2 MATE
  misc_feature (1)..(449): Homolog of NCBI NO: 13430684 NR Description: putative MATE efflux family protein [Arabidopsis
  misc_feature (1)..(449): Homolog of NCBI NO: 30697399 NR Description: MATE efflux protein - related [Arabidopsis >gi|12597760|gb|AAG60073.1|AC013288_7 MATE efflux family protein,
  misc_feature (9)..(459): Homolog of NCBI NO: 22325453 NR Description: hypothetical protein; protein id: At2g04100.1, by cDNA: gi_20260453 [Arabidopsis thaliana]
  misc_feature (9)..(449): Homolog of NCBI NO: 15228073 NR Description: hypothetical protein; protein id: At2g04050.1
MSYLSMEMMKKVSSMAAPMVAVSVSQFLLQVISMVMAGHLDELSLSAVAIATSLTNVTGFSLIVGFAGALDTLCGQAFGAEQFGKIGAYTYSSMLCLLVFCFSISIVWFFMDKLLEIFHQDPLISQLACRYSIWLIPALFGFTLLQPMTRYFQSQGITLPLFVSSLGALCFHIPFCWLLVYKLKFGIVGAALSIGFSYWLNVFLLWIFMRYSALHREMKNLGLQELISSMKQFIALAIPSAMMICLEWWSFEILLLMSGLLPNSKLETSVISICLTTSAVHFVLVNAIGASASTHVSNELGAGNHRAARAAVNSAIFLGGVGALITTITLYSYRKSWGYVFSNEREVVRYATQITPILCLSIFVNSFLAVLSGVARGSGWQRIGGYASLGSYYLVGIPLGWFLCFVMKLRGKGLWIGILIASTIQLIVFALVTFFTNWEQEATKARDRVFEMTPQVKGNQKTQIIVEEDTQVLLNHIAETV

SEQ ID NO: 89793 - protein, 476 aa, Arabidopsis thaliana
  peptide (1)..(476): Ceres Seq. ID no. 12720505
  misc_feature (1)..(476): Homolog of NCBI NO: 15217763 NR Description: hypothetical protein; protein id: At1g64820.1
  misc_feature (1)..(240): Homolog of NCBI NO: 25404496 NR Description: hypothetical protein F13O11.12 [imported] - thaliana >gi|5042417|gb|AAD38256.1|AC006193_12 Hypothetical
  misc_feature (395)..(476): Homolog of NCBI NO: 25404496 NR Description: hypothetical protein F13O11.12 [imported] - thaliana >gi|5042417|gb|AAD38256.1|AC006193_12 Hypothetical
  misc_feature (289)..(368): Homolog of NCBI NO: 25404496 NR Description: hypothetical protein F13O11.12 [imported] - thaliana >gi|5042417|gb|AAD38256.1|AC006193_12 Hypothetical
  misc_feature (1)..(251): Homolog of NCBI NO: 15219745 NR Description: MATE efflux family protein, putative; protein id: [Arabidopsis thaliana] >gi|12597755|gb|AAG60068.1|AC013288_2 MATE
  misc_feature (247)..(450): Homolog of NCBI NO: 15219745 NR Description: MATE efflux family protein, putative; protein id: [Arabidopsis thaliana] >gi|12597755|gb|AAG60068.1|AC013288_2 MATE
  misc_feature (1)..(444): Homolog of NCBI NO: 13430684 NR Description: putative MATE efflux family protein [Arabidopsis
  misc_feature (1)..(444): Homolog of NCBI NO: 30697399 NR Description: MATE efflux protein - related [Arabidopsis >gi|12597760|gb|AAG60073.1|AC013288_7 MATE efflux family protein,
  misc_feature (4)..(454): Homolog of NCBI NO: 22325453 NR Description: hypothetical protein; protein id: At2g04100.1, by cDNA: gi_20260453 [Arabidopsis thaliana]
  misc_feature (4)..(444): Homolog of NCBI NO: 15228073 NR Description: hypothetical protein; protein id: At2g04050.1
MEMMKKVSSMAAPMVAVSVSQFLLQVISMVMAGHLDELSLSAVAIATSLTNVTGFSLIVGFAGALDTLCGQAFGAEQFGKIGAYTYSSMLCLLVFCFSISIVWFFMDKLLEIFHQDPLISQLACRYSIWLIPALFGFTLLQPMTRYFQSQGITLPLFVSSLGALCFHIPFCWLLVYKLKFGIVGAALSIGFSYWLNVFLLWIFMRYSALHREMKNLGLQELISSMKQFIALAIPSAMMICLEWWSFEILLLMSGLLPNSKLETSVISICLTTSAVHFVLVNAIGASASTHVSNELGAGNHRAARAAVNSAIFLGGVGALITTITLYSYRKSWGYVFSNEREVVRYATQITPILCLSIFVNSFLAVLSGVARGSGWQRIGGYASLGSYYLVGIPLGWFLCFVMKLRGKGLWIGILIASTIQLIVFALVTFFTNWEQEATKARDRVFEMTPQVKGNQKTQIIVEEDTQVLLNHIAETV

SEQ ID NO: 89794 - DNA, 1344 bp, Arabidopsis thaliana
  misc_feature (1)..(1344): Ceres Seq. ID no. 12720522
  misc_feature: MA Experiment ID: 20000348 Result: Up-regulated in Transcription
  misc_feature: MA Experiment 20000348 PARAMETER Experiment Name: At_100uM_ABA_Sub_P Parameter: Age (day) Value: 14
  misc_feature: MA Experiment 20000348 PARAMETER Experiment Name: At_100uM_ABA_Sub_P Parameter: Organism Value: A. thaliana
  misc_feature: MA Experiment 20000348 PARAMETER Experiment Name: At_100uM_ABA_Sub_P Parameter: Plant Line Value: WS
  misc_feature: MA Experiment 20000348 PARAMETER Experiment Name: At_100uM_ABA_Sub_P Parameter: Timepoint (hr) Value: 1
  misc_feature: MA Experiment 20000348 PARAMETER Experiment Name: At_100uM_ABA_Sub_P Parameter: Tissue Value: Aerial
  misc_feature: MA Experiment 20000348 PARAMETER Experiment Name: At_100uM_ABA_Sub_P Parameter: Treatment Value: 100uM ABA vs. No Treatment
  misc_feature: MA Experiment ID: 20000355 Result: Up-regulated in Transcription
  misc_feature: MA Experiment 20000355 PARAMETER Experiment Name: At_Siliques_Sub_P Parameter: Age (day) Value: 21
  misc_feature: MA Experiment 20000355 PARAMETER Experiment Name: At_Siliques_Sub_P Parameter: Organism Value: A. thaliana
  misc_feature: MA Experiment 20000355 PARAMETER Experiment Name: At_Siliques_Sub_P Parameter: Plant Line Value: WS
  misc_feature: MA Experiment 20000355 PARAMETER Experiment Name: At_Siliques_Sub_P Parameter: Tissue Value: Less Than 5mm Siliques vs. Whole Plant
  misc_feature: MA Experiment ID: 20000440 Result: Up-regulated in Transcription
  misc_feature: MA Experiment 20000440 PARAMETER Experiment Name: At_Closed-Flower__Sub_P Parameter: Tissue Value: Closed Flower vs. Whole Plant
atgggccaaacgtttcacgcctttatgttcccatggttcgcttttggtcatatgactccatacttgcatttagccaacaagttagctgagagaggtcacagaatcactttcttgatccccaagaaagctcagaagcagcttgaacatctcaatctgtttccagacagcatcgtctttcactctcttactattcctcatgttgatggtctccccgctggagccgagactttctcggatatccctatgccattgtggaagttcttgcccccagctatagatctcacacgcgatcaagttgaagcagcggttagtgccttgagtccggacctgatcttgttcgatattgcttcatgggttccagaagtggctaaagagtatagagtcaagagtatgttgtacaacatcatatcagctacttctatagctcatgactttgtcccaggtggtgaacttggagttcctccacctggttatccttcctcaaagttgttgtaccgcaaacacgatgctcacgccttgttgtccttctccgtctactacaagaggttttctcatcggctcatcacaggtcttatgaattgtgatttcatttcgataaggacatgcaaagaaatcgagggtaaattctgcgagtatcttgagcgtcaataccataaaaaggttttcttgacgggtccaatgcttcctgagccaaacaaaggtaaaccactggaagatcgatggagtcattggctgaacgggtttgaacaaggctctgtagtgttctgtgcattgggaagtcaagtcactctagagaaggaccagttccaagaactttgtttaggaatagagcttacaggtttaccgttttttgtagctgtaacaccaccaaaaggcgcaaagacgattcaagatgcgttaccagaagggttcgaggagagggtgaaagatcgtggagtggttttgggagaatgggtgcaacaaccgttattattggctcatccatcagtaggctgcttcttgagtcattgcggattcgggtcaatgtgggaatctataatgagtgattgccaaatagttttgcttccatttttggctgatcaagttctcaacacaagattgatgaccgaagaactcaaggtttcggttgaagtgcaaagagaagaaacaggatggttctcgaaggagagcttgagtgttgctatcacatctgtgatggaccaagctagtgagatcgggaatctggtgagaaggaaccattccaaattgaaggaggttttggttagtgatggattattaaccggttacaccgataaatttgttgacactttggagaatcttgtcagcgagacaaagcgtgaatga

SEQ ID NO: 89795 - protein, 447 aa, Arabidopsis thaliana
  peptide (1)..(447): Ceres Seq. ID no. 12720523
  misc_feature (1)..(447): Homolog of NCBI NO: 15217773 NR Description: rhamnosyltransferase, putative; protein id:
  misc_feature (1)..(447): Homolog of NCBI NO: 15239523 NR Description: flavonol 3-O-glucosyltransferase-like protein; id: At5g53990.1, supported by cDNA: gi_17529305, supported by gi_20465446 [Arabidopsis thaliana] >gi|10177261|dbj|BAB10729.1|
  misc_feature (1)..(443): Homolog of NCBI NO: 15217796 NR Description: anthocyanidin-3-glucoside rhamnosyltransferase, protein id: At1g64920.1 [Arabidopsis thaliana]
  misc_feature (1)..(441): Homolog of NCBI NO: 15233903 NR Description: putative protein; protein id: At4g09500.1
  misc_feature (1)..(438): Homolog of NCBI NO: 15227766 NR Description: putative flavonol 3-O-glucosyltransferase;
  misc_feature (1)..(225): Homolog of NCBI NO: 28393204 NR Description: unknown protein [Arabidopsis thaliana]
  misc_feature (235)..(441): Homolog of NCBI NO: 28393204 NR Description: unknown protein [Arabidopsis thaliana]
  misc_feature (1)..(447): Homolog of NCBI NO: 15239525 NR Description: flavonol 3-O-glucosyltransferase-like protein;
  misc_feature (2)..(444): Homolog of NCBI NO: 15234195 NR Description: UDP rhamnose-anthocyanidin-3-glucoside
  misc_feature (2)..(447): Homolog of NCBI NO: 15234196 NR Description: UDP rhamnose--anthocyanidin-3-glucoside
MGQTFHAFMFPWFAFGHMTPYLHLANKLAERGHRITFLIPKKAQKQLEHLNLFPDSIVFHSLTIPHVDGLPAGAETFSDIPMPLWKFLPPAIDLTRDQVEAAVSALSPDLILFDIASWVPEVAKEYRVKSMLYNIISATSIAHDFVPGGELGVPPPGYPSSKLLYRKHDAHALLSFSVYYKRFSHRLITGLMNCDFISIRTCKEIEGKFCEYLERQYHKKVFLTGPMLPEPNKGKPLEDRWSHWLNGFEQGSVVFCALGSQVTLEKDQFQELCLGIELTGLPFFVAVTPPKGAKTIQDALPEGFEERVKDRGVVLGEWVQQPLLLAHPSVGCFLSHCGFGSMWESIMSDCQIVLLPFLADQVLNTRLMTEELKVSVEVQREETGWFSKESLSVAITSVMDQASEIGNLVRRNHSKLKEVLVSDGLLTGYTDKFVDTLENLVSETKRE

SEQ ID NO: 89796 - protein, 439 aa, Arabidopsis thaliana
  peptide (1)..(439): Ceres Seq. ID no. 12720524
  misc_feature (1)..(439): Homolog of NCBI NO: 15217773 NR Description: rhamnosyltransferase, putative; protein id:
  misc_feature (1)..(439): Homolog of NCBI NO: 15239523 NR Description: flavonol 3-O-glucosyltransferase-like protein; id: At5g53990.1, supported by cDNA: gi_17529305, supported by gi_20465446 [Arabidopsis thaliana] >gi|10177261|dbj|BAB10729.1|
  misc_feature (1)..(435): Homolog of NCBI NO: 15217796 NR Description: anthocyanidin-3-glucoside rhamnosyltransferase, protein id: At1g64920.1 [Arabidopsis thaliana]
  misc_feature (1)..(433): Homolog of NCBI NO: 15233903 NR Description: putative protein; protein id: At4g09500.1
  misc_feature (1)..(430): Homolog of NCBI NO: 15227766 NR Description: putative flavonol 3-O-glucosyltransferase;
  misc_feature (1)..(217): Homolog of NCBI NO: 28393204 NR Description: unknown protein [Arabidopsis thaliana]
  misc_feature (227)..(433): Homolog of NCBI NO: 28393204 NR Description: unknown protein [Arabidopsis thaliana]
  misc_feature (1)..(439): Homolog of NCBI NO: 15239525 NR Description: flavonol 3-O-glucosyltransferase-like protein;
  misc_feature (1)..(436): Homolog of NCBI NO: 15234195 NR Description: UDP rhamnose-anthocyanidin-3-glucoside
  misc_feature (1)..(439): Homolog of NCBI NO: 15234196 NR Description: UDP rhamnose--anthocyanidin-3-glucoside
MFPWFAFGHMTPYLHLANKLAERGHRITFLIPKKAQKQLEHLNLFPDSIVFHSLTIPHVDGLPAGAETFSDIPMPLWKFLPPAIDLTRDQVEAAVSALSPDLILFDIASWVPEVAKEYRVKSMLYNIISATSIAHDFVPGGELGVPPPGYPSSKLLYRKHDAHALLSFSVYYKRFSHRLITGLMNCDFISIRTCKEIEGKFCEYLERQYHKKVFLTGPMLPEPNKGKPLEDRWSHWLNGFEQGSVVFCALGSQVTLEKDQFQELCLGIELTGLPFFVAVTPPKGAKTIQDALPEGFEERVKDRGVVLGEWVQQPLLLAHPSVGCFLSHCGFGSMWESIMSDCQIVLLPFLADQVLNTRLMTEELKVSVEVQREETGWFSKESLSVAITSVMDQASEIGNLVRRNHSKLKEVLVSDGLLTGYTDKFVDTLENLVSETKRE

SEQ ID NO: 89797 - protein, 430 aa, Arabidopsis thaliana
  peptide (1)..(430): Ceres Seq. ID no. 12720525
  misc_feature (1)..(430): Homolog of NCBI NO: 15217773 NR Description: rhamnosyltransferase, putative; protein id:
  misc_feature (1)..(430): Homolog of NCBI NO: 15239523 NR Description: flavonol 3-O-glucosyltransferase-like protein; id: At5g53990.1, supported by cDNA: gi_17529305, supported by gi_20465446 [Arabidopsis thaliana] >gi|10177261|dbj|BAB10729.1|
  misc_feature (1)..(426): Homolog of NCBI NO: 15217796 NR Description: anthocyanidin-3-glucoside rhamnosyltransferase, protein id: At1g64920.1 [Arabidopsis thaliana]
  misc_feature (1)..(424): Homolog of NCBI NO: 15233903 NR Description: putative protein; protein id: At4g09500.1
  misc_feature (1)..(421): Homolog of NCBI NO: 15227766 NR Description: putative flavonol 3-O-glucosyltransferase;
  misc_feature (1)..(208): Homolog of NCBI NO: 28393204 NR Description: unknown protein [Arabidopsis thaliana]
  misc_feature (218)..(424): Homolog of NCBI NO: 28393204 NR Description: unknown protein [Arabidopsis thaliana]
  misc_feature (1)..(430): Homolog of NCBI NO: 15239525 NR Description: flavonol 3-O-glucosyltransferase-like protein;
  misc_feature (1)..(427): Homolog of NCBI NO: 15234195 NR Description: UDP rhamnose-anthocyanidin-3-glucoside
  misc_feature (1)..(430): Homolog of NCBI NO: 15234196 NR Description: UDP rhamnose--anthocyanidin-3-glucoside
MTPYLHLANKLAERGHRITFLIPKKAQKQLEHLNLFPDSIVFHSLTIPHVDGLPAGAETFSDIPMPLWKFLPPAIDLTRDQVEAAVSALSPDLILFDIASWVPEVAKEYRVKSMLYNIISATSIAHDFVPGGELGVPPPGYPSSKLLYRKHDAHALLSFSVYYKRFSHRLITGLMNCDFISIRTCKEIEGKFCEYLERQYHKKVFLTGPMLPEPNKGKPLEDRWSHWLNGFEQGSVVFCALGSQVTLEKDQFQELCLGIELTGLPFFVAVTPPKGAKTIQDALPEGFEERVKDRGVVLGEWVQQPLLLAHPSVGCFLSHCGFGSMWESIMSDCQIVLLPFLADQVLNTRLMTEELKVSVEVQREETGWFSKESLSVAITSVMDQASEIGNLVRRNHSKLKEVLVSDGLLTGYTDKFVDTLENLVSETKRE

SEQ ID NO: 89798 - DNA, 1536 bp, Arabidopsis thaliana
  misc_feature (1)..(1536): Ceres Seq. ID no. 12720530
  misc_feature: MA Experiment ID: 20000171 Result: Down-regulated in Transcription
  misc_feature: MA Experiment 20000171 PARAMETER Experiment Name: At_42deg_Heat_P Parameter: Age (day) Value: 14
  misc_feature: MA Experiment 20000171 PARAMETER Experiment Name: At_42deg_Heat_P Parameter: Organism Value: A. thaliana
  misc_feature: MA Experiment 20000171 PARAMETER Experiment Name: At_42deg_Heat_P Parameter: Plant Line Value: WS
  misc_feature: MA Experiment 20000171 PARAMETER Experiment Name: At_42deg_Heat_P Parameter: Temperature (deg C) Value: 42 vs. 22
  misc_feature: MA Experiment 20000171 PARAMETER Experiment Name: At_42deg_Heat_P Parameter: Timepoint (hr) Value: 1
  misc_feature: MA Experiment 20000171 PARAMETER Experiment Name: At_42deg_Heat_P Parameter: Tissue Value: Aerial
atggagatatggttacttatcttgggctctctctccctctctctccttctcaatctcctcttctttcgcctccgtgactcctcctctcttccgttaccacctgcccctaacttcttccctttccttggaacccttcaatggctccggcaaggtttaggtggtttcaacaactatgtccgctccgtccatcaccgtctcggtcctatcatcaccctccgcatcacttcccgccctgccatctttgtcgccgatggttcccttgctcaccaggctctggtcttaaacggggccgttttcgccgatcgtccaccggcggctccgatcagtaagattctttcgaataaccaacataccatcacctcttgtttatatggagttacgtggcggcttcttcgccggaatatcactgagattcttcacccctcgcgtatgaaatcttattctcacgtgcggcattgggttcttgagatcctctttgatcgacttcgtaagagcggaggtgaagaaccgatcgtcgtttttgatcatcttcactatgcgatgtttgcagttcttgttctcatgtgttttggagataagcttgatgagaagcaaatcaaacaggtggaatatgttcagagacaaatgcttcttggctttgccagatatagcatccttaacctttgccctaagttcactaaattgattttgcgaaagagatgggaagagttcttccagatgaggagagagcagcaggatgtcttgcttcggctgatttatgctcggagaaagatcgttgaagagaggaagaagagatcatcagaggaagaagaagagaacaaagagtatgtgcaatcatatgttgatactctgctcgatgtggagcttccagatgagaagaggaagctgaacgaagatgagattgtgagtttgtgctctgagtttctaattgctgggagtgatacaacggccactgtgctgcaatggatcatggcgaacctcgtgaagaatcaagaaatccaggagagattatacgaggagatcacaaacgtagtcggggaagaagcaaaggtagtggaggaaaaagacacgcagaagatgccatatctaaaggcagtagtgatggaggctctccgacgacaccctccgggaaacactgtgctcccgcacagtgtcacggaggacactgtcttgggagggtacaaagtaccgaagaaggggacgattaacttcttagtggcagagatagggagggatccaaaggtgtgggaggaaccaatggcgtttaagccagagaggtttatgggagaagaagaagcggtggacataaccggaagcagagggataaagatgatgccgttcggagcgggtagaaggatatgtcccgggattgggctagcgatgctgcacctcgagtattatgtggcgaatatggtgagggaattccaatggaaagaggtcgaaggtcatgaagttgacttgactgagaaggtcgagtttaccgtaatcatgaaacatccgcttaaggctattgctgttcctaggagaagtcactag

SEQ ID NO: 89799 - protein, 511 aa, Arabidopsis thaliana
  peptide (1)..(511): Ceres Seq. ID no. 12720531
  misc_feature (33)..(507): Pfam Name: Cytochrome P450 Pfam Description: Cytochrome P450
  misc_feature (1)..(511): Homolog of NCBI NO: 15217798 NR Description: cytochrome p450, putative; protein id: [Arabidopsis thaliana] >gi|25282571|pir||G96672 hypothetical
  misc_feature (1)..(511): Homolog of NCBI NO: 15217801 NR Description: cytochrome p450, putative; protein id: supported by cDNA: gi_14334809, supported by cDNA: gi_15293196, by cDNA: gi_15450600 [Arabidopsis thaliana]
  misc_feature (1)..(511): Homolog of NCBI NO: 15224379 NR Description: cytochrome p450, putative; protein id: [Arabidopsis thaliana] >gi|25282595|pir||E84501 probable
  misc_feature (1)..(511): Homolog of NCBI NO: 15450601 NR Description: At1g64950/F13O11_25 [Arabidopsis thaliana]
  misc_feature (1)..(511): Homolog of NCBI NO: 15217800 NR Description: cytochrome p450, putative; protein id: [Arabidopsis thaliana] >gi|25282572|pir||H96672 probable
  misc_feature (1)..(511): Homolog of NCBI NO: 15217771 NR Description: cytochrome p450, putative; protein id:
  misc_feature (1)..(511): Homolog of NCBI NO: 1432145 NR Description: cytochrome P450 [Arabidopsis thaliana]
  misc_feature (1)..(301): Homolog of NCBI NO: 9757853 NR Description: cytochrome P450-like protein [Arabidopsis
  misc_feature (332)..(509): Homolog of NCBI NO: 9757853 NR Description: cytochrome P450-like protein [Arabidopsis
  misc_feature (3)..(509): Homolog of NCBI NO: 15228566 NR Description: cytochrome p450, putative; protein id: supported by cDNA: gi_15983413 [Arabidopsis thaliana]
MEIWLLILGSLSLSLLLNLLFFRLRDSSSLPLPPAPNFFPFLGTLQWLRQGLGGFNNYVRSVHHRLGPIITLRITSRPAIFVADGSLAHQALVLNGAVFADRPPAAPISKILSNNQHTITSCLYGVTWRLLRRNITEILHPSRMKSYSHVRHWVLEILFDRLRKSGGEEPIVVFDHLHYAMFAVLVLMCFGDKLDEKQIKQVEYVQRQMLLGFARYSILNLCPKFTKLILRKRWEEFFQMRREQQDVLLRLIYARRKIVEERKKRSSEEEEENKEYVQSYVDTLLDVELPDEKRKLNEDEIVSLCSEFLIAGSDTTATVLQWIMANLVKNQEIQERLYEEITNVVGEEAKVVEEKDTQKMPYLKAVVMEALRRHPPGNTVLPHSVTEDTVLGGYKVPKKGTINFLVAEIGRDPKVWEEPMAFKPERFMGEEEAVDITGSRGIKMMPFGAGRRICPGIGLAMLHLEYYVANMVREFQWKEVEGHEVDLTEKVEFTVIMKHPLKAIAVPRRSH

SEQ ID NO: 89800 - protein, 368 aa, Arabidopsis thaliana
  peptide (1)..(368): Ceres Seq. ID no. 12720532
  misc_feature (1)..(364): Pfam Name: Cytochrome P450 Pfam Description: Cytochrome P450
  misc_feature (1)..(368): Homolog of NCBI NO: 15217798 NR Description: cytochrome p450, putative; protein id: [Arabidopsis thaliana] >gi|25282571|pir||G96672 hypothetical
  misc_feature (1)..(368): Homolog of NCBI NO: 15217801 NR Description: cytochrome p450, putative; protein id: supported by cDNA: gi_14334809, supported by cDNA: gi_15293196, by cDNA: gi_15450600 [Arabidopsis thaliana]
  misc_feature (1)..(368): Homolog of NCBI NO: 15224379 NR Description: cytochrome p450, putative; protein id: [Arabidopsis thaliana] >gi|25282595|pir||E84501 probable
  misc_feature (1)..(368): Homolog of NCBI NO: 15450601 NR Description: At1g64950/F13O11_25 [Arabidopsis thaliana]
  misc_feature (1)..(368): Homolog of NCBI NO: 15217800 NR Description: cytochrome p450, putative; protein id: [Arabidopsis thaliana] >gi|25282572|pir||H96672 probable
  misc_feature (1)..(368): Homolog of NCBI NO: 15217771 NR Description: cytochrome p450, putative; protein id:
  misc_feature (1)..(368): Homolog of NCBI NO: 1432145 NR Description: cytochrome P450 [Arabidopsis thaliana]
  misc_feature (1)..(158): Homolog of NCBI NO: 9757853 NR Description: cytochrome P450-like protein [Arabidopsis
  misc_feature (189)..(366): Homolog of NCBI NO: 9757853 NR Description: cytochrome P450-like protein [Arabidopsis
  misc_feature (1)..(366): Homolog of NCBI NO: 15228566 NR Description: cytochrome p450, putative; protein id: supported by cDNA: gi_15983413 [Arabidopsis thaliana]
MKSYSHVRHWVLEILFDRLRKSGGEEPIVVFDHLHYAMFAVLVLMCFGDKLDEKQIKQVEYVQRQMLLGFARYSILNLCPKFTKLILRKRWEEFFQMRREQQDVLLRLIYARRKIVEERKKRSSEEEEENKEYVQSYVDTLLDVELPDEKRKLNEDEIVSLCSEFLIAGSDTTATVLQWIMANLVKNQEIQERLYEEITNVVGEEAKVVEEKDTQKMPYLKAVVMEALRRHPPGNTVLPHSVTEDTVLGGYKVPKKGTINFLVAEIGRDPKVWEEPMAFKPERFMGEEEAVDITGSRGIKMMPFGAGRRICPGIGLAMLHLEYYVANMVREFQWKEVEGHEVDLTEKVEFTVIMKHPLKAIAVPRRSH

SEQ ID NO: 89801 - protein, 331 aa, Arabidopsis thaliana
  peptide (1)..(331): Ceres Seq. ID no. 12720533
  misc_feature (1)..(327): Pfam Name: Cytochrome P450 Pfam Description: Cytochrome P450
  misc_feature (1)..(331): Homolog of NCBI NO: 15217798 NR Description: cytochrome p450, putative; protein id: [Arabidopsis thaliana] >gi|25282571|pir||G96672 hypothetical
  misc_feature (1)..(331): Homolog of NCBI NO: 15217801 NR Description: cytochrome p450, putative; protein id: supported by cDNA: gi_14334809, supported by cDNA: gi_15293196, by cDNA: gi_15450600 [Arabidopsis thaliana]
  misc_feature (1)..(331): Homolog of NCBI NO: 15224379 NR Description: cytochrome p450, putative; protein id: [Arabidopsis thaliana] >gi|25282595|pir||E84501 probable
  misc_feature (1)..(331): Homolog of NCBI NO: 15450601 NR Description: At1g64950/F13O11_25 [Arabidopsis thaliana]
  misc_feature (1)..(331): Homolog of NCBI NO: 15217800 NR Description: cytochrome p450, putative; protein id: [Arabidopsis thaliana] >gi|25282572|pir||H96672 probable
  misc_feature (1)..(331): Homolog of NCBI NO: 15217771 NR Description: cytochrome p450, putative; protein id:
  misc_feature (1)..(331): Homolog of NCBI NO: 1432145 NR Description: cytochrome P450 [Arabidopsis thaliana]
  misc_feature (1)..(121): Homolog of NCBI NO: 9757853 NR Description: cytochrome P450-like protein [Arabidopsis
  misc_feature (152)..(329): Homolog of NCBI NO: 9757853 NR Description: cytochrome P450-like protein [Arabidopsis
  misc_feature (1)..(329): Homolog of NCBI NO: 15228566 NR Description: cytochrome p450, putative; protein id: supported by cDNA: gi_15983413 [Arabidopsis thaliana]
MFAVLVLMCFGDKLDEKQIKQVEYVQRQMLLGFARYSILNLCPKFTKLILRKRWEEFFQMRREQQDVLLRLIYARRKIVEERKKRSSEEEEENKEYVQSYVDTLLDVELPDEKRKLNEDEIVSLCSEFLIAGSDTTATVLQWIMANLVKNQEIQERLYEEITNVVGEEAKVVEEKDTQKMPYLKAVVMEALRRHPPGNTVLPHSVTEDTVLGGYKVPKKGTINFLVAEIGRDPKVWEEPMAFKPERFMGEEEAVDITGSRGIKMMPFGAGRRICPGIGLAMLHLEYYVANMVREFQWKEVEGHEVDLTEKVEFTVIMKHPLKAIAVPRRSH

SEQ ID NO: 89802 - DNA, 780 bp, Arabidopsis thaliana
  misc_feature (1)..(780): Ceres Seq. ID no. 12720538
  misc_feature: MA Experiment ID: 20000180 Result: Up-regulated in Transcription
  misc_feature: MA Experiment 20000180 PARAMETER Experiment Name: At_Germinating_Seeds_P Parameter: Age (hr) Value: 24 vs. 0
  misc_feature: MA Experiment 20000180 PARAMETER Experiment Name: At_Germinating_Seeds_P Parameter: Tissue Value: Germinating Seeds
  misc_feature: MA Experiment ID: 20000495 Result: Down-regulated in Transcription
  misc_feature: MA Experiment 20000495 PARAMETER Experiment Name: At_Guard_Cells_P Parameter: Harvest Date Value: 8/2/2002
  misc_feature: MA Experiment 20000495 PARAMETER Experiment Name: At_Guard_Cells_P Parameter: Organism Value: A. thaliana
  misc_feature: MA Experiment 20000495 PARAMETER Experiment Name: At_Guard_Cells_P Parameter: Tissue Value: Guard Cells vs. Leaves
  misc_feature: MA Experiment ID: 20000527 Result: Up-regulated in Transcription
  misc_feature: MA Experiment 20000527 PARAMETER Experiment Name: At_10percent_PEG_P Parameter: Age (day) Value: 20
  misc_feature: MA Experiment 20000527 PARAMETER Experiment Name: At_10percent_PEG_P Parameter: Organism Value: A. thaliana
  misc_feature: MA Experiment 20000527 PARAMETER Experiment Name: At_10percent_PEG_P Parameter: Plant Line Value: WS
  misc_feature: MA Experiment 20000527 PARAMETER Experiment Name: At_10percent_PEG_P Parameter: Timepoint (day) Value: 20
  misc_feature: MA Experiment 20000527 PARAMETER Experiment Name: At_10percent_PEG_P Parameter: Tissue Value: Whole Plant
  misc_feature: MA Experiment 20000527 PARAMETER Experiment Name: At_10percent_PEG_P Parameter: Treatment Value: 10percent PEG vs. No Treatment
  misc_feature: MA Experiment ID: 20001247 Result: Down-regulated in Transcription
  misc_feature: MA Experiment 20001247 PARAMETER Experiment Name: At_Far-red-induction_P Parameter: Age (day) Value: 7
  misc_feature: MA Experiment 20001247 PARAMETER Experiment Name: At_Far-red-induction_P Parameter: Light Value: Far-red vs. White
  misc_feature: MA Experiment 20001247 PARAMETER Experiment Name: At_Far-red-induction_P Parameter: Organism Value: A. thaliana
  misc_feature: MA Experiment 20001247 PARAMETER Experiment Name: At_Far-red-induction_P Parameter: Plant Line Value: Columbia
  misc_feature: MA Experiment 20001247 PARAMETER Experiment Name: At_Far-red-induction_P Parameter: Timepoint (hr) Value: 1
  misc_feature: MA Experiment 20001247 PARAMETER Experiment Name: At_Far-red-induction_P Parameter: Tissue Value: Whole Plant
  misc_feature: MA Experiment ID: 20001248 Result: Down-regulated in Transcription
  misc_feature: MA Experiment 20001248 PARAMETER Experiment Name: At_Far-red-induction_P Parameter: Age (day) Value: 7
  misc_feature: MA Experiment 20001248 PARAMETER Experiment Name: At_Far-red-induction_P Parameter: Light Value: Far-red vs. White
  misc_feature: MA Experiment 20001248 PARAMETER Experiment Name: At_Far-red-induction_P Parameter: Organism Value: A. thaliana
  misc_feature: MA Experiment 20001248 PARAMETER Experiment Name: At_Far-red-induction_P Parameter: Plant Line Value: Columbia
  misc_feature: MA Experiment 20001248 PARAMETER Experiment Name: At_Far-red-induction_P Parameter: Timepoint (hr) Value: 4
  misc_feature: MA Experiment 20001248 PARAMETER Experiment Name: At_Far-red-induction_P Parameter: Tissue Value: Whole Plant
  misc_feature: MA Experiment ID: 20001450 Result: Down-regulated in Transcription
  misc_feature: MA Experiment 20001450 PARAMETER Experiment Name: At_Far-red-induction_P Parameter: Age (day) Value: 7
  misc_feature: MA Experiment 20001450 PARAMETER Experiment Name: At_Far-red-induction_P Parameter: Light Value: Far-red vs. White
  misc_feature: MA Experiment 20001450 PARAMETER Experiment Name: At_Far-red-induction_P Parameter: Organism Value: A. thaliana
  misc_feature: MA Experiment 20001450 PARAMETER Experiment Name: At_Far-red-induction_P Parameter: Plant Line Value: Columbia
  misc_feature: MA Experiment 20001450 PARAMETER Experiment Name: At_Far-red-induction_P Parameter: Timepoint (hr) Value: 8
  misc_feature: MA Experiment 20001450 PARAMETER Experiment Name: At_Far-red-induction_P Parameter: Tissue Value: Whole Plant
  misc_feature: MA Experiment ID: 20001451 Result: Down-regulated in Transcription
  misc_feature: MA Experiment 20001451 PARAMETER Experiment Name: At_Far-red-induction_P Parameter: Age (day) Value: 7
  misc_feature: MA Experiment 20001451 PARAMETER Experiment Name: At_Far-red-induction_P Parameter: Light Value: Far-red vs. White
  misc_feature: MA Experiment 20001451 PARAMETER Experiment Name: At_Far-red-induction_P Parameter: Organism Value: A. thaliana
  misc_feature: MA Experiment 20001451 PARAMETER Experiment Name: At_Far-red-induction_P Parameter: Plant Line Value: Columbia
  misc_feature: MA Experiment 20001451 PARAMETER Experiment Name: At_Far-red-induction_P Parameter: Timepoint (hr) Value: 24
  misc_feature: MA Experiment 20001451 PARAMETER Experiment Name: At_Far-red-induction_P Parameter: Tissue Value: Whole Plant
  misc_feature: MA Experiment ID: 20001555 Result: Down-regulated in Transcription
  misc_feature: MA Experiment 20001555 PARAMETER Experiment Name: At_Drought_Soil_Dry_P Parameter: Age (day) Value: 24
  misc_feature: MA Experiment 20001555 PARAMETER Experiment Name: At_Drought_Soil_Dry_P Parameter: Organism Value: A. thaliana
  misc_feature: MA Experiment 20001555 PARAMETER Experiment Name: At_Drought_Soil_Dry_P Parameter: Plant Line Value: WS
  misc_feature: MA Experiment 20001555 PARAMETER Experiment Name: At_Drought_Soil_Dry_P Parameter: Post Timepoint (hr) Value: None
  misc_feature: MA Experiment 20001555 PARAMETER Experiment Name: At_Drought_Soil_Dry_P Parameter: Post-Treatment Value: None
  misc_feature: MA Experiment 20001555 PARAMETER Experiment Name: At_Drought_Soil_Dry_P Parameter: Timepoint (day) Value: 10
  misc_feature: MA Experiment 20001555 PARAMETER Experiment Name: At_Drought_Soil_Dry_P Parameter: Treatment Value: Drought vs. No Drought
atgacaattagcaacggagatgtcaaatctgaaacctgcaacaatggctcttctgagaagaaaccattcaggatcttcgttggttacgatccacgagaagatcttgcctaccaagtttgtcatcattcaatcacaaaaagatcttcaatccctgtagagatcacaccaattattcaatcagatcttcgaaagaaaggtctgtattggagagaaagaggtcagttagagagcactgagttctctttctctcgtttcttgactcctcacttgtcagattaccaaggttgggctatgttcgtcgactgtgatttcctctaccttgctgatatcaaggaactcactgatttgatcgatgataaatatgcgatcatgtgtgttcaacatgattatactcctaaggagactactaagatggatggtgcggttcaaactgtgtacccgaggaagaactggtcttcaatggtgctttacaactgtggacaccctaagaacaagactttgagccctgagattgttaatactcagactggtgcgtttctccataggttccagtggcttgaggatgaagagattgggtctattccttttgtgtggaactttcttgaagggcacaatagggttgttgagaaagatcccaccacgcagcctaaagcggtgcattatactcgtggagggccttggtttgatgcttggaaggattgcgagtttgcggatctttggcttaatgagatggaagagtacaacaaagagaacaagaaggaagctgataacgcaaagtag

SEQ ID NO: 89803 - protein, 259 aa, Arabidopsis thaliana
  peptide (1)..(259): Ceres Seq. ID no. 12720539
  misc_feature (1)..(259): Homolog of NCBI NO: 15217806 NR Description: unknown protein; protein id: At1g64980.1
  misc_feature (23)..(256): Homolog of NCBI NO: 34903402 NR Description: hypothetical protein~similar to Oryza sativa
  misc_feature (12)..(254): Homolog of NCBI NO: 37536068 NR Description: unknown protein [Oryza sativa (japonica
  misc_feature (25)..(240): Homolog of NCBI NO: 16264294 NR Description: conserved hypothetical protein [Sinorhizobium
  misc_feature (17)..(228): Homolog of NCBI NO: 33864719 NR Description: conserved hypothetical protein [Synechococcus sp.
  misc_feature (21)..(228): Homolog of NCBI NO: 33864181 NR Description: conserved hypothetical protein [Prochlorococcus str. MIT 9313] >gi|33635765|emb|CAE22090.1| conserved
  misc_feature (134)..(201): Homolog of NCBI NO: 33864189 NR Description: conserved hypothetical protein [Prochlorococcus str. MIT 9313] >gi|33635773|emb|CAE22098.1| conserved
MTISNGDVKSETCNNGSSEKKPFRIFVGYDPREDLAYQVCHHSITKRSSIPVEITPIIQSDLRKKGLYWRERGQLESTEFSFSRFLTPHLSDYQGWAMFVDCDFLYLADIKELTDLIDDKYAIMCVQHDYTPKETTKMDGAVQTVYPRKNWSSMVLYNCGHPKNKTLSPEIVNTQTGAFLHRFQWLEDEEIGSIPFVWNFLEGHNRVVEKDPTTQPKAVHYTRGGPWFDAWKDCEFADLWLNEMEEYNKENKKEADNAK

SEQ ID NO: 89804 - protein, 162 aa, Arabidopsis thaliana
  peptide (1)..(162): Ceres Seq. ID no. 12720540
  misc_feature (1)..(162): Homolog of NCBI NO: 15217806 NR Description: unknown protein; protein id: At1g64980.1
  misc_feature (1)..(159): Homolog of NCBI NO: 34903402 NR Description: hypothetical protein~similar to Oryza sativa
  misc_feature (1)..(157): Homolog of NCBI NO: 37536068 NR Description: unknown protein [Oryza sativa (japonica
  misc_feature (1)..(143): Homolog of NCBI NO: 16264294 NR Description: conserved hypothetical protein [Sinorhizobium
  misc_feature (1)..(131): Homolog of NCBI NO: 33864719 NR Description: conserved hypothetical protein [Synechococcus sp.
  misc_feature (1)..(131): Homolog of NCBI NO: 33864181 NR Description: conserved hypothetical protein [Prochlorococcus str. MIT 9313] >gi|33635765|emb|CAE22090.1| conserved
  misc_feature (37)..(104): Homolog of NCBI NO: 33864189 NR Description: conserved hypothetical protein [Prochlorococcus str. MIT 9313] >gi|33635773|emb|CAE22098.1| conserved
MFVDCDFLYLADIKELTDLIDDKYAIMCVQHDYTPKETTKMDGAVQTVYPRKNWSSMVLYNCGHPKNKTLSPEIVNTQTGAFLHRFQWLEDEEIGSIPFVWNFLEGHNRVVEKDPTTQPKAVHYTRGGPWFDAWKDCEFADLWLNEMEEYNKENKKEADNAK

SEQ ID NO: 89805 - protein, 136 aa, Arabidopsis thaliana
  peptide (1)..(136): Ceres Seq. ID no. 12720541
  misc_feature (1)..(136): Homolog of NCBI NO: 15217806 NR Description: unknown protein; protein id: At1g64980.1
  misc_feature (1)..(133): Homolog of NCBI NO: 34903402 NR Description: hypothetical protein~similar to Oryza sativa
  misc_feature (1)..(131): Homolog of NCBI NO: 37536068 NR Description: unknown protein [Oryza sativa (japonica
  misc_feature (1)..(117): Homolog of NCBI NO: 16264294 NR Description: conserved hypothetical protein [Sinorhizobium
  misc_feature (1)..(105): Homolog of NCBI NO: 33864719 NR Description: conserved hypothetical protein [Synechococcus sp.
  misc_feature (1)..(105): Homolog of NCBI NO: 33864181 NR Description: conserved hypothetical protein [Prochlorococcus str. MIT 9313] >gi|33635765|emb|CAE22090.1| conserved
  misc_feature (11)..(78): Homolog of NCBI NO: 33864189 NR Description: conserved hypothetical protein [Prochlorococcus str. MIT 9313] >gi|33635773|emb|CAE22098.1| conserved
MCVQHDYTPKETTKMDGAVQTVYPRKNWSSMVLYNCGHPKNKTLSPEIVNTQTGAFLHRFQWLEDEEIGSIPFVWNFLEGHNRVVEKDPTTQPKAVHYTRGGPWFDAWKDCEFADLWLNEMEEYNKENKKEADNAK

SEQ ID NO: 89806 - DNA, 2013 bp, Arabidopsis thaliana
  misc_feature (1)..(2013): Ceres Seq. ID no. 12720611
  misc_feature: MA Experiment ID: 20000184 Result: Down-regulated in Transcription
  misc_feature: MA Experiment 20000184 PARAMETER Experiment Name: At_Shoots__P Parameter: Age (day) Value: 7
  misc_feature: MA Experiment 20000184 PARAMETER Experiment Name: At_Shoots__P Parameter: Tissue Value: Shoots vs. Whole Plant
  misc_feature: MA Experiment ID: 20000794 Result: Up-regulated in Transcription
  misc_feature: MA Experiment 20000794 PARAMETER Experiment Name: At_Petals_P Parameter: Age (day) Value: 23-25 days
  misc_feature: MA Experiment 20000794 PARAMETER Experiment Name: At_Petals_P Parameter: Plant Line Value: WS
  misc_feature: MA Experiment 20000794 PARAMETER Experiment Name: At_Petals_P Parameter: Tissue Value: Petals vs. Whole plant
acgagagagagagaaagtatctaaaattaagctttgtgtttgaaatcgaaatcgaatcgagaagaagagaatctcaatggaagctgatgacgatttctacagcggcaccgaaaactactccgattacgccgactccgacgaagatgacgccgacggcgagtacgagttcgttgacgacgctgctgatgattccgatgaccttatcttccgtcgccgccagcaaaattatagtgtgttaagcgaagcagatatttgtaagcttcaagaagatgatatttcaaggatttctactgttttgtccatttcgaggaattcatctgcgatcctgcttcgtcactacaattggtgtgtgagcagagttcatgatgaatggtttgctgatgaggaaaaggttcgagatgctgttggtttattagagaaacctgttgttgatttcccaactgatggagaacttgattgtggaatttgttttgagactttcctttctgacaaattgcatgctgctgcttgtggtcatccattctgcgactcatgttgggaaggttatatcaccacagcgattaatgatggtccagggtgtcttacattacgatgtccagatccttcttgcagagctgctgttggtcaggatatgatcaatttgctagctcctgataaagataagcaaaagtacactagttattttgtcagatcatacgttgaagacaatagaaagaccaagtggtgtcccgctcctggctgtgactatgctgtaaattttgttgttggaagtggtaattatgatgtgaattgtcgctgctgttacagtttctgctggaattgtgctgaagaagctcaccgtcctgtagattgtgacactgtttctaagtgggtattgaagaatagtgctgagtcggagaatatgaattggattttggcaaattccaagccctgtccaaaatgcaaacggccaatagagaaaaaccagggttgtatgcatattacgtgcaccccaccatgtaaatttgagttctgctggctttgccttggggcgtggacagagcatggtgagaagacaggtggcttttatgcttgtaaccgttatgaagcagcaaagcaagatggcatttatgatgagactgaaaaacgccgagagatggcaaagaactctcttgagagatatacccactactatgagagatgggcaaccaatcaatcgtctaggcaaaaggcgctgctggatcttaagaagatgcaaacagatgatattgagaagctcagtgacatacagtgtcagcctgaatcacaactgaagttcattatagaagcatggttacagatagttgaatgcagacgagttctaaaatggacatatgcctatggtttttacatacctgaccaggagcatggaaaaagagtgttttttgagtacttgcaaggcgaagctgagtcgggccttgaacgacttcatcaatgtgctgaaaaagagctgctaccatacttagatgccaaaggtccaagtgaagattttaatgaattccgcacaaaactggcaggtttaacaagtgttaccaaaaactattttgagaacttggttagagcgctggagaatgggctatcggatgtgaactcgcatgatgcatatgatcgaacttcaagttcaaagagcttaggggggaagactaagggatcgagttctaaagccagcagctccgattcaagccattggccttgtgaatattgcacttacgtaaatccaaggtcgaccaccatttgccaaatgtgtgaacatggccggtgaaatgccagaaactggcattaaagactgtaatagtaatgcttcgtcgcttttggtcataattatgatcaagtgtcgtgtaactttgtatgtttctcgtattagaataaacgggtccaataaattggattagattggccattattattgatttgccaatgaccaaaaagtgaaaacatgagaggtgagttatatataagttcttacaaaataattgtaaaacttctgtaagtttt

SEQ ID NO: 89807 - protein, 567 aa, Arabidopsis thaliana
  peptide (1)..(567): Ceres Seq. ID no. 12720612
  misc_feature (197)..(259): Pfam Name: IBR domain Pfam Description: IBR domain
  misc_feature (3)..(565): Homolog of NCBI NO: 38346221 NR Description: OJ990528_30.1 [Oryza sativa (japonica
  misc_feature (1)..(539): Homolog of NCBI NO: 29125028 NR Description: ARIADNE-like protein ARI7 [Arabidopsis thaliana]
  misc_feature (4)..(539): Homolog of NCBI NO: 30679494 NR Description: expressed protein [Arabidopsis thaliana] unknown protein [Arabidopsis thaliana]
  misc_feature (1)..(539): Homolog of NCBI NO: 29125025 NR Description: ARIADNE-like protein ARI5 [Arabidopsis thaliana]
  misc_feature (2)..(567): Homolog of NCBI NO: 38175567 NR Description: putative ariadne [Oryza sativa (japonica
  misc_feature (4)..(283): Homolog of NCBI NO: 25406877 NR Description: hypothetical protein [imported] - Arabidopsis
  misc_feature (314)..(539): Homolog of NCBI NO: 25406877 NR Description: hypothetical protein [imported] - Arabidopsis
  misc_feature (3)..(524): Homolog of NCBI NO: 15225136 NR Description: putative ARI-like RING zinc finger protein;
  misc_feature (6)..(535): Homolog of NCBI NO: 15225137 NR Description: similar to Ariadne protein from Drosophila; id: At2g31780.1 [Arabidopsis thaliana] >gi|25408184|pir||A84725
  misc_feature (279)..(539): Homolog of NCBI NO: 30684981 NR Description: RING zinc finger protein -related [Arabidopsis
MEADDDFYSGTENYSDYADSDEDDADGEYEFVDDAADDSDDLIFRRRQQNYSVLSEADICKLQEDDISRISTVLSISRNSSAILLRHYNWCVSRVHDEWFADEEKVRDAVGLLEKPVVDFPTDGELDCGICFETFLSDKLHAAACGHPFCDSCWEGYITTAINDGPGCLTLRCPDPSCRAAVGQDMINLLAPDKDKQKYTSYFVRSYVEDNRKTKWCPAPGCDYAVNFVVGSGNYDVNCRCCYSFCWNCAEEAHRPVDCDTVSKWVLKNSAESENMNWILANSKPCPKCKRPIEKNQGCMHITCTPPCKFEFCWLCLGAWTEHGEKTGGFYACNRYEAAKQDGIYDETEKRREMAKNSLERYTHYYERWATNQSSRQKALLDLKKMQTDDIEKLSDIQCQPESQLKFIIEAWLQIVECRRVLKWTYAYGFYIPDQEHGKRVFFEYLQGEAESGLERLHQCAEKELLPYLDAKGPSEDFNEFRTKLAGLTSVTKNYFENLVRALENGLSDVNSHDAYDRTSSSKSLGGKTKGSSSKASSSDSSHWPCEYCTYVNPRSTTICQMCEHGR

SEQ ID NO: 89808 - protein, 382 aa, Arabidopsis thaliana
  peptide (1)..(382): Ceres Seq. ID no. 12720613
  misc_feature (12)..(74): Pfam Name: IBR domain Pfam Description: IBR domain
  misc_feature (1)..(380): Homolog of NCBI NO: 38346221 NR Description: OJ990528_30.1 [Oryza sativa (japonica
  misc_feature (1)..(354): Homolog of NCBI NO: 29125028 NR Description: ARIADNE-like protein ARI7 [Arabidopsis thaliana]
  misc_feature (1)..(354): Homolog of NCBI NO: 30679494 NR Description: expressed protein [Arabidopsis thaliana] unknown protein [Arabidopsis thaliana]
  misc_feature (1)..(354): Homolog of NCBI NO: 29125025 NR Description: ARIADNE-like protein ARI5 [Arabidopsis thaliana]
  misc_feature (1)..(382): Homolog of NCBI NO: 38175567 NR Description: putative ariadne [Oryza sativa (japonica
  misc_feature (1)..(98): Homolog of NCBI NO: 25406877 NR Description: hypothetical protein [imported] - Arabidopsis
  misc_feature (129)..(354): Homolog of NCBI NO: 25406877 NR Description: hypothetical protein [imported] - Arabidopsis
  misc_feature (1)..(339): Homolog of NCBI NO: 15225136 NR Description: putative ARI-like RING zinc finger protein;
  misc_feature (1)..(350): Homolog of NCBI NO: 15225137 NR Description: similar to Ariadne protein from Drosophila; id: At2g31780.1 [Arabidopsis thaliana] >gi|25408184|pir||A84725
  misc_feature (94)..(354): Homolog of NCBI NO: 30684981 NR Description: RING zinc finger protein -related [Arabidopsis
MINLLAPDKDKQKYTSYFVRSYVEDNRKTKWCPAPGCDYAVNFVVGSGNYDVNCRCCYSFCWNCAEEAHRPVDCDTVSKWVLKNSAESENMNWILANSKPCPKCKRPIEKNQGCMHITCTPPCKFEFCWLCLGAWTEHGEKTGGFYACNRYEAAKQDGIYDETEKRREMAKNSLERYTHYYERWATNQSSRQKALLDLKKMQTDDIEKLSDIQCQPESQLKFIIEAWLQIVECRRVLKWTYAYGFYIPDQEHGKRVFFEYLQGEAESGLERLHQCAEKELLPYLDAKGPSEDFNEFRTKLAGLTSVTKNYFENLVRALENGLSDVNSHDAYDRTSSSKSLGGKTKGSSSKASSSDSSHWPCEYCTYVNPRSTTICQMCEHGR

SEQ ID NO: 89809 - protein, 292 aa, Arabidopsis thaliana
  peptide (1)..(292): Ceres Seq. ID no. 12720614
  misc_feature (1)..(290): Homolog of NCBI NO: 38346221 NR Description: OJ990528_30.1 [Oryza sativa (japonica
  misc_feature (1)..(264): Homolog of NCBI NO: 29125028 NR Description: ARIADNE-like protein ARI7 [Arabidopsis thaliana]
  misc_feature (1)..(264): Homolog of NCBI NO: 30679494 NR Description: expressed protein [Arabidopsis thaliana] unknown protein [Arabidopsis thaliana]
  misc_feature (1)..(264): Homolog of NCBI NO: 29125025 NR Description: ARIADNE-like protein ARI5 [Arabidopsis thaliana]
  misc_feature (1)..(292): Homolog of NCBI NO: 38175567 NR Description: putative ariadne [Oryza sativa (japonica
  misc_feature (39)..(264): Homolog of NCBI NO: 25406877 NR Description: hypothetical protein [imported] - Arabidopsis
  misc_feature (1)..(249): Homolog of NCBI NO: 15225136 NR Description: putative ARI-like RING zinc finger protein;
  misc_feature (1)..(260): Homolog of NCBI NO: 15225137 NR Description: similar to Ariadne protein from Drosophila; id: At2g31780.1 [Arabidopsis thaliana] >gi|25408184|pir||A84725
  misc_feature (4)..(264): Homolog of NCBI NO: 30684981 NR Description: RING zinc finger protein -related [Arabidopsis
  misc_feature (4)..(260): Homolog of NCBI NO: 25408165 NR Description: probable RING zinc finger protein [imported] - thaliana >gi|4582446|gb|AAD24830.1| putative RING zinc finger
MNWILANSKPCPKCKRPIEKNQGCMHITCTPPCKFEFCWLCLGAWTEHGEKTGGFYACNRYEAAKQDGIYDETEKRREMAKNSLERYTHYYERWATNQSSRQKALLDLKKMQTDDIEKLSDIQCQPESQLKFIIEAWLQIVECRRVLKWTYAYGFYIPDQEHGKRVFFEYLQGEAESGLERLHQCAEKELLPYLDAKGPSEDFNEFRTKLAGLTSVTKNYFENLVRALENGLSDVNSHDAYDRTSSSKSLGGKTKGSSSKASSSDSSHWPCEYCTYVNPRSTTICQMCEHGR

SEQ ID NO: 89810 - DNA, 2328 bp, Arabidopsis thaliana
  misc_feature (1)..(2328): Ceres Seq. ID no. 12720642
  misc_feature: MA Experiment ID: 20000182 Result: Down-regulated in Transcription
  misc_feature: MA Experiment 20000182 PARAMETER Experiment Name: At_2mM_SA_P Parameter: Age (day) Value: 14
  misc_feature: MA Experiment 20000182 PARAMETER Experiment Name: At_2mM_SA_P Parameter: Organism Value: A. thaliana
  misc_feature: MA Experiment 20000182 PARAMETER Experiment Name: At_2mM_SA_P Parameter: Plant Line Value: WS
  misc_feature: MA Experiment 20000182 PARAMETER Experiment Name: At_2mM_SA_P Parameter: Timepoint (hr) Value: 6
  misc_feature: MA Experiment 20000182 PARAMETER Experiment Name: At_2mM_SA_P Parameter: Tissue Value: Aerial
  misc_feature: MA Experiment 20000182 PARAMETER Experiment Name: At_2mM_SA_P Parameter: Treatment Value: 2mM SA vs. No Treatment
  misc_feature: MA Experiment ID: 20000184 Result: Up-regulated in Transcription
  misc_feature: MA Experiment 20000184 PARAMETER Experiment Name: At_Shoots__P Parameter: Age (day) Value: 7
  misc_feature: MA Experiment 20000184 PARAMETER Experiment Name: At_Shoots__P Parameter: Tissue Value: Shoots vs. Whole Plant
  misc_feature: MA Experiment ID: 20000286 Result: Up-regulated in Transcription
  misc_feature: MA Experiment 20000286 PARAMETER Experiment Name: At_Open_Flower_P Parameter: Age (day) Value: 21
  misc_feature: MA Experiment 20000286 PARAMETER Experiment Name: At_Open_Flower_P Parameter: Plant Line Value: WS
  misc_feature: MA Experiment 20000286 PARAMETER Experiment Name: At_Open_Flower_P Parameter: Tissue Value: Half Open vs. Whole Plant
  misc_feature: MA Experiment ID: 20000436 Result: Down-regulated in Transcription
  misc_feature: MA Experiment 20000436 PARAMETER Experiment Name: At_Drought_P Parameter: Age (day) Value: 7
  misc_feature: MA Experiment 20000436 PARAMETER Experiment Name: At_Drought_P Parameter: Organism Value: A. thaliana
  misc_feature: MA Experiment 20000436 PARAMETER Experiment Name: At_Drought_P Parameter: Plant Line Value: WS
  misc_feature: MA Experiment 20000436 PARAMETER Experiment Name: At_Drought_P Parameter: Timepoint (hr) Value: 12
  misc_feature: MA Experiment 20000436 PARAMETER Experiment Name: At_Drought_P Parameter: Tissue Value: Whole Plant
  misc_feature: MA Experiment 20000436 PARAMETER Experiment Name: At_Drought_P Parameter: Treatment Value: Drought vs. No Drought
  misc_feature: MA Experiment ID: 20000437 Result: Down-regulated in Transcription
  misc_feature: MA Experiment 20000437 PARAMETER Experiment Name: At_Drought_P Parameter: Age (day) Value: 8
  misc_feature: MA Experiment 20000437 PARAMETER Experiment Name: At_Drought_P Parameter: Organism Value: A. thaliana
  misc_feature: MA Experiment 20000437 PARAMETER Experiment Name: At_Drought_P Parameter: Plant Line Value: WS
  misc_feature: MA Experiment 20000437 PARAMETER Experiment Name: At_Drought_P Parameter: Timepoint (hr) Value: 24
  misc_feature: MA Experiment 20000437 PARAMETER Experiment Name: At_Drought_P Parameter: Tissue Value: Whole Plant
  misc_feature: MA Experiment 20000437 PARAMETER Experiment Name: At_Drought_P Parameter: Treatment Value: Drought vs. No Drought
  misc_feature: MA Experiment ID: 20000438 Result: Up-regulated in Transcription
  misc_feature: MA Experiment 20000438 PARAMETER Experiment Name: At_Shoots__P Parameter: Age (day) Value: 14
  misc_feature: MA Experiment 20000438 PARAMETER Experiment Name: At_Shoots__P Parameter: Tissue Value: Shoots vs. Whole Plant
  misc_feature: MA Experiment ID: 20000794 Result: Up-regulated in Transcription
  misc_feature: MA Experiment 20000794 PARAMETER Experiment Name: At_Petals_P Parameter: Age (day) Value: 23-25 days
  misc_feature: MA Experiment 20000794 PARAMETER Experiment Name: At_Petals_P Parameter: Plant Line Value: WS
  misc_feature: MA Experiment 20000794 PARAMETER Experiment Name: At_Petals_P Parameter: Tissue Value: Petals vs. Whole plant
atggaaacccgttgctctctcctctttctctctctcattctcctgtatttgcccaaacccggatccggatttggatcctccggtccgattgcggcgtcgttcggcggctctgctttcttctgcgccattgacgctagtggtcgtcaagatgttatctgctggggaaagaactattcatctccttcttctccctcttcttcttcttcttcgtcgtctattgcttcttccacttccgcaagctacaacattccgtcaatggcggttctttcaggcggagacgggtttctctgcggcattttgtcgaacacttctcaagcattctgttttagttcacttgggtcttcttcaggtatggatcttgtccctctagcttacaggactactgcttactctcagatagctgctggaaacagccatgtctgtgctgttagaggagcttactattccgatcacgattctgggactatcgattgttgggagataactagagctacgaacaacaacagcttaatcgccaaggagaatcctaacttctatgatcagattgttagtaatctcgtcttcaacaatattgtttctggtgatgggtttagctgtggtggaatcagagatggtgggatgctctgttttggtcccaattcttctaatttagggtttaacacaacttctgataacttccaagtcttagccgccggtaaaaactccgtttgtgctattcttaatttatctcgagaggttaaatgttggggagaagatgaatcttttgtcaattctccgatgaatgattctcgattcgtctcgctaaccgcgggtcctcgccatttctgcggaatccgtgaggataatcatgaggttgagtgttggggaaactctaatttctctttgattccaaaaggttctggatttaaagcaatagcttcgtctgatttcattgtttgtggtattagagaagaggatcttgttcttgattgttggatggttaatggttcgtccacattagcttacgatcctccgttagagctctgcagtccagggatgtgtagagctggtccttgtaatgaaaaagagtttgctttcaacgcaagtatactcaatgaacctgacctaacgagtttgtgtgtaaggaaagagttaatggtctgttcaccttgcggctcggattgctctcacggattcttcttgtcaagttcgtgcaccgcgaactctgatcggatatgtacgccttgctcgctctgtcaaaacagttcttgttcggatatatgtaagcttcataacagcaattttccagataagcattggcatcaactacagagacttgttcttatcatcgggtcttgcgcatccgctctattgatcattataattggttgctgtgttgtgccacggattgtcactagtcctaataaagaagacggagcagcgaatcaattcaaatcttgcataggaaagcccgatttagacactgatcagccacttgaaaatgtatcccctgctccatcggtaacgccttttgctcaagtgtttagactctctgagcttaaagacgcgaccaacgggtttaaagagttcaatgagttaggcagaggaagctatgggtttgtctacaaagccgtgttggcggacgggaggcaagtagcggttaagagagcaaacgcagcaaccataatccacacaaacactagagaattcgagacagaattggagattctctgcaacattaggcattgcaacattgtgaatctccttggttactctaccgaaatgggagagaggcttcttgtttacgagtacatgcctcacggtacgcttcacgatcatctgcacagtgggttttcgccattgagttggagcttaaggatcaaaatcgctatgcaaaccgcaaagggtcttgagtatcttcacaatgaagctgagccgagaatcattcatggcgatgtgaagtcttcgaatgtactattggactcggaatgggtggcgagagttgcggatttcgggctcgtgacatcgtcgaacgagaagaatttggacatcaaaagagatgtttatgactttggagttgtgctgttagagattttaaccggtaggaaacgttatgatagggactgtgatccgccggagattgttgaatggacggttccggtgatcagagaaggcaaagcggcggcgattgtggatacgtatattgcgttgccgagaaacgtggagccgttgttgaaacttgctgacgtggcagagttgtgtgtacgggaggatccgaatcaacaaccaactatgtcggaacttgcgaattggttggaacatgtcgcaagagatgcattgatcttctag

SEQ ID NO: 89811 - protein, 775 aa, Arabidopsis thaliana
  peptide (1)..(775): Ceres Seq. ID no. 12720643
  misc_feature (520)..(666): Pfam Name: Protein kinase domain Pfam Description: Protein kinase domain
  misc_feature (6)..(775): Homolog of NCBI NO: 15225044 NR Description: putative protein kinase; protein id: At2g39180.1 thaliana] >gi|7487054|pir||T02584 probable protein kinase
  misc_feature (10)..(666): Homolog of NCBI NO: 15721862 NR Description: CR4 [Oryza sativa]
  misc_feature (675)..(766): Homolog of NCBI NO: 15721862 NR Description: CR4 [Oryza sativa]
  misc_feature (14)..(666): Homolog of NCBI NO: 3913366 NR Description: Putative receptor protein kinase CRINKLY4
  misc_feature (675)..(767): Homolog of NCBI NO: 3913366 NR Description: Putative receptor protein kinase CRINKLY4
  misc_feature (2)..(666): Homolog of NCBI NO: 15231681 NR Description: putative protein; protein id: At3g59420.1, by cDNA: gi_20302589 [Arabidopsis thaliana]
  misc_feature (675)..(766): Homolog of NCBI NO: 15231681 NR Description: putative protein; protein id: At3g59420.1, by cDNA: gi_20302589 [Arabidopsis thaliana]
  misc_feature (73)..(666): Homolog of NCBI NO: 15238823 NR Description: receptor kinase-like protein; protein id:
  misc_feature (673)..(766): Homolog of NCBI NO: 15238823 NR Description: receptor kinase-like protein; protein id:
  misc_feature (10)..(344): Homolog of NCBI NO: 15228781 NR Description: receptor kinase - like protein; protein id:
METRCSLLFLSLILLYLPKPGSGFGSSGPIAASFGGSAFFCAIDASGRQDVICWGKNYSSPSSPSSSSSSSSIASSTSASYNIPSMAVLSGGDGFLCGILSNTSQAFCFSSLGSSSGMDLVPLAYRTTAYSQIAAGNSHVCAVRGAYYSDHDSGTIDCWEITRATNNNSLIAKENPNFYDQIVSNLVFNNIVSGDGFSCGGIRDGGMLCFGPNSSNLGFNTTSDNFQVLAAGKNSVCAILNLSREVKCWGEDESFVNSPMNDSRFVSLTAGPRHFCGIREDNHEVECWGNSNFSLIPKGSGFKAIASSDFIVCGIREEDLVLDCWMVNGSSTLAYDPPLELCSPGMCRAGPCNEKEFAFNASILNEPDLTSLCVRKELMVCSPCGSDCSHGFFLSSSCTANSDRICTPCSLCQNSSCSDICKLHNSNFPDKHWHQLQRLVLIIGSCASALLIIIIGCCVVPRIVTSPNKEDGAANQFKSCIGKPDLDTDQPLENVSPAPSVTPFAQVFRLSELKDATNGFKEFNELGRGSYGFVYKAVLADGRQVAVKRANAATIIHTNTREFETELEILCNIRHCNIVNLLGYSTEMGERLLVYEYMPHGTLHDHLHSGFSPLSWSLRIKIAMQTAKGLEYLHNEAEPRIIHGDVKSSNVLLDSEWVARVADFGLVTSSNEKNLDIKRDVYDFGVVLLEILTGRKRYDRDCDPPEIVEWTVPVIREGKAAAIVDTYIALPRNVEPLLKLADVAELCVREDPNQQPTMSELANWLEHVARDALIF

SEQ ID NO: 89812 - protein, 690 aa, Arabidopsis thaliana
  peptide (1)..(690): Ceres Seq. ID no. 12720644
  misc_feature (435)..(581): Pfam Name: Protein kinase domain Pfam Description: Protein kinase domain
  misc_feature (1)..(690): Homolog of NCBI NO: 15225044 NR Description: putative protein kinase; protein id: At2g39180.1 thaliana] >gi|7487054|pir||T02584 probable protein kinase
  misc_feature (1)..(581): Homolog of NCBI NO: 15721862 NR Description: CR4 [Oryza sativa]
  misc_feature (590)..(681): Homolog of NCBI NO: 15721862 NR Description: CR4 [Oryza sativa]
  misc_feature (1)..(581): Homolog of NCBI NO: 3913366 NR Description: Putative receptor protein kinase CRINKLY4
  misc_feature (590)..(682): Homolog of NCBI NO: 3913366 NR Description: Putative receptor protein kinase CRINKLY4
  misc_feature (1)..(581): Homolog of NCBI NO: 15231681 NR Description: putative protein; protein id: At3g59420.1, by cDNA: gi_20302589 [Arabidopsis thaliana]
  misc_feature (590)..(681): Homolog of NCBI NO: 15231681 NR Description: putative protein; protein id: At3g59420.1, by cDNA: gi_20302589 [Arabidopsis thaliana]
  misc_feature (1)..(581): Homolog of NCBI NO: 15238823 NR Description: receptor kinase-like protein; protein id:
  misc_feature (588)..(681): Homolog of NCBI NO: 15238823 NR Description: receptor kinase-like protein; protein id:
  misc_feature (1)..(259): Homolog of NCBI NO: 15228781 NR Description: receptor kinase - like protein; protein id:
MAVLSGGDGFLCGILSNTSQAFCFSSLGSSSGMDLVPLAYRTTAYSQIAAGNSHVCAVRGAYYSDHDSGTIDCWEITRATNNNSLIAKENPNFYDQIVSNLVFNNIVSGDGFSCGGIRDGGMLCFGPNSSNLGFNTTSDNFQVLAAGKNSVCAILNLSREVKCWGEDESFVNSPMNDSRFVSLTAGPRHFCGIREDNHEVECWGNSNFSLIPKGSGFKAIASSDFIVCGIREEDLVLDCWMVNGSSTLAYDPPLELCSPGMCRAGPCNEKEFAFNASILNEPDLTSLCVRKELMVCSPCGSDCSHGFFLSSSCTANSDRICTPCSLCQNSSCSDICKLHNSNFPDKHWHQLQRLVLIIGSCASALLIIIIGCCVVPRIVTSPNKEDGAANQFKSCIGKPDLDTDQPLENVSPAPSVTPFAQVFRLSELKDATNGFKEFNELGRGSYGFVYKAVLADGRQVAVKRANAATIIHTNTREFETELEILCNIRHCNIVNLLGYSTEMGERLLVYEYMPHGTLHDHLHSGFSPLSWSLRIKIAMQTAKGLEYLHNEAEPRIIHGDVKSSNVLLDSEWVARVADFGLVTSSNEKNLDIKRDVYDFGVVLLEILTGRKRYDRDCDPPEIVEWTVPVIREGKAAAIVDTYIALPRNVEPLLKLADVAELCVREDPNQQPTMSELANWLEHVARDALIF

SEQ ID NO: 89813 - protein, 658 aa, Arabidopsis thaliana
  peptide (1)..(658): Ceres Seq. ID no. 12720645
  misc_feature (403)..(549): Pfam Name: Protein kinase domain Pfam Description: Protein kinase domain
  misc_feature (1)..(658): Homolog of NCBI NO: 15225044 NR Description: putative protein kinase; protein id: At2g39180.1 thaliana] >gi|7487054|pir||T02584 probable protein kinase
  misc_feature (1)..(549): Homolog of NCBI NO: 15721862 NR Description: CR4 [Oryza sativa]
  misc_feature (558)..(649): Homolog of NCBI NO: 15721862 NR Description: CR4 [Oryza sativa]
  misc_feature (1)..(549): Homolog of NCBI NO: 3913366 NR Description: Putative receptor protein kinase CRINKLY4
  misc_feature (558)..(650): Homolog of NCBI NO: 3913366 NR Description: Putative receptor protein kinase CRINKLY4
  misc_feature (1)..(549): Homolog of NCBI NO: 15231681 NR Description: putative protein; protein id: At3g59420.1, by cDNA: gi_20302589 [Arabidopsis thaliana]
  misc_feature (558)..(649): Homolog of NCBI NO: 15231681 NR Description: putative protein; protein id: At3g59420.1, by cDNA: gi_20302589 [Arabidopsis thaliana]
  misc_feature (1)..(549): Homolog of NCBI NO: 15238823 NR Description: receptor kinase-like protein; protein id:
  misc_feature (556)..(649): Homolog of NCBI NO: 15238823 NR Description: receptor kinase-like protein; protein id:
  misc_feature (1)..(227): Homolog of NCBI NO: 15228781 NR Description: receptor kinase - like protein; protein id:
MDLVPLAYRTTAYSQIAAGNSHVCAVRGAYYSDHDSGTIDCWEITRATNNNSLIAKENPNFYDQIVSNLVFNNIVSGDGFSCGGIRDGGMLCFGPNSSNLGFNTTSDNFQVLAAGKNSVCAILNLSREVKCWGEDESFVNSPMNDSRFVSLTAGPRHFCGIREDNHEVECWGNSNFSLIPKGSGFKAIASSDFIVCGIREEDLVLDCWMVNGSSTLAYDPPLELCSPGMCRAGPCNEKEFAFNASILNEPDLTSLCVRKELMVCSPCGSDCSHGFFLSSSCTANSDRICTPCSLCQNSSCSDICKLHNSNFPDKHWHQLQRLVLIIGSCASALLIIIIGCCVVPRIVTSPNKEDGAANQFKSCIGKPDLDTDQPLENVSPAPSVTPFAQVFRLSELKDATNGFKEFNELGRGSYGFVYKAVLADGRQVAVKRANAATIIHTNTREFETELEILCNIRHCNIVNLLGYSTEMGERLLVYEYMPHGTLHDHLHSGFSPLSWSLRIKIAMQTAKGLEYLHNEAEPRIIHGDVKSSNVLLDSEWVARVADFGLVTSSNEKNLDIKRDVYDFGVVLLEILTGRKRYDRDCDPPEIVEWTVPVIREGKAAAIVDTYIALPRNVEPLLKLADVAELCVREDPNQQPTMSELANWLEHVARDALIF

SEQ ID NO: 89814 - DNA, 1911 bp, Arabidopsis thaliana
  misc_feature (1)..(1911): Ceres Seq. ID no. 12720656
  misc_feature: MA Experiment ID: 20000185 Result: Down-regulated in Transcription
  misc_feature: MA Experiment 20000185 PARAMETER Experiment Name: At_Roots__P Parameter: Age (day) Value: 7 vs. 21
  misc_feature: MA Experiment 20000185 PARAMETER Experiment Name: At_Roots__P Parameter: Organism Value: A. thaliana
  misc_feature: MA Experiment 20000185 PARAMETER Experiment Name: At_Roots__P Parameter: Tissue Value: Roots vs. Whole Plant
  misc_feature: MA Experiment ID: 20000213 Result: Up-regulated in Transcription
  misc_feature: MA Experiment 20000213 PARAMETER Experiment Name: At_4deg_Cold_P Parameter: Timepoint (hr) Value: 2
  misc_feature: MA Experiment ID: 20000438 Result: Down-regulated in Transcription
  misc_feature: MA Experiment 20000438 PARAMETER Experiment Name: At_Shoots__P Parameter: Age (day) Value: 14
  misc_feature: MA Experiment 20000438 PARAMETER Experiment Name: At_Shoots__P Parameter: Tissue Value: Shoots vs. Whole Plant
  misc_feature: MA Experiment ID: 20001247 Result: Down-regulated in Transcription
  misc_feature: MA Experiment 20001247 PARAMETER Experiment Name: At_Far-red-induction_P Parameter: Age (day) Value: 7
  misc_feature: MA Experiment 20001247 PARAMETER Experiment Name: At_Far-red-induction_P Parameter: Light Value: Far-red vs. White
  misc_feature: MA Experiment 20001247 PARAMETER Experiment Name: At_Far-red-induction_P Parameter: Organism Value: A. thaliana
  misc_feature: MA Experiment 20001247 PARAMETER Experiment Name: At_Far-red-induction_P Parameter: Plant Line Value: Columbia
  misc_feature: MA Experiment 20001247 PARAMETER Experiment Name: At_Far-red-induction_P Parameter: Timepoint (hr) Value: 1
  misc_feature: MA Experiment 20001247 PARAMETER Experiment Name: At_Far-red-induction_P Parameter: Tissue Value: Whole Plant
  misc_feature: MA Experiment ID: 20001248 Result: Up-regulated in Transcription
  misc_feature: MA Experiment 20001248 PARAMETER Experiment Name: At_Far-red-induction_P Parameter: Age (day) Value: 7
  misc_feature: MA Experiment 20001248 PARAMETER Experiment Name: At_Far-red-induction_P Parameter: Light Value: Far-red vs. White
  misc_feature: MA Experiment 20001248 PARAMETER Experiment Name: At_Far-red-induction_P Parameter: Organism Value: A. thaliana
  misc_feature: MA Experiment 20001248 PARAMETER Experiment Name: At_Far-red-induction_P Parameter: Plant Line Value: Columbia
  misc_feature: MA Experiment 20001248 PARAMETER Experiment Name: At_Far-red-induction_P Parameter: Timepoint (hr) Value: 4
  misc_feature: MA Experiment 20001248 PARAMETER Experiment Name: At_Far-red-induction_P Parameter: Tissue Value: Whole Plant
  misc_feature: MA Experiment ID: 20001458 Result: Up-regulated in Transcription
  misc_feature: MA Experiment 20001458 PARAMETER Experiment Name: At_50mM_NH4NO3_L-to-H_P Parameter: Age (day) Value: Undefined
  misc_feature: MA Experiment 20001458 PARAMETER Experiment Name: At_50mM_NH4NO3_L-to-H_P Parameter: Organism Value: Undefined
  misc_feature: MA Experiment 20001458 PARAMETER Experiment Name: At_50mM_NH4NO3_L-to-H_P Parameter: Plant Line Value: Undefined
  misc_feature: MA Experiment 20001458 PARAMETER Experiment Name: At_50mM_NH4NO3_L-to-H_P Parameter: Timepoint (hr) Value: 2
  misc_feature: MA Experiment 20001458 PARAMETER Experiment Name: At_50mM_NH4NO3_L-to-H_P Parameter: Tissue Value: Siliques
  misc_feature: MA Experiment 20001458 PARAMETER Experiment Name: At_50mM_NH4NO3_L-to-H_P Parameter: Treatment Value: 50mM NH4NO3 vs. 100mM Manitol
  misc_feature: MA Experiment ID: 20001459 Result: Down-regulated in Transcription
  misc_feature: MA Experiment 20001459 PARAMETER Experiment Name: At_50mM_NH4NO3_L-to-H_P Parameter: Age (day) Value: Undefined
  misc_feature: MA Experiment 20001459 PARAMETER Experiment Name: At_50mM_NH4NO3_L-to-H_P Parameter: Organism Value: Undefined
  misc_feature: MA Experiment 20001459 PARAMETER Experiment Name: At_50mM_NH4NO3_L-to-H_P Parameter: Plant Line Value: Undefined
  misc_feature: MA Experiment 20001459 PARAMETER Experiment Name: At_50mM_NH4NO3_L-to-H_P Parameter: Timepoint (hr) Value: 4
  misc_feature: MA Experiment 20001459 PARAMETER Experiment Name: At_50mM_NH4NO3_L-to-H_P Parameter: Tissue Value: Siliques
  misc_feature: MA Experiment 20001459 PARAMETER Experiment Name: At_50mM_NH4NO3_L-to-H_P Parameter: Treatment Value: 50mM NH4NO3 vs. 100mM Manitol
aatttaaattctcagttcttcgttctttcgctgactttagctatctctctctgtaaagacttcgttttttttttgttgccgtgtgacgacttcttcttcctcttcttcttcgacctctttctctcggaagcttagcttcttaaaatccatttctctcggaagcttagcttctcaaatcctcgatctcttttgtatcgtgattcattaaccacttcatgataattataatcttccttctcttctgacgattgaattacatcttcttctgatagctgttctgatttttttctgtatacaaagtaaattcaaagtgttttattggtgtcctgcagtggacaaacatcggtattttaatctcctctcgataatgaagtgtttcttgttctctggtggggataagagaggggaacagaagacccctatttcggtttcattgacctctatcttctctgaccgcgaaataaaccgaagcgggtcagagttcaactctcgtgatgtctctgggacgagcacagaatcatccatggggaggaagaactcgtaccctccggtgtctactagagcaagtaatctcagagagttcagcattactgatctcaagtctgcaacaaagaactttagccgatctgttatgattggagaaggcggtttcggttgtgtcttcaggggcacagtgaggaacttagaggactcgtcagttaaaatcgaagtcgcagtgaagcagctcggtaaaagagggttgcaggggcataaggaatgggttacggaagtgaacttcctcggaatagttgagcatacaaacttggtgaaattgcttggctattgtgcagaagatgatgaacgtggaatccaacggcttttggtttatgaatacatgcctaaccgaagtgttgaattccacttatcccctcggtcactcacagttcttacttgggacctcagactgagaatcgcccaagatgcagctcgcggattaacatacctgcatgaagaaatggagtttcagataatattccgcgatttcaagtcctcgaacattcttttggatgaggactggaaagcaaagctctcagatttcggtttggctcgtttaggtccatctgaaggattaacccatgtttctactgatgttgtaggtacaatgggttatgcagcacctgaatacattcaaaccggccgtctcacatcgaaaagcgatgtgtggggttatggagtcttcctctatgagcttatcactgggaggcgaccggtggacagaaacagacccaagggagagcagaagcttctagaatgggtgagaccttatttatctgacacaaggaagttcaagctcatattagatccaaggctggaagggaagtacccgatcaaatcggttcaaaagctagcagttgtggccaacagatgtttggttaggaactcaaaggcacgtcccaagatgagtgaggttttagagatggtgaacaaaattgtggaagcttcttcaggaaatggcagcccacagctagttccgctgaacagtgtaaaagcttcgagagacgcgagaggaaagaacaatggtggtggcggtgaaggaggttggtttggcaagttatggaatccaaagacaataagagcttgttgactgcttatagaattcaacctcttcttacagcaaaaaaaagagtcaagaaaggtttcatggagattccgaaggttgaagattctagcgagatcaagatgaagctcatatacatacataaagataattatatatgaagatttgtgaaagattctaaaatgatgaaatatgatttttgtatgaacttatgaatagtaaccacagctaaattagtaagatatgtatattaagcaagaacggcttatcagagttttgttccaaagctgatcaatctactcgtgcttaagtgt

SEQ ID NO: 89815 - protein, 418 aa, Arabidopsis thaliana
  peptide (1)..(418): Ceres Seq. ID no. 12720657
  misc_feature (1)..(418): Homolog of NCBI NO: 15232764 NR Description: putative protein kinase; protein id: At3g09830.1, by cDNA: gi_20268726 [Arabidopsis thaliana] putative protein kinase [Arabidopsis thaliana]
  misc_feature (1)..(418): Homolog of NCBI NO: 15242720 NR Description: putative protein; protein id: At5g03320.1
  misc_feature (1)..(392): Homolog of NCBI NO: 30687780 NR Description: protein kinase, putative [Arabidopsis thaliana]
  misc_feature (1)..(392): Homolog of NCBI NO: 28416693 NR Description: At2g39110 [Arabidopsis thaliana]
  misc_feature (1)..(392): Homolog of NCBI NO: 25287613 NR Description: probable protein kinase [imported] - Arabidopsis >gi|3928095|gb|AAC79621.1| putative protein kinase [Arabidopsis
  misc_feature (1)..(416): Homolog of NCBI NO: 7248457 NR Description: protein serine/threonine kinase [Lophopyrum >gi|13022177|gb|AAK11674.1|AF339747_1 protein kinase [Lophopyrum
  misc_feature (1)..(416): Homolog of NCBI NO: 37534774 NR Description: putative serine/threonine kinase [Oryza sativa
  misc_feature (67)..(378): Homolog of NCBI NO: 7488278 NR Description: probable protein kinase [imported] - Arabidopsis >gi|3461836|gb|AAC33222.1| putative protein kinase [Arabidopsis >gi|20197438|gb|AAM15076.1| putative protein kinase [Arabidopsis
  misc_feature (125)..(378): Homolog of NCBI NO: 30684071 NR Description: protein kinase family [Arabidopsis thaliana]
  misc_feature (22)..(404): Homolog of NCBI NO: 15242204 NR Description: serine/threonine specific protein kinase -like; id: At5g15080.1, supported by cDNA: gi_17064887 [Arabidopsis
MKCFLFSGGDKRGEQKTPISVSLTSIFSDREINRSGSEFNSRDVSGTSTESSMGRKNSYPPVSTRASNLREFSITDLKSATKNFSRSVMIGEGGFGCVFRGTVRNLEDSSVKIEVAVKQLGKRGLQGHKEWVTEVNFLGIVEHTNLVKLLGYCAEDDERGIQRLLVYEYMPNRSVEFHLSPRSLTVLTWDLRLRIAQDAARGLTYLHEEMEFQIIFRDFKSSNILLDEDWKAKLSDFGLARLGPSEGLTHVSTDVVGTMGYAAPEYIQTGRLTSKSDVWGYGVFLYELITGRRPVDRNRPKGEQKLLEWVRPYLSDTRKFKLILDPRLEGKYPIKSVQKLAVVANRCLVRNSKARPKMSEVLEMVNKIVEASSGNGSPQLVPLNSVKASRDARGKNNGGGGEGGWFGKLWNPKTIRAC

SEQ ID NO: 89816 - protein, 366 aa, Arabidopsis thaliana
  peptide (1)..(366): Ceres Seq. ID no. 12720658
  misc_feature (1)..(366): Homolog of NCBI NO: 15232764 NR Description: putative protein kinase; protein id: At3g09830.1, by cDNA: gi_20268726 [Arabidopsis thaliana] putative protein kinase [Arabidopsis thaliana]
  misc_feature (1)..(366): Homolog of NCBI NO: 15242720 NR Description: putative protein; protein id: At5g03320.1
  misc_feature (1)..(340): Homolog of NCBI NO: 30687780 NR Description: protein kinase, putative [Arabidopsis thaliana]
  misc_feature (1)..(340): Homolog of NCBI NO: 28416693 NR Description: At2g39110 [Arabidopsis thaliana]
  misc_feature (1)..(340): Homolog of NCBI NO: 25287613 NR Description: probable protein kinase [imported] - Arabidopsis >gi|3928095|gb|AAC79621.1| putative protein kinase [Arabidopsis
  misc_feature (1)..(364): Homolog of NCBI NO: 7248457 NR Description: protein serine/threonine kinase [Lophopyrum >gi|13022177|gb|AAK11674.1|AF339747_1 protein kinase [Lophopyrum
  misc_feature (1)..(364): Homolog of NCBI NO: 37534774 NR Description: putative serine/threonine kinase [Oryza sativa
  misc_feature (15)..(326): Homolog of NCBI NO: 7488278 NR Description: probable protein kinase [imported] - Arabidopsis >gi|3461836|gb|AAC33222.1| putative protein kinase [Arabidopsis >gi|20197438|gb|AAM15076.1| putative protein kinase [Arabidopsis
  misc_feature (73)..(326): Homolog of NCBI NO: 30684071 NR Description: protein kinase family [Arabidopsis thaliana]
  misc_feature (1)..(352): Homolog of NCBI NO: 15242204 NR Description: serine/threonine specific protein kinase -like; id: At5g15080.1, supported by cDNA: gi_17064887 [Arabidopsis
MGRKNSYPPVSTRASNLREFSITDLKSATKNFSRSVMIGEGGFGCVFRGTVRNLEDSSVKIEVAVKQLGKRGLQGHKEWVTEVNFLGIVEHTNLVKLLGYCAEDDERGIQRLLVYEYMPNRSVEFHLSPRSLTVLTWDLRLRIAQDAARGLTYLHEEMEFQIIFRDFKSSNILLDEDWKAKLSDFGLARLGPSEGLTHVSTDVVGTMGYAAPEYIQTGRLTSKSDVWGYGVFLYELITGRRPVDRNRPKGEQKLLEWVRPYLSDTRKFKLILDPRLEGKYPIKSVQKLAVVANRCLVRNSKARPKMSEVLEMVNKIVEASSGNGSPQLVPLNSVKASRDARGKNNGGGGEGGWFGKLWNPKTIRAC

SEQ ID NO: 89817 - protein, 330 aa, Arabidopsis thaliana
  peptide (1)..(330): Ceres Seq. ID no. 12720659
  misc_feature (1)..(330): Homolog of NCBI NO: 15232764 NR Description: putative protein kinase; protein id: At3g09830.1, by cDNA: gi_20268726 [Arabidopsis thaliana] putative protein kinase [Arabidopsis thaliana]
  misc_feature (1)..(330): Homolog of NCBI NO: 15242720 NR Description: putative protein; protein id: At5g03320.1
  misc_feature (1)..(304): Homolog of NCBI NO: 30687780 NR Description: protein kinase, putative [Arabidopsis thaliana]
  misc_feature (1)..(304): Homolog of NCBI NO: 28416693 NR Description: At2g39110 [Arabidopsis thaliana]
  misc_feature (1)..(304): Homolog of NCBI NO: 25287613 NR Description: probable protein kinase [imported] - Arabidopsis >gi|3928095|gb|AAC79621.1| putative protein kinase [Arabidopsis
  misc_feature (1)..(328): Homolog of NCBI NO: 7248457 NR Description: protein serine/threonine kinase [Lophopyrum >gi|13022177|gb|AAK11674.1|AF339747_1 protein kinase [Lophopyrum
  misc_feature (1)..(328): Homolog of NCBI NO: 37534774 NR Description: putative serine/threonine kinase [Oryza sativa
  misc_feature (1)..(290): Homolog of NCBI NO: 7488278 NR Description: probable protein kinase [imported] - Arabidopsis >gi|3461836|gb|AAC33222.1| putative protein kinase [Arabidopsis >gi|20197438|gb|AAM15076.1| putative protein kinase [Arabidopsis
  misc_feature (37)..(290): Homolog of NCBI NO: 30684071 NR Description: protein kinase family [Arabidopsis thaliana]
  misc_feature (1)..(316): Homolog of NCBI NO: 15242204 NR Description: serine/threonine specific protein kinase -like; id: At5g15080.1, supported by cDNA: gi_17064887 [Arabidopsis
MIGEGGFGCVFRGTVRNLEDSSVKIEVAVKQLGKRGLQGHKEWVTEVNFLGIVEHTNLVKLLGYCAEDDERGIQRLLVYEYMPNRSVEFHLSPRSLTVLTWDLRLRIAQDAARGLTYLHEEMEFQIIFRDFKSSNILLDEDWKAKLSDFGLARLGPSEGLTHVSTDVVGTMGYAAPEYIQTGRLTSKSDVWGYGVFLYELITGRRPVDRNRPKGEQKLLEWVRPYLSDTRKFKLILDPRLEGKYPIKSVQKLAVVANRCLVRNSKARPKMSEVLEMVNKIVEASSGNGSPQLVPLNSVKASRDARGKNNGGGGEGGWFGKLWNPKTIRAC

SEQ ID NO: 89818 - DNA, 618 bp, Arabidopsis thaliana
  misc_feature (1)..(618): Ceres Seq. ID no. 12720660
  misc_feature: MA Experiment ID: 20000306 Result: Up-regulated in Transcription
  misc_feature: MA Experiment 20000306 PARAMETER Experiment Name: At_Germinating_Seeds_Sub_P Parameter: Age (hr) Value: 6 vs. 0
  misc_feature: MA Experiment 20000306 PARAMETER Experiment Name: At_Germinating_Seeds_Sub_P Parameter: Organism Value: A. thaliana
  misc_feature: MA Experiment 20000306 PARAMETER Experiment Name: At_Germinating_Seeds_Sub_P Parameter: Plant Line Value: WS
  misc_feature: MA Experiment 20000306 PARAMETER Experiment Name: At_Germinating_Seeds_Sub_P Parameter: Tissue Value: Germinating Seeds
  misc_feature: MA Experiment ID: 20000307 Result: Up-regulated in Transcription
  misc_feature: MA Experiment 20000307 PARAMETER Experiment Name: At_Germinating_Seeds_Sub_P Parameter: Age (hr) Value: 24 vs. 0
  misc_feature: MA Experiment 20000307 PARAMETER Experiment Name: At_Germinating_Seeds_Sub_P Parameter: Organism Value: A. thaliana
  misc_feature: MA Experiment 20000307 PARAMETER Experiment Name: At_Germinating_Seeds_Sub_P Parameter: Plant Line Value: WS
  misc_feature: MA Experiment 20000307 PARAMETER Experiment Name: At_Germinating_Seeds_Sub_P Parameter: Tissue Value: Germinating Seeds
  misc_feature: MA Experiment ID: 20000315 Result: Down-regulated in Transcription
  misc_feature: MA Experiment 20000315 PARAMETER Experiment Name: At_14day_Shoots-Roots_Sub_P Parameter: Age (day) Value: 14
  misc_feature: MA Experiment 20000315 PARAMETER Experiment Name: At_14day_Shoots-Roots_Sub_P Parameter: Organism Value: A. thaliana
  misc_feature: MA Experiment 20000315 PARAMETER Experiment Name: At_14day_Shoots-Roots_Sub_P Parameter: Plant Line Value: WS
  misc_feature: MA Experiment 20000315 PARAMETER Experiment Name: At_14day_Shoots-Roots_Sub_P Parameter: Tissue Value: Shoots vs. Whole Plant
  misc_feature: MA Experiment ID: 20000328 Result: Down-regulated in Transcription
  misc_feature: MA Experiment 20000328 PARAMETER Experiment Name: At_42deg_Heat_Sub_P Parameter: Age (day) Value: 14
  misc_feature: MA Experiment 20000328 PARAMETER Experiment Name: At_42deg_Heat_Sub_P Parameter: Organism Value: A. thaliana
  misc_feature: MA Experiment 20000328 PARAMETER Experiment Name: At_42deg_Heat_Sub_P Parameter: Plant Line Value: WS
  misc_feature: MA Experiment 20000328 PARAMETER Experiment Name: At_42deg_Heat_Sub_P Parameter: Temperature (deg C) Value: 42 vs. 22
  misc_feature: MA Experiment 20000328 PARAMETER Experiment Name: At_42deg_Heat_Sub_P Parameter: Timepoint (hr) Value: 6
  misc_feature: MA Experiment 20000328 PARAMETER Experiment Name: At_42deg_Heat_Sub_P Parameter: Tissue Value: Aerial
  misc_feature: MA Experiment ID: 20000352 Result: Up-regulated in Transcription
  misc_feature: MA Experiment 20000352 PARAMETER Experiment Name: At_Drought_Sub_P Parameter: Age (day) Value: 7
  misc_feature: MA Experiment 20000352 PARAMETER Experiment Name: At_Drought_Sub_P Parameter: Organism Value: A. thaliana
  misc_feature: MA Experiment 20000352 PARAMETER Experiment Name: At_Drought_Sub_P Parameter: Plant Line Value: WS
  misc_feature: MA Experiment 20000352 PARAMETER Experiment Name: At_Drought_Sub_P Parameter: Timepoint (hr) Value: 6
  misc_feature: MA Experiment 20000352 PARAMETER Experiment Name: At_Drought_Sub_P Parameter: Tissue Value: Whole Plant
  misc_feature: MA Experiment 20000352 PARAMETER Experiment Name: At_Drought_Sub_P Parameter: Treatment Value: Drought vs. No Drought
  misc_feature: MA Experiment ID: 20000355 Result: Up-regulated in Transcription
  misc_feature: MA Experiment 20000355 PARAMETER Experiment Name: At_Siliques_Sub_P Parameter: Age (day) Value: 21
  misc_feature: MA Experiment 20000355 PARAMETER Experiment Name: At_Siliques_Sub_P Parameter: Organism Value: A. thaliana
  misc_feature: MA Experiment 20000355 PARAMETER Experiment Name: At_Siliques_Sub_P Parameter: Plant Line Value: WS
  misc_feature: MA Experiment 20000355 PARAMETER Experiment Name: At_Siliques_Sub_P Parameter: Tissue Value: Less Than 5mm Siliques vs. Whole Plant
  misc_feature: MA Experiment ID: 20000440 Result: Up-regulated in Transcription
  misc_feature: MA Experiment 20000440 PARAMETER Experiment Name: At_Closed-Flower__Sub_P Parameter: Tissue Value: Closed Flower vs. Whole Plant
atgggatcttcttctgggcaaagtgggtatgatctatctttcaagatcttgttgattggagattctggtgttggtaaaagcagcttgcttctcagcttcatttccagctctgtcgaagatcttgctcccaccattggtgttgactttaagatcaaacagatgaaagtaagagggaaaaggctgaaacttacaatctgggacacagctggacaagaaaagttcagaacattgacaagttcttatttcagaggctcccaaggaatcattctcgtttatgatgtcacgaaaagagagacatttttgaacttggcagatatttgggctaaagagattgagctatattcgactaaccatgactgcattaagatgctcgttggcaacaaagttgatagagaatcagaaaggaaggttagccgggaagaaggaatggctctagcgaaagacctcaattgtttgtttcatgaatgtagcgcaagaacccgagaaaacgtgaacggatgcttcgaagagctagctttgaagataatggaggtacctagtcttttggaagaaggatcaagctctgtgaagagaaaaccggattaccgagctcatcaaggccggtgttgcagctcgtga

SEQ ID NO: 89819 - protein, 205 aa, Arabidopsis thaliana
  peptide (1)..(205): Ceres Seq. ID no. 12720661
  misc_feature (15)..(177): Pfam Name: Ras family Pfam Description: Ras family
  misc_feature (1)..(205): Homolog of NCBI NO: 15232785 NR Description: GTP-binding protein, putative; protein id:
  misc_feature (1)..(204): Homolog of NCBI NO: 18414255 NR Description: putative protein; protein id: At5g03530.1,
  misc_feature (1)..(204): Homolog of NCBI NO: 1370172 NR Description: RAB1X [Lotus japonicus]
  misc_feature (3)..(203): Homolog of NCBI NO: 15451614 NR Description: Putative GTP-binding protein [Oryza sativa]
  misc_feature (1)..(191): Homolog of NCBI NO: 15218575 NR Description: GTP-binding protein(RAB1Y), putative; protein id: supported by cDNA: 2898., supported by cDNA: gi_17104730, by cDNA: gi_2231311 [Arabidopsis thaliana]
  misc_feature (2)..(203): Homolog of NCBI NO: 37534998 NR Description: putative GTP-binding protein [Oryza sativa
  misc_feature (69)..(191): Homolog of NCBI NO: 25294118 NR Description: protein F9C16.3 [imported] - Arabidopsis thaliana
  misc_feature (1)..(68): Homolog of NCBI NO: 25294118 NR Description: protein F9C16.3 [imported] - Arabidopsis thaliana
  misc_feature (3)..(203): Homolog of NCBI NO: 1370174 NR Description: RAB1Y [Lotus japonicus]
  misc_feature (13)..(203): Homolog of NCBI NO: 27687387 NR Description: similar to RAB18, member RAS oncogene family [Mus
MGSSSGQSGYDLSFKILLIGDSGVGKSSLLLSFISSSVEDLAPTIGVDFKIKQMKVRGKRLKLTIWDTAGQEKFRTLTSSYFRGSQGIILVYDVTKRETFLNLADIWAKEIELYSTNHDCIKMLVGNKVDRESERKVSREEGMALAKDLNCLFHECSARTRENVNGCFEELALKIMEVPSLLEEGSSSVKRKPDYRAHQGRCCSS

SEQ ID NO: 89820 - protein, 152 aa, Arabidopsis thaliana
  peptide (1)..(152): Ceres Seq. ID no. 12720662
  misc_feature (1)..(124): Pfam Name: Ras family Pfam Description: Ras family
  misc_feature (1)..(152): Homolog of NCBI NO: 15232785 NR Description: GTP-binding protein, putative; protein id:
  misc_feature (1)..(151): Homolog of NCBI NO: 18414255 NR Description: putative protein; protein id: At5g03530.1,
  misc_feature (1)..(151): Homolog of NCBI NO: 1370172 NR Description: RAB1X [Lotus japonicus]
  misc_feature (1)..(150): Homolog of NCBI NO: 15451614 NR Description: Putative GTP-binding protein [Oryza sativa]
  misc_feature (1)..(138): Homolog of NCBI NO: 15218575 NR Description: GTP-binding protein(RAB1Y), putative; protein id: supported by cDNA: 2898., supported by cDNA: gi_17104730, by cDNA: gi_2231311 [Arabidopsis thaliana]
  misc_feature (1)..(150): Homolog of NCBI NO: 37534998 NR Description: putative GTP-binding protein [Oryza sativa
  misc_feature (16)..(138): Homolog of NCBI NO: 25294118 NR Description: protein F9C16.3 [imported] - Arabidopsis thaliana
  misc_feature (1)..(15): Homolog of NCBI NO: 25294118 NR Description: protein F9C16.3 [imported] - Arabidopsis thaliana
  misc_feature (1)..(150): Homolog of NCBI NO: 1370174 NR Description: RAB1Y [Lotus japonicus]
  misc_feature (1)..(150): Homolog of NCBI NO: 27687387 NR Description: similar to RAB18, member RAS oncogene family [Mus
MKVRGKRLKLTIWDTAGQEKFRTLTSSYFRGSQGIILVYDVTKRETFLNLADIWAKEIELYSTNHDCIKMLVGNKVDRESERKVSREEGMALAKDLNCLFHECSARTRENVNGCFEELALKIMEVPSLLEEGSSSVKRKPDYRAHQGRCCSS

SEQ ID NO: 89821 - DNA, 1657 bp, Arabidopsis thaliana
  misc_feature (1)..(1657): Ceres Seq. ID no. 12720690
  misc_feature: MA Experiment ID: 20000173 Result: Up-regulated in Transcription
  misc_feature: MA Experiment 20000173 PARAMETER Experiment Name: At_42deg_Heat_P Parameter: Age (day) Value: 14
  misc_feature: MA Experiment 20000173 PARAMETER Experiment Name: At_42deg_Heat_P Parameter: Organism Value: A. thaliana
  misc_feature: MA Experiment 20000173 PARAMETER Experiment Name: At_42deg_Heat_P Parameter: Plant Line Value: WS
  misc_feature: MA Experiment 20000173 PARAMETER Experiment Name: At_42deg_Heat_P Parameter: Temperature (deg C) Value: 42 vs. 22
  misc_feature: MA Experiment 20000173 PARAMETER Experiment Name: At_42deg_Heat_P Parameter: Timepoint (hr) Value: 6
  misc_feature: MA Experiment 20000173 PARAMETER Experiment Name: At_42deg_Heat_P Parameter: Tissue Value: Aerial
  misc_feature: MA Experiment ID: 20000179 Result: Up-regulated in Transcription
  misc_feature: MA Experiment 20000179 PARAMETER Experiment Name: At_Germinating_Seeds_P Parameter: Age (hr) Value: 6 vs. 0
  misc_feature: MA Experiment 20000179 PARAMETER Experiment Name: At_Germinating_Seeds_P Parameter: Tissue Value: Germinating Seeds
  misc_feature: MA Experiment ID: 20000182 Result: Down-regulated in Transcription
  misc_feature: MA Experiment 20000182 PARAMETER Experiment Name: At_2mM_SA_P Parameter: Age (day) Value: 14
  misc_feature: MA Experiment 20000182 PARAMETER Experiment Name: At_2mM_SA_P Parameter: Organism Value: A. thaliana
  misc_feature: MA Experiment 20000182 PARAMETER Experiment Name: At_2mM_SA_P Parameter: Plant Line Value: WS
  misc_feature: MA Experiment 20000182 PARAMETER Experiment Name: At_2mM_SA_P Parameter: Timepoint (hr) Value: 6
  misc_feature: MA Experiment 20000182 PARAMETER Experiment Name: At_2mM_SA_P Parameter: Tissue Value: Aerial
  misc_feature: MA Experiment 20000182 PARAMETER Experiment Name: At_2mM_SA_P Parameter: Treatment Value: 2mM SA vs. No Treatment
  misc_feature: MA Experiment ID: 20000264 Result: Up-regulated in Transcription
  misc_feature: MA Experiment 20000264 PARAMETER Experiment Name: At_Open_Flower_P Parameter: Age (day) Value: 21
  misc_feature: MA Experiment 20000264 PARAMETER Experiment Name: At_Open_Flower_P Parameter: Plant Line Value: WS
  misc_feature: MA Experiment 20000264 PARAMETER Experiment Name: At_Open_Flower_P Parameter: Tissue Value: Open Flower vs. Whole Plant
  misc_feature: MA Experiment ID: 20000265 Result: Up-regulated in Transcription
  misc_feature: MA Experiment 20000265 PARAMETER Experiment Name: At_Open_Flower_P Parameter: Age (day) Value: 21
  misc_feature: MA Experiment 20000265 PARAMETER Experiment Name: At_Open_Flower_P Parameter: Plant Line Value: WS
  misc_feature: MA Experiment 20000265 PARAMETER Experiment Name: At_Open_Flower_P Parameter: Tissue Value: Closed Flower vs. Whole Plant
  misc_feature: MA Experiment ID: 20000286 Result: Up-regulated in Transcription
  misc_feature: MA Experiment 20000286 PARAMETER Experiment Name: At_Open_Flower_P Parameter: Age (day) Value: 21
  misc_feature: MA Experiment 20000286 PARAMETER Experiment Name: At_Open_Flower_P Parameter: Plant Line Value: WS
  misc_feature: MA Experiment 20000286 PARAMETER Experiment Name: At_Open_Flower_P Parameter: Tissue Value: Half Open vs. Whole Plant
  misc_feature: MA Experiment ID: 20000437 Result: Up-regulated in Transcription
  misc_feature: MA Experiment 20000437 PARAMETER Experiment Name: At_Drought_P Parameter: Age (day) Value: 8
  misc_feature: MA Experiment 20000437 PARAMETER Experiment Name: At_Drought_P Parameter: Organism Value: A. thaliana
  misc_feature: MA Experiment 20000437 PARAMETER Experiment Name: At_Drought_P Parameter: Plant Line Value: WS
  misc_feature: MA Experiment 20000437 PARAMETER Experiment Name: At_Drought_P Parameter: Timepoint (hr) Value: 24
  misc_feature: MA Experiment 20000437 PARAMETER Experiment Name: At_Drought_P Parameter: Tissue Value: Whole Plant
  misc_feature: MA Experiment 20000437 PARAMETER Experiment Name: At_Drought_P Parameter: Treatment Value: Drought vs. No Drought
  misc_feature: MA Experiment ID: 20000451 Result: Up-regulated in Transcription
  misc_feature: MA Experiment 20000451 PARAMETER Experiment Name: At_CS6879_Shoots-Roots_P Parameter: Age (day) Value: 14
  misc_feature: MA Experiment 20000451 PARAMETER Experiment Name: At_CS6879_Shoots-Roots_P Parameter: Organism Value: A. thaliana
  misc_feature: MA Experiment 20000451 PARAMETER Experiment Name: At_CS6879_Shoots-Roots_P Parameter: Plant Line Value: CS6879 vs. WS
  misc_feature: MA Experiment 20000451 PARAMETER Experiment Name: At_CS6879_Shoots-Roots_P Parameter: Tissue Value: Roots
  misc_feature: MA Experiment ID: 20000495 Result: Up-regulated in Transcription
  misc_feature: MA Experiment 20000495 PARAMETER Experiment Name: At_Guard_Cells_P Parameter: Harvest Date Value: 8/2/2002
  misc_feature: MA Experiment 20000495 PARAMETER Experiment Name: At_Guard_Cells_P Parameter: Organism Value: A. thaliana
  misc_feature: MA Experiment 20000495 PARAMETER Experiment Name: At_Guard_Cells_P Parameter: Tissue Value: Guard Cells vs. Leaves
  misc_feature: MA Experiment ID: 20000794 Result: Up-regulated in Transcription
  misc_feature: MA Experiment 20000794 PARAMETER Experiment Name: At_Petals_P Parameter: Age (day) Value: 23-25 days
  misc_feature: MA Experiment 20000794 PARAMETER Experiment Name: At_Petals_P Parameter: Plant Line Value: WS
  misc_feature: MA Experiment 20000794 PARAMETER Experiment Name: At_Petals_P Parameter: Tissue Value: Petals vs. Whole plant
  misc_feature: MA Experiment ID: 20001248 Result: Down-regulated in Transcription
  misc_feature: MA Experiment 20001248 PARAMETER Experiment Name: At_Far-red-induction_P Parameter: Age (day) Value: 7
  misc_feature: MA Experiment 20001248 PARAMETER Experiment Name: At_Far-red-induction_P Parameter: Light Value: Far-red vs. White
  misc_feature: MA Experiment 20001248 PARAMETER Experiment Name: At_Far-red-induction_P Parameter: Organism Value: A. thaliana
  misc_feature: MA Experiment 20001248 PARAMETER Experiment Name: At_Far-red-induction_P Parameter: Plant Line Value: Columbia
  misc_feature: MA Experiment 20001248 PARAMETER Experiment Name: At_Far-red-induction_P Parameter: Timepoint (hr) Value: 4
  misc_feature: MA Experiment 20001248 PARAMETER Experiment Name: At_Far-red-induction_P Parameter: Tissue Value: Whole Plant
  misc_feature: MA Experiment ID: 20001459 Result: Down-regulated in Transcription
  misc_feature: MA Experiment 20001459 PARAMETER Experiment Name: At_50mM_NH4NO3_L-to-H_P Parameter: Age (day) Value: Undefined
  misc_feature: MA Experiment 20001459 PARAMETER Experiment Name: At_50mM_NH4NO3_L-to-H_P Parameter: Organism Value: Undefined
  misc_feature: MA Experiment 20001459 PARAMETER Experiment Name: At_50mM_NH4NO3_L-to-H_P Parameter: Plant Line Value: Undefined
  misc_feature: MA Experiment 20001459 PARAMETER Experiment Name: At_50mM_NH4NO3_L-to-H_P Parameter: Timepoint (hr) Value: 4
  misc_feature: MA Experiment 20001459 PARAMETER Experiment Name: At_50mM_NH4NO3_L-to-H_P Parameter: Tissue Value: Siliques
  misc_feature: MA Experiment 20001459 PARAMETER Experiment Name: At_50mM_NH4NO3_L-to-H_P Parameter: Treatment Value: 50mM NH4NO3 vs. 100mM Manitol
  misc_feature: MA Experiment ID: 20001906 Result: Up-regulated in Transcription
  misc_feature: MA Experiment 20001906 PARAMETER Experiment Name: At_Drought_Reproduction_P Parameter: Age (day) Value: 35
  misc_feature: MA Experiment 20001906 PARAMETER Experiment Name: At_Drought_Reproduction_P Parameter: Organism Value: A. thaliana
  misc_feature: MA Experiment 20001906 PARAMETER Experiment Name: At_Drought_Reproduction_P Parameter: Plant Line Value: WS
  misc_feature: MA Experiment 20001906 PARAMETER Experiment Name: At_Drought_Reproduction_P Parameter: Timepoint (day) Value: 5
  misc_feature: MA Experiment 20001906 PARAMETER Experiment Name: At_Drought_Reproduction_P Parameter: Tissue Value: Siliques
  misc_feature: MA Experiment 20001906 PARAMETER Experiment Name: At_Drought_Reproduction_P Parameter: Treatment Value: Drought vs. No Drought
  misc_feature: MA Experiment ID: 20001907 Result: Up-regulated in Transcription
  misc_feature: MA Experiment 20001907 PARAMETER Experiment Name: At_Drought_Reproduction_P Parameter: Age (day) Value: 37
  misc_feature: MA Experiment 20001907 PARAMETER Experiment Name: At_Drought_Reproduction_P Parameter: Organism Value: A. thaliana
  misc_feature: MA Experiment 20001907 PARAMETER Experiment Name: At_Drought_Reproduction_P Parameter: Plant Line Value: WS
  misc_feature: MA Experiment 20001907 PARAMETER Experiment Name: At_Drought_Reproduction_P Parameter: Timepoint (day) Value: 7
  misc_feature: MA Experiment 20001907 PARAMETER Experiment Name: At_Drought_Reproduction_P Parameter: Tissue Value: Siliques
  misc_feature: MA Experiment 20001907 PARAMETER Experiment Name: At_Drought_Reproduction_P Parameter: Treatment Value: Drought vs. No Drought
  misc_feature: MA Experiment ID: 20001908 Result: Up-regulated in Transcription
  misc_feature: MA Experiment 20001908 PARAMETER Experiment Name: At_Drought_Reproduction_P Parameter: Age (day) Value: 40
  misc_feature: MA Experiment 20001908 PARAMETER Experiment Name: At_Drought_Reproduction_P Parameter: Organism Value: A. thaliana
  misc_feature: MA Experiment 20001908 PARAMETER Experiment Name: At_Drought_Reproduction_P Parameter: Plant Line Value: WS
  misc_feature: MA Experiment 20001908 PARAMETER Experiment Name: At_Drought_Reproduction_P Parameter: Timepoint (day) Value: 10
  misc_feature: MA Experiment 20001908 PARAMETER Experiment Name: At_Drought_Reproduction_P Parameter: Tissue Value: Siliques
  misc_feature: MA Experiment 20001908 PARAMETER Experiment Name: At_Drought_Reproduction_P Parameter: Treatment Value: Drought vs. No Drought
  misc_feature: MA Experiment ID: 20001911 Result: Up-regulated in Transcription
  misc_feature: MA Experiment 20001911 PARAMETER Experiment Name: At_Drought_Reproduction_P Parameter: Age (day) Value: 40
  misc_feature: MA Experiment 20001911 PARAMETER Experiment Name: At_Drought_Reproduction_P Parameter: Organism Value: A. thaliana
  misc_feature: MA Experiment 20001911 PARAMETER Experiment Name: At_Drought_Reproduction_P Parameter: Plant Line Value: WS
  misc_feature: MA Experiment 20001911 PARAMETER Experiment Name: At_Drought_Reproduction_P Parameter: Timepoint (day) Value: 10
  misc_feature: MA Experiment 20001911 PARAMETER Experiment Name: At_Drought_Reproduction_P Parameter: Tissue Value: Flowers
  misc_feature: MA Experiment 20001911 PARAMETER Experiment Name: At_Drought_Reproduction_P Parameter: Treatment Value: Drought vs. No Drought
tcaccaaaaaacatcttcaacacaaactaaacaaaacttaaaagtaagaactcgaagatactgtacttacaaattcctgtcggaattctcttacttcgtcggaaattcgaaatctgggtttgtgggattccgtgttgatttatctaccattgtttccaagtttcaattttttatccaatttagggttcagtgtttgatggaatcgaatgtgatgttctctgggtttagtccaagaatgttgagcttagaaatgccgcaaaatccaccaaatccccaaaattcaattcagttccagcatcctcatccttacaccacctccggcgaccaacaaactcagccgccgataaaatccttatacccatacgcctcaaaacccaaacaaatgtcacccattagcggtggcggttgcgacgacgaggatcgcgggtcgggttccggatccggttgcaaccctgaagacagcgcgggaactgacgggaagaggaaattgtcacaatggcatagaatgaaatggacggatacaatggttaggcttttgatcatggcggttttctacatcggtgacgaagctggtttaaacgatccagtcgacgccaagaaaaagaccggcggtggcggtggcggcggaggaggaggagggatgttgcagaagaaagggaagtggaaatcagtgtcgagagctatggtggagaaaggtttctctgtgtcaccacaacaatgtgaagacaagttcaatgatttgaacaagaggtacaagagagttaacgatattcttggtaaaggaatcgcttgtcgtgtcgttgagaatcaaggattgttagagagtatggatcatttgactccgaagttgaaagatgaagtcaagaagttgcttaattctaagcatcttttctttagagagatgtgtgcttatcataatagttgtggtcatcttggtggtcatgaccaacaaccaccgcaacagaatcctatttcgattccgattccgagtcagcagcagaactgttttcacgcggcggaagcagggaaaatggcgagaattgcggagagggtggaggtggaggaggaagtagagtctgatatggcggaggattcggagtcagagatggaggaatcagaggaagaagagacgaggaagaagcggaggatatcgacggcggtgaagaggttgagggaagaagcggcaagtgtagtggaagatgttgggaagagtgtgtgggagaagaaagagtggataaggagaaagatgttggagattgaggagaagaagattgggtatgagtgggaaggagtggagatggagaagcagagagtgaagtggatgagatataggagcaagaaagagagagagatggagaaggctaagcttgacaatcagagacggaggcttgagacggagaggatgattctcatgttacggcggagtgaaattgagttgaatgagttacagtcttcgggtacacgggttgacccgagttccgctaaggggtgatgctgattagtatttaggattagagattttttacaactttgtagtttctaatgttaggattctcacgttttagtgacattaggcagtaaattaaatcttaaaagtatgtactattgtagacaaaaggtctttaatcagcaaattgattaagcatgtctacttttg

SEQ ID NO: 89822 - protein, 496 aa, Arabidopsis thaliana
  peptide (1)..(496): Ceres Seq. ID no. 12720691
  misc_feature (339)..(495): Pfam Name: Caldesmon Pfam Description: Caldesmon
  misc_feature (66)..(496): Homolog of NCBI NO: 30681119 NR Description: expressed protein [Arabidopsis thaliana]
  misc_feature (79)..(496): Homolog of NCBI NO: 6143872 NR Description: unknown protein [Arabidopsis thaliana]
  misc_feature (76)..(375): Homolog of NCBI NO: 34894646 NR Description: P0028G04.23 [Oryza sativa (japonica
  misc_feature (385)..(490): Homolog of NCBI NO: 34894646 NR Description: P0028G04.23 [Oryza sativa (japonica
HQKTSSTQTKQNLKVRTRRYCTYKFLSEFSYFVGNSKSGFVGFRVDLSTIVSKFQFFIQFRVQCLMESNVMFSGFSPRMLSLEMPQNPPNPQNSIQFQHPHPYTTSGDQQTQPPIKSLYPYASKPKQMSPISGGGCDDEDRGSGSGSGCNPEDSAGTDGKRKLSQWHRMKWTDTMVRLLIMAVFYIGDEAGLNDPVDAKKKTGGGGGGGGGGGMLQKKGKWKSVSRAMVEKGFSVSPQQCEDKFNDLNKRYKRVNDILGKGIACRVVENQGLLESMDHLTPKLKDEVKKLLNSKHLFFREMCAYHNSCGHLGGHDQQPPQQNPISIPIPSQQQNCFHAAEAGKMARIAERVEVEEEVESDMAEDSESEMEESEEEETRKKRRISTAVKRLREEAASVVEDVGKSVWEKKEWIRRKMLEIEEKKIGYEWEGVEMEKQRVKWMRYRSKKEREMEKAKLDNQRRRLETERMILMLRRSEIELNELQSSGTRVDPSSAKG

SEQ ID NO: 89823 - protein, 431 aa, Arabidopsis thaliana
  peptide (1)..(431): Ceres Seq. ID no. 12720692
  misc_feature (274)..(430): Pfam Name: Caldesmon Pfam Description: Caldesmon
  misc_feature (1)..(431): Homolog of NCBI NO: 30681119 NR Description: expressed protein [Arabidopsis thaliana]
  misc_feature (14)..(431): Homolog of NCBI NO: 6143872 NR Description: unknown protein [Arabidopsis thaliana]
  misc_feature (11)..(310): Homolog of NCBI NO: 34894646 NR Description: P0028G04.23 [Oryza sativa (japonica
  misc_feature (320)..(425): Homolog of NCBI NO: 34894646 NR Description: P0028G04.23 [Oryza sativa (japonica
MESNVMFSGFSPRMLSLEMPQNPPNPQNSIQFQHPHPYTTSGDQQTQPPIKSLYPYASKPKQMSPISGGGCDDEDRGSGSGSGCNPEDSAGTDGKRKLSQWHRMKWTDTMVRLLIMAVFYIGDEAGLNDPVDAKKKTGGGGGGGGGGGMLQKKGKWKSVSRAMVEKGFSVSPQQCEDKFNDLNKRYKRVNDILGKGIACRVVENQGLLESMDHLTPKLKDEVKKLLNSKHLFFREMCAYHNSCGHLGGHDQQPPQQNPISIPIPSQQQNCFHAAEAGKMARIAERVEVEEEVESDMAEDSESEMEESEEEETRKKRRISTAVKRLREEAASVVEDVGKSVWEKKEWIRRKMLEIEEKKIGYEWEGVEMEKQRVKWMRYRSKKEREMEKAKLDNQRRRLETERMILMLRRSEIELNELQSSGTRVDPSSAKG

SEQ ID NO: 89824 - protein, 426 aa, Arabidopsis thaliana
  peptide (1)..(426): Ceres Seq. ID no. 12720693
  misc_feature (269)..(425): Pfam Name: Caldesmon Pfam Description: Caldesmon
  misc_feature (1)..(426): Homolog of NCBI NO: 30681119 NR Description: expressed protein [Arabidopsis thaliana]
  misc_feature (9)..(426): Homolog of NCBI NO: 6143872 NR Description: unknown protein [Arabidopsis thaliana]
  misc_feature (6)..(305): Homolog of NCBI NO: 34894646 NR Description: P0028G04.23 [Oryza sativa (japonica
  misc_feature (315)..(420): Homolog of NCBI NO: 34894646 NR Description: P0028G04.23 [Oryza sativa (japonica
MFSGFSPRMLSLEMPQNPPNPQNSIQFQHPHPYTTSGDQQTQPPIKSLYPYASKPKQMSPISGGGCDDEDRGSGSGSGCNPEDSAGTDGKRKLSQWHRMKWTDTMVRLLIMAVFYIGDEAGLNDPVDAKKKTGGGGGGGGGGGMLQKKGKWKSVSRAMVEKGFSVSPQQCEDKFNDLNKRYKRVNDILGKGIACRVVENQGLLESMDHLTPKLKDEVKKLLNSKHLFFREMCAYHNSCGHLGGHDQQPPQQNPISIPIPSQQQNCFHAAEAGKMARIAERVEVEEEVESDMAEDSESEMEESEEEETRKKRRISTAVKRLREEAASVVEDVGKSVWEKKEWIRRKMLEIEEKKIGYEWEGVEMEKQRVKWMRYRSKKEREMEKAKLDNQRRRLETERMILMLRRSEIELNELQSSGTRVDPSSAKG

SEQ ID NO: 89825 - DNA, 4047 bp, Arabidopsis thaliana
  misc_feature (1)..(4047): Ceres Seq. ID no. 12720713
  misc_feature: MA Experiment ID: 20000179 Result: Down-regulated in Transcription
  misc_feature: MA Experiment 20000179 PARAMETER Experiment Name: At_Germinating_Seeds_P Parameter: Age (hr) Value: 6 vs. 0
  misc_feature: MA Experiment 20000179 PARAMETER Experiment Name: At_Germinating_Seeds_P Parameter: Tissue Value: Germinating Seeds
  misc_feature: MA Experiment ID: 20000227 Result: Up-regulated in Transcription
  misc_feature: MA Experiment 20000227 PARAMETER Experiment Name: At_Root-Tips-vs-Tops_P Parameter: Tissue Value: Root Tips vs. Root Tops
  misc_feature: MA Experiment ID: 20000234 Result: Up-regulated in Transcription
  misc_feature: MA Experiment 20000234 PARAMETER Experiment Name: At_Siliques_P Parameter: Age (day) Value: 21
  misc_feature: MA Experiment 20000234 PARAMETER Experiment Name: At_Siliques_P Parameter: Organism Value: A. thaliana
  misc_feature: MA Experiment 20000234 PARAMETER Experiment Name: At_Siliques_P Parameter: Plant Line Value: WS
  misc_feature: MA Experiment 20000234 PARAMETER Experiment Name: At_Siliques_P Parameter: Tissue Value: Less Than 5mm Siliques vs. Whole Plant
  misc_feature: MA Experiment ID: 20000265 Result: Up-regulated in Transcription
  misc_feature: MA Experiment 20000265 PARAMETER Experiment Name: At_Open_Flower_P Parameter: Age (day) Value: 21
  misc_feature: MA Experiment 20000265 PARAMETER Experiment Name: At_Open_Flower_P Parameter: Plant Line Value: WS
  misc_feature: MA Experiment 20000265 PARAMETER Experiment Name: At_Open_Flower_P Parameter: Tissue Value: Closed Flower vs. Whole Plant
  misc_feature: MA Experiment ID: 20000286 Result: Up-regulated in Transcription
  misc_feature: MA Experiment 20000286 PARAMETER Experiment Name: At_Open_Flower_P Parameter: Age (day) Value: 21
  misc_feature: MA Experiment 20000286 PARAMETER Experiment Name: At_Open_Flower_P Parameter: Plant Line Value: WS
  misc_feature: MA Experiment 20000286 PARAMETER Experiment Name: At_Open_Flower_P Parameter: Tissue Value: Half Open vs. Whole Plant
  misc_feature: MA Experiment ID: 20000496 Result: Up-regulated in Transcription
  misc_feature: MA Experiment 20000496 PARAMETER Experiment Name: At_Guard_Cells_P Parameter: Harvest Date Value: 7/19/2002
  misc_feature: MA Experiment 20000496 PARAMETER Experiment Name: At_Guard_Cells_P Parameter: Organism Value: Canola
  misc_feature: MA Experiment 20000496 PARAMETER Experiment Name: At_Guard_Cells_P Parameter: Tissue Value: Guard Cells vs. Leaves
atggagagaatccatgtctcagtcagagcgcgaccgctttcgtcggaggacgcgaagacaagtccctggaagatctcttccgactcaattttcatgcccaatcactcttctctcgcttttgaatttgatcgaatttttagagaagattgtaaaactgtccaagtgtatgaggcgcggacgaaggagattgtttctgccgctgttcgtggattcaacggaaccgtatttgcttacgggcaaactaacagtggcaagacgcatacaatgcgaggctcacctattgaacctggagttattcctctcgctgtacatgatttgtttgacactatatatcaggatgcaagtagagagtttctgttgcgtatgtcgtacctggagatttataatgaagatattaacgatttgctggcccctgagcacagaaaactacagattcatgaaaatctagagaaaggaatatttgttgctggattacgagaagagattgtcgcttcccctcaacaagtccttgaaatgatggaatttggagaatctcatcggcatattggggagacaaatatgaatctttacagtagcagatctcacactatttttcgcatgattatagaaagtagacagaagatgcaagatgaaggtgttggaaattcctgtgatgcagttcgtgtttctgttctgaatttggtggatctagctggttcagaacgggctgcaaaaaccggtgcagagggtgttaggttgaaggagggctcacatataaacaaaagcttgatgacactcgggactgtcataaaaaaactgagtgaaggagtagaaactcaaggtggtcatgtcccgtaccgagacagcaagcttacaaggatcttgcagcctgccttaggtgggaatgccaacacagctattatatgcaatatcacacttgcaccgattcatgcagatgaaaccaagagcagtcttcagttcgctagccgagcactgcgtgtcactaactgtgcccatgtcaatgagattttgactgatgctgctctattaaagcgccagaagaaggagatagaggagctcagatccaaactaaagacttctcactctgaccattcagaagaagagattcttaacttgcgtaacaccttgttgaagtctgaattagagagagagcgaatagcacttgagttagaagaggagaagaaggcacaagctcagagggaaagagttttgcaggagcaagccaaaaaaatcaagaacttgagttcaatggttcttctttcgaatagagatgagaagcgtgagcaggatcactttaagaagggaaaaaggagggatacatggtgtattggtaagctttcacgagactccacatcagaggatcagtctaatgttttgtcaaggggatcctctcttgaatctgcaagatccgagcgtgagactggtccactacttccattttcagaactagtaaatgaacctttatataacattaacgaggaagatgaagatagtatcgagggaacccttgaagattctgtacttccagatccatgtgcattagtgaatgtgacaagcagaaagaaaccatcaattaagcagaaaaatcctgtagtggttgaaaacgaattagatagaattcaaagggaatatgaggctcttctcttgcaatatgaaaccgaggtgaaattgggtgaagatggtttatctggtgatgcaaaatgcaagcaatcagaagtcgttggcaacgtgcattgcgaagaacatgttgtaaacttaagagatccagaagctattcttctcatcaagcaactacaagagaagataaacatgctagaattggagaagtcttcaagcaaccgaaatcttgatgatcttgttatggtagctactgagcagaatatatgtgccagggaaaaatttgctgagattcaagaagagattcatgctgctagagaagaggcccaggttgctcgtgaacaacttgtgtctaaggagtctgaagttattgatgtgattaatgagaatttcaactcactggtcaacgtagcaaccgaaattgaagtcttagagtctgaatttcaaaaatataaagcatcagtagaaaccatatcatcagttatgaatgagggtctccaagattttgctttcttctctccgttgatacatgatttcacattgtttgtgcgccaaagttctgagcaacatgattcacttatcaacagctaccaaactgtccaatctagtctaaaaaaaaaagttcttgatgttgagaatgagaagcttcttttgcaagagcagtgtgctggtctgcagagccaaatagaagaactaaatcaggaagcccaaaagcatgaaacttccttaaagatgctctcagaacaccatgagtcggagaggtcagatctactctctcacatagaatgtcttgaaaaggatatagggagtctgtcatcctcttccttggccaaagagaaggagaacctaagaaaagattttgagaagacgaaaacaaagctaaaagacactgaatccaagctaaagaattccatgcaagataaaaccaagctagaggccgagaaagcatctgctgaaagagagttaaaacgcttgcatagccagaaggccctactcgagagagacatcagcaaacaggagtcctttgctggtaaaagacgcgactctcttcttgttgagagaagtgctaaccagtcgttgcaggaagaatttaaacagcttgaagtgcttgcttttgaaatggaaaccacaattgcttcactggaggaagagctggccgctgaacgtggagaaaaagaggaggcactctgtagaaatgacggtttaggctcagaaattacagatctgacagagaaactggagcactcaaatactaaactagaacatcttcaaaacgatgtcacggagcttaaaacgagacttgaagtctcatcttctgatcagcagcaactggaaaccaatgttaaacagttgcttgaagaaaaggaagagctagcaatgcatctggcgaactcacttttggaaatggaggaggagaaagcaatatggagctcgaaagaaaaagctttgacagaggctgtggaggaaaagatcagactatataaaaatatacaaattgagtcactatccaaagaaatgtcagaggaaaagaaggagctggaatcttgtcgacttgaatgcgttactcttgctgataggcttagatgttctgaggagaatgctaagcaggacaaagaaagcagcctggagaagtctttggagattgatagactgggtgatgaacttcgatcagctgatgctgtgagtaagcaatctcaagaggttctcaagtctgatatcgacatactaaagtccgaagttcaacatgcttgcaagatgtcggatacatttcagagagagatggattatgtcacaagtgagcgccagggtttgctagctcgcatagaggagttgagtaaggagcttgcttcatcaaatcgttggcaggatgcagctgcagaaaacaaggagaaggcaaagctaaaaatgagactcaggggtatgcaagcacgcttagatgcaatcagtctacggtacaagcagtctgtgcaagaatcagaacttatgaacaggaagttcaaagaggcatctgctaagctaaaggagaagttagcatcaaaagcactcgaagttctcgacctcaagaagcaactctctgcttcttcaagaacaattgatgaaccgagaaactcacttgagagttattgtgatgcggcagttgtggttgcgactgtggtggttgtggttgtcgagcaggagattccaaatcttaggtactcaagcaattcaatagaagttgtggagaaagctgccattaatatgggttcaaaggaagacaaggcagataatccagctttatcttcatatgatgatgccatggaagctctgtcgactcttatttctcgtcgaaaccgtggggatcgcacacctactaaaggaaatcgtgacaagcttgaacaagtcgtcacatatctcaaggtgatacagccatttacagtcaaacgctattaa

SEQ ID NO: 89826 - protein, 1348 aa, Arabidopsis thaliana
  peptide (1)..(1348): Ceres Seq. ID no. 12720714
  misc_feature (519)..(1266): Pfam Name: Myosin tail Pfam Description: Myosin tail
  misc_feature (36)..(434): Homolog of NCBI NO: 6056206 NR Description: putative kinesin-like centromere protein
  misc_feature (1)..(805): Homolog of NCBI NO: 18406379 NR Description: kinesin-related protein; protein id: At1g59540.1,
  misc_feature (1)..(495): Homolog of NCBI NO: 14475945 NR Description: kinesin motor protein (kin2), putative
  misc_feature (4)..(839): Homolog of NCBI NO: 25404863 NR Description: protein T30E16.9 [imported] - Arabidopsis >gi|8778739|gb|AAF79747.1|AC009317_6 T30E16.9 [Arabidopsis
  misc_feature (2)..(1246): Homolog of NCBI NO: 7512169 NR Description: kinesin-related protein - African clawed frog
  misc_feature (4)..(1282): Homolog of NCBI NO: 40789293 NR Description: cDNA sequence BC049989 [Mus musculus]
  misc_feature (4)..(1283): Homolog of NCBI NO: 4502781 NR Description: centromere protein E; Centromere autoantigen E centromere protein E (312kD); kinesin family member 10 [Homo
  misc_feature (1)..(1238): Homolog of NCBI NO: 28268805 NR Description: kinesin-related protein K4 [Dictyostelium
  misc_feature (4)..(1283): Homolog of NCBI NO: 382658 NR Description: CENP-E protein
  misc_feature (74)..(1241): Homolog of NCBI NO: 34860597 NR Description: similar to CENTROMERIC PROTEIN E (CENP-E PROTEIN)
MERIHVSVRARPLSSEDAKTSPWKISSDSIFMPNHSSLAFEFDRIFREDCKTVQVYEARTKEIVSAAVRGFNGTVFAYGQTNSGKTHTMRGSPIEPGVIPLAVHDLFDTIYQDASREFLLRMSYLEIYNEDINDLLAPEHRKLQIHENLEKGIFVAGLREEIVASPQQVLEMMEFGESHRHIGETNMNLYSSRSHTIFRMIIESRQKMQDEGVGNSCDAVRVSVLNLVDLAGSERAAKTGAEGVRLKEGSHINKSLMTLGTVIKKLSEGVETQGGHVPYRDSKLTRILQPALGGNANTAIICNITLAPIHADETKSSLQFASRALRVTNCAHVNEILTDAALLKRQKKEIEELRSKLKTSHSDHSEEEILNLRNTLLKSELERERIALELEEEKKAQAQRERVLQEQAKKIKNLSSMVLLSNRDEKREQDHFKKGKRRDTWCIGKLSRDSTSEDQSNVLSRGSSLESARSERETGPLLPFSELVNEPLYNINEEDEDSIEGTLEDSVLPDPCALVNVTSRKKPSIKQKNPVVVENELDRIQREYEALLLQYETEVKLGEDGLSGDAKCKQSEVVGNVHCEEHVVNLRDPEAILLIKQLQEKINMLELEKSSSNRNLDDLVMVATEQNICAREKFAEIQEEIHAAREEAQVAREQLVSKESEVIDVINENFNSLVNVATEIEVLESEFQKYKASVETISSVMNEGLQDFAFFSPLIHDFTLFVRQSSEQHDSLINSYQTVQSSLKKKVLDVENEKLLLQEQCAGLQSQIEELNQEAQKHETSLKMLSEHHESERSDLLSHIECLEKDIGSLSSSSLAKEKENLRKDFEKTKTKLKDTESKLKNSMQDKTKLEAEKASAERELKRLHSQKALLERDISKQESFAGKRRDSLLVERSANQSLQEEFKQLEVLAFEMETTIASLEEELAAERGEKEEALCRNDGLGSEITDLTEKLEHSNTKLEHLQNDVTELKTRLEVSSSDQQQLETNVKQLLEEKEELAMHLANSLLEMEEEKAIWSSKEKALTEAVEEKIRLYKNIQIESLSKEMSEEKKELESCRLECVTLADRLRCSEENAKQDKESSLEKSLEIDRLGDELRSADAVSKQSQEVLKSDIDILKSEVQHACKMSDTFQREMDYVTSERQGLLARIEELSKELASSNRWQDAAAENKEKAKLKMRLRGMQARLDAISLRYKQSVQESELMNRKFKEASAKLKEKLASKALEVLDLKKQLSASSRTIDEPRNSLESYCDAAVVVATVVVVVVEQEIPNLRYSSNSIEVVEKAAINMGSKEDKADNPALSSYDDAMEALSTLISRRNRGDRTPTKGNRDKLEQVVTYLKVIQPFTVKRY

SEQ ID NO: 89827 - protein, 1317 aa, Arabidopsis thaliana
  peptide (1)..(1317): Ceres Seq. ID no. 12720715
  misc_feature (488)..(1235): Pfam Name: Myosin tail Pfam Description: Myosin tail
  misc_feature (5)..(403): Homolog of NCBI NO: 6056206 NR Description: putative kinesin-like centromere protein
  misc_feature (1)..(774): Homolog of NCBI NO: 18406379 NR Description: kinesin-related protein; protein id: At1g59540.1,
  misc_feature (1)..(464): Homolog of NCBI NO: 14475945 NR Description: kinesin motor protein (kin2), putative
  misc_feature (1)..(808): Homolog of NCBI NO: 25404863 NR Description: protein T30E16.9 [imported] - Arabidopsis >gi|8778739|gb|AAF79747.1|AC009317_6 T30E16.9 [Arabidopsis
  misc_feature (1)..(1215): Homolog of NCBI NO: 7512169 NR Description: kinesin-related protein - African clawed frog
  misc_feature (1)..(1251): Homolog of NCBI NO: 40789293 NR Description: cDNA sequence BC049989 [Mus musculus]
  misc_feature (1)..(1252): Homolog of NCBI NO: 4502781 NR Description: centromere protein E; Centromere autoantigen E centromere protein E (312kD); kinesin family member 10 [Homo
  misc_feature (1)..(1207): Homolog of NCBI NO: 28268805 NR Description: kinesin-related protein K4 [Dictyostelium
  misc_feature (1)..(1252): Homolog of NCBI NO: 382658 NR Description: CENP-E protein
  misc_feature (43)..(1210): Homolog of NCBI NO: 34860597 NR Description: similar to CENTROMERIC PROTEIN E (CENP-E PROTEIN)
MPNHSSLAFEFDRIFREDCKTVQVYEARTKEIVSAAVRGFNGTVFAYGQTNSGKTHTMRGSPIEPGVIPLAVHDLFDTIYQDASREFLLRMSYLEIYNEDINDLLAPEHRKLQIHENLEKGIFVAGLREEIVASPQQVLEMMEFGESHRHIGETNMNLYSSRSHTIFRMIIESRQKMQDEGVGNSCDAVRVSVLNLVDLAGSERAAKTGAEGVRLKEGSHINKSLMTLGTVIKKLSEGVETQGGHVPYRDSKLTRILQPALGGNANTAIICNITLAPIHADETKSSLQFASRALRVTNCAHVNEILTDAALLKRQKKEIEELRSKLKTSHSDHSEEEILNLRNTLLKSELERERIALELEEEKKAQAQRERVLQEQAKKIKNLSSMVLLSNRDEKREQDHFKKGKRRDTWCIGKLSRDSTSEDQSNVLSRGSSLESARSERETGPLLPFSELVNEPLYNINEEDEDSIEGTLEDSVLPDPCALVNVTSRKKPSIKQKNPVVVENELDRIQREYEALLLQYETEVKLGEDGLSGDAKCKQSEVVGNVHCEEHVVNLRDPEAILLIKQLQEKINMLELEKSSSNRNLDDLVMVATEQNICAREKFAEIQEEIHAAREEAQVAREQLVSKESEVIDVINENFNSLVNVATEIEVLESEFQKYKASVETISSVMNEGLQDFAFFSPLIHDFTLFVRQSSEQHDSLINSYQTVQSSLKKKVLDVENEKLLLQEQCAGLQSQIEELNQEAQKHETSLKMLSEHHESERSDLLSHIECLEKDIGSLSSSSLAKEKENLRKDFEKTKTKLKDTESKLKNSMQDKTKLEAEKASAERELKRLHSQKALLERDISKQESFAGKRRDSLLVERSANQSLQEEFKQLEVLAFEMETTIASLEEELAAERGEKEEALCRNDGLGSEITDLTEKLEHSNTKLEHLQNDVTELKTRLEVSSSDQQQLETNVKQLLEEKEELAMHLANSLLEMEEEKAIWSSKEKALTEAVEEKIRLYKNIQIESLSKEMSEEKKELESCRLECVTLADRLRCSEENAKQDKESSLEKSLEIDRLGDELRSADAVSKQSQEVLKSDIDILKSEVQHACKMSDTFQREMDYVTSERQGLLARIEELSKELASSNRWQDAAAENKEKAKLKMRLRGMQARLDAISLRYKQSVQESELMNRKFKEASAKLKEKLASKALEVLDLKKQLSASSRTIDEPRNSLESYCDAAVVVATVVVVVVEQEIPNLRYSSNSIEVVEKAAINMGSKEDKADNPALSSYDDAMEALSTLISRRNRGDRTPTKGNRDKLEQVVTYLKVIQPFTVKRY

SEQ ID NO: 89828 - protein, 1260 aa, Arabidopsis thaliana
  peptide (1)..(1260): Ceres Seq. ID no. 12720716
  misc_feature (431)..(1178): Pfam Name: Myosin tail Pfam Description: Myosin tail
  misc_feature (1)..(346): Homolog of NCBI NO: 6056206 NR Description: putative kinesin-like centromere protein
  misc_feature (1)..(717): Homolog of NCBI NO: 18406379 NR Description: kinesin-related protein; protein id: At1g59540.1,
  misc_feature (1)..(407): Homolog of NCBI NO: 14475945 NR Description: kinesin motor protein (kin2), putative
  misc_feature (1)..(751): Homolog of NCBI NO: 25404863 NR Description: protein T30E16.9 [imported] - Arabidopsis >gi|8778739|gb|AAF79747.1|AC009317_6 T30E16.9 [Arabidopsis
  misc_feature (1)..(1158): Homolog of NCBI NO: 7512169 NR Description: kinesin-related protein - African clawed frog
  misc_feature (1)..(1194): Homolog of NCBI NO: 40789293 NR Description: cDNA sequence BC049989 [Mus musculus]
  misc_feature (1)..(1195): Homolog of NCBI NO: 4502781 NR Description: centromere protein E; Centromere autoantigen E centromere protein E (312kD); kinesin family member 10 [Homo
  misc_feature (1)..(1150): Homolog of NCBI NO: 28268805 NR Description: kinesin-related protein K4 [Dictyostelium
  misc_feature (1)..(1195): Homolog of NCBI NO: 382658 NR Description: CENP-E protein
  misc_feature (1)..(1153): Homolog of NCBI NO: 34860597 NR Description: similar to CENTROMERIC PROTEIN E (CENP-E PROTEIN)
MRGSPIEPGVIPLAVHDLFDTIYQDASREFLLRMSYLEIYNEDINDLLAPEHRKLQIHENLEKGIFVAGLREEIVASPQQVLEMMEFGESHRHIGETNMNLYSSRSHTIFRMIIESRQKMQDEGVGNSCDAVRVSVLNLVDLAGSERAAKTGAEGVRLKEGSHINKSLMTLGTVIKKLSEGVETQGGHVPYRDSKLTRILQPALGGNANTAIICNITLAPIHADETKSSLQFASRALRVTNCAHVNEILTDAALLKRQKKEIEELRSKLKTSHSDHSEEEILNLRNTLLKSELERERIALELEEEKKAQAQRERVLQEQAKKIKNLSSMVLLSNRDEKREQDHFKKGKRRDTWCIGKLSRDSTSEDQSNVLSRGSSLESARSERETGPLLPFSELVNEPLYNINEEDEDSIEGTLEDSVLPDPCALVNVTSRKKPSIKQKNPVVVENELDRIQREYEALLLQYETEVKLGEDGLSGDAKCKQSEVVGNVHCEEHVVNLRDPEAILLIKQLQEKINMLELEKSSSNRNLDDLVMVATEQNICAREKFAEIQEEIHAAREEAQVAREQLVSKESEVIDVINENFNSLVNVATEIEVLESEFQKYKASVETISSVMNEGLQDFAFFSPLIHDFTLFVRQSSEQHDSLINSYQTVQSSLKKKVLDVENEKLLLQEQCAGLQSQIEELNQEAQKHETSLKMLSEHHESERSDLLSHIECLEKDIGSLSSSSLAKEKENLRKDFEKTKTKLKDTESKLKNSMQDKTKLEAEKASAERELKRLHSQKALLERDISKQESFAGKRRDSLLVERSANQSLQEEFKQLEVLAFEMETTIASLEEELAAERGEKEEALCRNDGLGSEITDLTEKLEHSNTKLEHLQNDVTELKTRLEVSSSDQQQLETNVKQLLEEKEELAMHLANSLLEMEEEKAIWSSKEKALTEAVEEKIRLYKNIQIESLSKEMSEEKKELESCRLECVTLADRLRCSEENAKQDKESSLEKSLEIDRLGDELRSADAVSKQSQEVLKSDIDILKSEVQHACKMSDTFQREMDYVTSERQGLLARIEELSKELASSNRWQDAAAENKEKAKLKMRLRGMQARLDAISLRYKQSVQESELMNRKFKEASAKLKEKLASKALEVLDLKKQLSASSRTIDEPRNSLESYCDAAVVVATVVVVVVEQEIPNLRYSSNSIEVVEKAAINMGSKEDKADNPALSSYDDAMEALSTLISRRNRGDRTPTKGNRDKLEQVVTYLKVIQPFTVKRY

SEQ ID NO: 89829 - DNA, 1748 bp, Arabidopsis thaliana
  misc_feature (1)..(1748): Ceres Seq. ID no. 12720754
  misc_feature: MA Experiment ID: 108461 Result: Down-regulated in Transcription
  misc_feature: MA Experiment 108461 PARAMETER Experiment Name: At_Germinating_Seeds_cDNA_P Parameter: Age (day) Value: 1 vs. 0
  misc_feature: MA Experiment 108461 PARAMETER Experiment Name: At_Germinating_Seeds_cDNA_P Parameter: Tissue Value: Germinating Seeds
  misc_feature: MA Experiment ID: 108488 Result: Down-regulated in Transcription
  misc_feature: MA Experiment ID: 108569 Result: Up-regulated in Transcription
  misc_feature: MA Experiment 108569 PARAMETER Experiment Name: At_0.001%_MeJA__cDNA_P Parameter: Timepoint (hr) Value: 6
  misc_feature: MA Experiment 108569 PARAMETER Experiment Name: At_0.001%_MeJA__cDNA_P Parameter: Tissue Value: Aerial
  misc_feature: MA Experiment 108569 PARAMETER Experiment Name: At_0.001%_MeJA__cDNA_P Parameter: Treatment Value: 0.001% MeJA vs. No Treatment
  misc_feature: MA Experiment ID: 108573 Result: Up-regulated in Transcription
  misc_feature: MA Experiment 108573 PARAMETER Experiment Name: At_Drought_cDNA_P Parameter: Timepoint (hr) Value: 6
  misc_feature: MA Experiment 108573 PARAMETER Experiment Name: At_Drought_cDNA_P Parameter: Tissue Value: Aerial
  misc_feature: MA Experiment 108573 PARAMETER Experiment Name: At_Drought_cDNA_P Parameter: Treatment Value: Drought vs. No Drought
  misc_feature: MA Experiment ID: 108585 Result: Up-regulated in Transcription
  misc_feature: MA Experiment 108585 PARAMETER Experiment Name: At_5mM_NaNP_cDNA_P Parameter: Timepoint (hr) Value: 6
  misc_feature: MA Experiment 108585 PARAMETER Experiment Name: At_5mM_NaNP_cDNA_P Parameter: Tissue Value: Aerial
  misc_feature: MA Experiment 108585 PARAMETER Experiment Name: At_5mM_NaNP_cDNA_P Parameter: Treatment Value: null
  misc_feature: MA Experiment ID: 108595 Result: Up-regulated in Transcription
  misc_feature: MA Experiment 108595 PARAMETER Experiment Name: At_Ler-pi_Ovule_cDNA_P Parameter: Plant Line Value: null
  misc_feature: MA Experiment ID: 20000307 Result: Down-regulated in Transcription
  misc_feature: MA Experiment 20000307 PARAMETER Experiment Name: At_Germinating_Seeds_Sub_P Parameter: Age (hr) Value: 24 vs. 0
  misc_feature: MA Experiment 20000307 PARAMETER Experiment Name: At_Germinating_Seeds_Sub_P Parameter: Organism Value: A. thaliana
  misc_feature: MA Experiment 20000307 PARAMETER Experiment Name: At_Germinating_Seeds_Sub_P Parameter: Plant Line Value: WS
  misc_feature: MA Experiment 20000307 PARAMETER Experiment Name: At_Germinating_Seeds_Sub_P Parameter: Tissue Value: Germinating Seeds
gggaacgcgaaaagaaagacaaaattttcttgcaattgaaggtgaggtttggtgaaagggaaattgagaaaaccctagaacaagtacggtctctattttgctttaatgggtcgcgaatctgtggctgttgtgactgcgccgccctcggcgactgctccgggtactgcttcggtggcgacctcgcttgctcctggcttccgatttcatccgactgatgaggaactcgtgagctattacttgaagaggaaggttctgggccaacctgtacgcttcgatgcgattggagaggtcgatatatacaagcatgagccctgggatttagcagtgttttcgagattgaagacaagggaccaagaatggtacttctacagtgcattagataagaagtatggaaacggtgctaggatgaaccgagcaactaacagagggtactggaaagctactggaaaagacagagaaatccgccgtgacattctgcttctcggtatgaaaaagacacttgttttccacagtgggcgtgcaccagacgggcttcggactaattgggttatgcatgagtatcgccttgtggaatatgaaaccgagaaaaacggaaacctggtgcaagatgcatatgtgttgtgtagagtcttccacaagaataacattgggccaccaagtgggaacagatatgctccgttcatggaagaggaatgggctgatgatgaaggagctctgattccaggaatagacgttaagctcaggctagagccgccgccagtagccaatggaaacgaccagatggaccagataatttatgcgtcgtctggggttcacttgtaatttgttgtaggaaatccagtcagccagcaagagtctcatcaacatcaatgagccaccgagagagacagctccactggatatcgaatcggaccaacagaatcatcatgagaatgacctcaagccggaggagcataacaacaataataattatgatgaaaacgaggaaacactcaaacgcgagcagatggaagaagaggagcgtcctcctcgacctgtatgcgttctcaacaaagaagctccattacctcttctgcaatacaaacgtagacgccaaagcgagtccaacaacaactcaagcaggaacacacaggaccattgttcgtccacaacaacaactgtcgacaatacaaccactttaatctcatcatctgccgctgccaccaacactgccatctctgcattgcttgagttctcactcatgggtatctccgacaagaaagaaaagccgcagcaaccgctacgtcctcacaaggaacctttgcctcctcaaactccacttgcatctcctgaagagaaggttaatgatctccagaaggagattcaccagatgtctgttgaaagagaaactttcaagcttgaaatgatgagtgcagaagctatgatcagtattctccagtcaaggatcgatgcgctgcgtcaggagaacgaggaactcaagaagaacaatgctaatggacaataaaggctctaaaaacatctctccaggttacttcttattgcccttcgccttttatttagctttaatctccctaatactatgacccatctacatagctcctctagacagattgcgaactgtgtgaatctctgttgtaacataggataaaacggattcgagcccctgagctgagtgttttatccttcttctttttttgtgtggatgttcttgcatcttttgagaacattttttaggttgctccattgtc

SEQ ID NO: 89830 - protein, 238 aa, Arabidopsis thaliana
  peptide (1)..(238): Ceres Seq. ID no. 12720755
  misc_feature (27)..(155): Pfam Name: No apical meristem (NAM) protein Pfam Description: No apical meristem (NAM) protein
  misc_feature (1)..(234): Homolog of NCBI NO: 30681347 NR Description: expressed protein [Arabidopsis thaliana]
  misc_feature (1)..(234): Homolog of NCBI NO: 18398891 NR Description: expressed protein; protein id: At3g10480.1 thaliana] >gi|8567777|gb|AAF76349.1| unknown protein [Arabidopsis >gi|12322797|gb|AAG51394.1|AC011560_26 unknown protein; unknown
  misc_feature (1)..(238): Homolog of NCBI NO: 18398893 NR Description: expressed protein; protein id: At3g10490.1
  misc_feature (1)..(224): Homolog of NCBI NO: 21105736 NR Description: nam-like protein 4 [Petunia x hybrida]
  misc_feature (1)..(224): Homolog of NCBI NO: 21105744 NR Description: nam-like protein 8 [Petunia x hybrida]
  misc_feature (27)..(230): Homolog of NCBI NO: 21105746 NR Description: nam-like protein 9 [Petunia x hybrida]
  misc_feature (19)..(209): Homolog of NCBI NO: 15237699 NR Description: putative protein; protein id: At5g04410.1, by cDNA: gi_20466285, supported by cDNA: gi_6456750 [Arabidopsis
  misc_feature (19)..(238): Homolog of NCBI NO: 8567779 NR Description: NAC, putative [Arabidopsis thaliana]
  misc_feature (19)..(238): Homolog of NCBI NO: 18398895 NR Description: expressed protein; protein id: At3g10500.1 thaliana] >gi|15293139|gb|AAK93680.1| unknown protein thaliana] >gi|19310691|gb|AAL85076.1| unknown protein
  misc_feature (19)..(238): Homolog of NCBI NO: 21593389 NR Description: NAC, putative [Arabidopsis thaliana]
MGRESVAVVTAPPSATAPGTASVATSLAPGFRFHPTDEELVSYYLKRKVLGQPVRFDAIGEVDIYKHEPWDLAVFSRLKTRDQEWYFYSALDKKYGNGARMNRATNRGYWKATGKDREIRRDILLLGMKKTLVFHSGRAPDGLRTNWVMHEYRLVEYETEKNGNLVQDAYVLCRVFHKNNIGPPSGNRYAPFMEEEWADDEGALIPGIDVKLRLEPPPVANGNDQMDQIIYASSGVHL

SEQ ID NO: 89831 - protein, 165 aa, Arabidopsis thaliana
  peptide (1)..(165): Ceres Seq. ID no. 12720756
  misc_feature (1)..(165): Homolog of NCBI NO: 30681347 NR Description: expressed protein [Arabidopsis thaliana]
  misc_feature (1)..(165): Homolog of NCBI NO: 18398891 NR Description: expressed protein; protein id: At3g10480.1 thaliana] >gi|8567777|gb|AAF76349.1| unknown protein [Arabidopsis >gi|12322797|gb|AAG51394.1|AC011560_26 unknown protein; unknown
  misc_feature (1)..(159): Homolog of NCBI NO: 21105736 NR Description: nam-like protein 4 [Petunia x hybrida]
  misc_feature (1)..(159): Homolog of NCBI NO: 21105744 NR Description: nam-like protein 8 [Petunia x hybrida]
  misc_feature (1)..(92): Homolog of NCBI NO: 15237698 NR Description: NAC2-like protein; protein id: At5g04400.1
MEEEERPPRPVCVLNKEAPLPLLQYKRRRQSESNNNSSRNTQDHCSSTTTTVDNTTTLISSSAAATNTAISALLEFSLMGISDKKEKPQQPLRPHKEPLPPQTPLASPEEKVNDLQKEIHQMSVERETFKLEMMSAEAMISILQSRIDALRQENEELKKNNANGQ

SEQ ID NO: 89832 - protein, 138 aa, Arabidopsis thaliana
  peptide (1)..(138): Ceres Seq. ID no. 12720757
  misc_feature (1)..(55): Pfam Name: No apical meristem (NAM) protein Pfam Description: No apical meristem (NAM) protein
  misc_feature (1)..(134): Homolog of NCBI NO: 30681347 NR Description: expressed protein [Arabidopsis thaliana]
  misc_feature (1)..(134): Homolog of NCBI NO: 18398891 NR Description: expressed protein; protein id: At3g10480.1 thaliana] >gi|8567777|gb|AAF76349.1| unknown protein [Arabidopsis >gi|12322797|gb|AAG51394.1|AC011560_26 unknown protein; unknown
  misc_feature (1)..(138): Homolog of NCBI NO: 18398893 NR Description: expressed protein; protein id: At3g10490.1
  misc_feature (1)..(124): Homolog of NCBI NO: 21105736 NR Description: nam-like protein 4 [Petunia x hybrida]
  misc_feature (1)..(124): Homolog of NCBI NO: 21105744 NR Description: nam-like protein 8 [Petunia x hybrida]
  misc_feature (1)..(130): Homolog of NCBI NO: 21105746 NR Description: nam-like protein 9 [Petunia x hybrida]
  misc_feature (1)..(109): Homolog of NCBI NO: 15237699 NR Description: putative protein; protein id: At5g04410.1, by cDNA: gi_20466285, supported by cDNA: gi_6456750 [Arabidopsis
  misc_feature (1)..(138): Homolog of NCBI NO: 8567779 NR Description: NAC, putative [Arabidopsis thaliana]
  misc_feature (1)..(138): Homolog of NCBI NO: 18398895 NR Description: expressed protein; protein id: At3g10500.1 thaliana] >gi|15293139|gb|AAK93680.1| unknown protein thaliana] >gi|19310691|gb|AAL85076.1| unknown protein
  misc_feature (1)..(138): Homolog of NCBI NO: 21593389 NR Description: NAC, putative [Arabidopsis thaliana]
MNRATNRGYWKATGKDREIRRDILLLGMKKTLVFHSGRAPDGLRTNWVMHEYRLVEYETEKNGNLVQDAYVLCRVFHKNNIGPPSGNRYAPFMEEEWADDEGALIPGIDVKLRLEPPPVANGNDQMDQIIYASSGVHL

SEQ ID NO: 89833 - DNA, 2138 bp, Arabidopsis thaliana
  misc_feature (1)..(2138): Ceres Seq. ID no. 12720778
  misc_feature: MA Experiment ID: 20000227 Result: Up-regulated in Transcription
  misc_feature: MA Experiment 20000227 PARAMETER Experiment Name: At_Root-Tips-vs-Tops_P Parameter: Tissue Value: Root Tips vs. Root Tops
atgggtaatgcttgcgttggaccaaacatttctggaaatggtttcttgcaaactgttacggctgcaatgtggaggccacggatcggagctgagcaagcttcttcttcttcccatggtaatggacaagtttctaaagaagcagcttcagaaccagctactgatcaagtccagaataaaccccctgagcctatcacaatgccaagctcaaagaccaatcccgaaactaaactgaaacccgatctagagatccaacctgaagaaaagaaggagaaagttcttgcagaagaaaccaagcagaaagttgttcctgaagaaagtaagcaggaagttcctcctgaagaaagtaagcgggaagttgttgtgcagccggagtcagcaaaaccagaaacaaagtctgaatccaagccagagacaacaaaaccagaaacaacgtctgaaaccaagccagagacgaaagctgaacctcagaagcctaaacatatgaggagagtgtccagtgcagggcttagaactgagtcagtgttgcagaggaaaactgaaaactttaaggagttctattcattagggaggaaacttggacaagggcaatttgggacgacgtttttatgccttgagaaaggtactgggaacgaatatgcgtgcaagtcgatttccaagaggaagcttttgactgatgaggatgttgaagatgtgagaagagagattcagataatgcatcacttggctggtcatccgaatgttatatctattaaaggtgcttatgaggatgttgttgcggtacatcttgtgatggagttgtgttcgggtggcgagctttttgatagaattattcaacgtggacattacactgagaggaaagctgctgagcttgcgagaaccattgttggggttttagaggcttgtcactctcttggtgttatgcatcgggacctcaagccagagaattttctatttgttagtagagaggaagattccctgttgaaaacgatcgactttggactctcaatgttctttaagccagatgaggtttttacagatgttgttggtagtccgtattatgtagctccagaagttcttagaaagcgttatggtcctgaatcagatgtgtggagtgctggtgtgattgtttacattttgttaagcggagttcctcctttctgggccgaaaccgaacaaggtattttcgagcaggtccttcatggagatcttgacttttcatctgatccatggccaagcatctctgaaagcgcgaaagacttggtaaggaaaatgcttgttcgagaccccaagcgaagactaaccgcacatcaagtattatgtcatccatgggtacagattgacggtgtggctccagataaacctctggactctgctgttctgagccgtatgaagcaattttctgcaatgaacaagttcaagaaaatggctcttagagtcatagctgagagcttatctgaagaagaaatagccggtttaaaacaaatgttcaagatgatagacgcagacaatagtggtcagatcacttttgaagaactgaaagcaggactaaaacgagttggtgccaatctcaaagagtcagagattcttgatctaatgcaagctgctgatgtggacaatagcggaacgatagactacaaagagttcatagccgccacattgcatctaaacaaaatagagagagaggaccatttgttcgccgccttctcttactttgacaaggacgagagtggctttatcaccccggacgagcttcaacaagcttgcgaagagtttggtgttgaagatgcccgcatagaagaaatgatgcgcgatgttgatcaagacaaggatggacgaatagactacaacgagtttgtggcaatgatgcagaaagggagcataatgggaggacctgtgaagatgggtttagagaacagcattagcatttctctgaaacattagttacaaacccaaatcaagaagtacttcgtctatttattttgttatgaatgatgatgatcatgattgtgtttatctcaacattttgatgagatttttgttcgttagactggtttaggtaaatctgtttctgtactatgtacttttatgcatatacacatagcttttgtctgtaacttttggtcataagttatcttttt

SEQ ID NO: 89834 - protein, 646 aa, Arabidopsis thaliana
  peptide (1)..(646): Ceres Seq. ID no. 12720779
  misc_feature (186)..(444): Pfam Name: Protein kinase domain Pfam Description: Protein kinase domain
  misc_feature (93)..(645): Homolog of NCBI NO: 15238353 NR Description: calcium-dependent protein kinase; protein id:
  misc_feature (103)..(645): Homolog of NCBI NO: 16215471 NR Description: calcium-dependent protein kinase 3 [Nicotiana
  misc_feature (1)..(89): Homolog of NCBI NO: 16215471 NR Description: calcium-dependent protein kinase 3 [Nicotiana
  misc_feature (103)..(645): Homolog of NCBI NO: 15289758 NR Description: calcium dependent protein kinase [Solanum
  misc_feature (1)..(89): Homolog of NCBI NO: 15289758 NR Description: calcium dependent protein kinase [Solanum
  misc_feature (103)..(646): Homolog of NCBI NO: 16215467 NR Description: calcium-dependent protein kinase 2 [Nicotiana
  misc_feature (1)..(90): Homolog of NCBI NO: 16215467 NR Description: calcium-dependent protein kinase 2 [Nicotiana
  misc_feature (102)..(646): Homolog of NCBI NO: 16215475 NR Description: calcium-dependent protein kinase 2 [Nicotiana
  misc_feature (1)..(92): Homolog of NCBI NO: 16215475 NR Description: calcium-dependent protein kinase 2 [Nicotiana
  misc_feature (90)..(646): Homolog of NCBI NO: 7434364 NR Description: calcium-dependent protein kinase (EC 2.7.1.-)
MGNACVGPNISGNGFLQTVTAAMWRPRIGAEQASSSSHGNGQVSKEAASEPATDQVQNKPPEPITMPSSKTNPETKLKPDLEIQPEEKKEKVLAEETKQKVVPEESKQEVPPEESKREVVVQPESAKPETKSESKPETTKPETTSETKPETKAEPQKPKHMRRVSSAGLRTESVLQRKTENFKEFYSLGRKLGQGQFGTTFLCLEKGTGNEYACKSISKRKLLTDEDVEDVRREIQIMHHLAGHPNVISIKGAYEDVVAVHLVMELCSGGELFDRIIQRGHYTERKAAELARTIVGVLEACHSLGVMHRDLKPENFLFVSREEDSLLKTIDFGLSMFFKPDEVFTDVVGSPYYVAPEVLRKRYGPESDVWSAGVIVYILLSGVPPFWAETEQGIFEQVLHGDLDFSSDPWPSISESAKDLVRKMLVRDPKRRLTAHQVLCHPWVQIDGVAPDKPLDSAVLSRMKQFSAMNKFKKMALRVIAESLSEEEIAGLKQMFKMIDADNSGQITFEELKAGLKRVGANLKESEILDLMQAADVDNSGTIDYKEFIAATLHLNKIEREDHLFAAFSYFDKDESGFITPDELQQACEEFGVEDARIEEMMRDVDQDKDGRIDYNEFVAMMQKGSIMGGPVKMGLENSISISLKH

SEQ ID NO: 89835 - protein, 624 aa, Arabidopsis thaliana
  peptide (1)..(624): Ceres Seq. ID no. 12720780
  misc_feature (164)..(422): Pfam Name: Protein kinase domain Pfam Description: Protein kinase domain
  misc_feature (71)..(623): Homolog of NCBI NO: 15238353 NR Description: calcium-dependent protein kinase; protein id:
  misc_feature (81)..(623): Homolog of NCBI NO: 16215471 NR Description: calcium-dependent protein kinase 3 [Nicotiana
  misc_feature (1)..(67): Homolog of NCBI NO: 16215471 NR Description: calcium-dependent protein kinase 3 [Nicotiana
  misc_feature (81)..(623): Homolog of NCBI NO: 15289758 NR Description: calcium dependent protein kinase [Solanum
  misc_feature (1)..(67): Homolog of NCBI NO: 15289758 NR Description: calcium dependent protein kinase [Solanum
  misc_feature (81)..(624): Homolog of NCBI NO: 16215467 NR Description: calcium-dependent protein kinase 2 [Nicotiana
  misc_feature (1)..(68): Homolog of NCBI NO: 16215467 NR Description: calcium-dependent protein kinase 2 [Nicotiana
  misc_feature (80)..(624): Homolog of NCBI NO: 16215475 NR Description: calcium-dependent protein kinase 2 [Nicotiana
  misc_feature (1)..(70): Homolog of NCBI NO: 16215475 NR Description: calcium-dependent protein kinase 2 [Nicotiana
  misc_feature (68)..(624): Homolog of NCBI NO: 7434364 NR Description: calcium-dependent protein kinase (EC 2.7.1.-)
MWRPRIGAEQASSSSHGNGQVSKEAASEPATDQVQNKPPEPITMPSSKTNPETKLKPDLEIQPEEKKEKVLAEETKQKVVPEESKQEVPPEESKREVVVQPESAKPETKSESKPETTKPETTSETKPETKAEPQKPKHMRRVSSAGLRTESVLQRKTENFKEFYSLGRKLGQGQFGTTFLCLEKGTGNEYACKSISKRKLLTDEDVEDVRREIQIMHHLAGHPNVISIKGAYEDVVAVHLVMELCSGGELFDRIIQRGHYTERKAAELARTIVGVLEACHSLGVMHRDLKPENFLFVSREEDSLLKTIDFGLSMFFKPDEVFTDVVGSPYYVAPEVLRKRYGPESDVWSAGVIVYILLSGVPPFWAETEQGIFEQVLHGDLDFSSDPWPSISESAKDLVRKMLVRDPKRRLTAHQVLCHPWVQIDGVAPDKPLDSAVLSRMKQFSAMNKFKKMALRVIAESLSEEEIAGLKQMFKMIDADNSGQITFEELKAGLKRVGANLKESEILDLMQAADVDNSGTIDYKEFIAATLHLNKIEREDHLFAAFSYFDKDESGFITPDELQQACEEFGVEDARIEEMMRDVDQDKDGRIDYNEFVAMMQKGSIMGGPVKMGLENSISISLKH

SEQ ID NO: 89836 - protein, 581 aa, Arabidopsis thaliana
  peptide (1)..(581): Ceres Seq. ID no. 12720781
  misc_feature (121)..(379): Pfam Name: Protein kinase domain Pfam Description: Protein kinase domain
  misc_feature (28)..(580): Homolog of NCBI NO: 15238353 NR Description: calcium-dependent protein kinase; protein id:
  misc_feature (38)..(580): Homolog of NCBI NO: 16215471 NR Description: calcium-dependent protein kinase 3 [Nicotiana
  misc_feature (1)..(24): Homolog of NCBI NO: 16215471 NR Description: calcium-dependent protein kinase 3 [Nicotiana
  misc_feature (38)..(580): Homolog of NCBI NO: 15289758 NR Description: calcium dependent protein kinase [Solanum
  misc_feature (1)..(24): Homolog of NCBI NO: 15289758 NR Description: calcium dependent protein kinase [Solanum
  misc_feature (38)..(581): Homolog of NCBI NO: 16215467 NR Description: calcium-dependent protein kinase 2 [Nicotiana
  misc_feature (1)..(25): Homolog of NCBI NO: 16215467 NR Description: calcium-dependent protein kinase 2 [Nicotiana
  misc_feature (37)..(581): Homolog of NCBI NO: 16215475 NR Description: calcium-dependent protein kinase 2 [Nicotiana
  misc_feature (1)..(27): Homolog of NCBI NO: 16215475 NR Description: calcium-dependent protein kinase 2 [Nicotiana
  misc_feature (25)..(581): Homolog of NCBI NO: 7434364 NR Description: calcium-dependent protein kinase (EC 2.7.1.-)
MPSSKTNPETKLKPDLEIQPEEKKEKVLAEETKQKVVPEESKQEVPPEESKREVVVQPESAKPETKSESKPETTKPETTSETKPETKAEPQKPKHMRRVSSAGLRTESVLQRKTENFKEFYSLGRKLGQGQFGTTFLCLEKGTGNEYACKSISKRKLLTDEDVEDVRREIQIMHHLAGHPNVISIKGAYEDVVAVHLVMELCSGGELFDRIIQRGHYTERKAAELARTIVGVLEACHSLGVMHRDLKPENFLFVSREEDSLLKTIDFGLSMFFKPDEVFTDVVGSPYYVAPEVLRKRYGPESDVWSAGVIVYILLSGVPPFWAETEQGIFEQVLHGDLDFSSDPWPSISESAKDLVRKMLVRDPKRRLTAHQVLCHPWVQIDGVAPDKPLDSAVLSRMKQFSAMNKFKKMALRVIAESLSEEEIAGLKQMFKMIDADNSGQITFEELKAGLKRVGANLKESEILDLMQAADVDNSGTIDYKEFIAATLHLNKIEREDHLFAAFSYFDKDESGFITPDELQQACEEFGVEDARIEEMMRDVDQDKDGRIDYNEFVAMMQKGSIMGGPVKMGLENSISISLKH

SEQ ID NO: 89837 - DNA, 1686 bp, Arabidopsis thaliana
  misc_feature (1)..(1686): Ceres Seq. ID no. 12720785
  misc_feature: MA Experiment ID: 20000307 Result: Up-regulated in Transcription
  misc_feature: MA Experiment 20000307 PARAMETER Experiment Name: At_Germinating_Seeds_Sub_P Parameter: Age (hr) Value: 24 vs. 0
  misc_feature: MA Experiment 20000307 PARAMETER Experiment Name: At_Germinating_Seeds_Sub_P Parameter: Organism Value: A. thaliana
  misc_feature: MA Experiment 20000307 PARAMETER Experiment Name: At_Germinating_Seeds_Sub_P Parameter: Plant Line Value: WS
  misc_feature: MA Experiment 20000307 PARAMETER Experiment Name: At_Germinating_Seeds_Sub_P Parameter: Tissue Value: Germinating Seeds
  misc_feature: MA Experiment ID: 20000314 Result: Up-regulated in Transcription
  misc_feature: MA Experiment 20000314 PARAMETER Experiment Name: At_14day_Shoots-Roots_Sub_P Parameter: Age (day) Value: 14
  misc_feature: MA Experiment 20000314 PARAMETER Experiment Name: At_14day_Shoots-Roots_Sub_P Parameter: Organism Value: A. thaliana
  misc_feature: MA Experiment 20000314 PARAMETER Experiment Name: At_14day_Shoots-Roots_Sub_P Parameter: Plant Line Value: WS
  misc_feature: MA Experiment 20000314 PARAMETER Experiment Name: At_14day_Shoots-Roots_Sub_P Parameter: Tissue Value: Roots vs. Whole Plant
atgtcctctccttacggcaaagtcgacgagcgtgaacatgtaaggctcgaagctcgtcgtaagacgagaaagaacatcgcaatcatcgctgtatcactagtcattcttgccggaatcgtgatcggagctgtgtttggaaccatggctcacaagaagtcaccagagacagtggagactaataacaacggagactcaatctccgtttccgttaaagccgtttgcgacgttacgttgcataaagaaaaatgcttcgaaaccctcggatcagctccaaacgcaagcagtctcaatccagaagagctcttcagatacgcagtcaaaatcacaatcgccgaagtttcaaaagctatcaacgctttctcttcatccttaggcgatgaaaagaacaacatcaccatgaacgcttgcgctgagcttcttgacctaacgatagataacctcaacaacacgttaacctcatcatcaaacggtgatgtcacggttcctgagctagtcgatgatctccgtacatggctgagttcagccgggacgtatcaacggacgtgcgtggaaacgttggctccagatatgaggccgttcggcgaaagtcatctcaagaactcaacggagttgacgagtaacgcactagcgatcatcacatggctcgggaagatcgctgactctttcaaactccggaggcgtttgttaacaactgcagacgtggaggtggacttccacgcgggtcggagattgttgcagagcacggatttgaggaaagtggcggatattgtggtggcgaaggatggttcagggaagtatagaacgataaagagggctttacaagatgtgccagagaagagtgagaagaggacgattatatatgtgaagaaaggagtttattttgagaatgtgaaggtggagaagaagatgtggaatgttattgtggttggagatggcgagagcaagagtattgtctctggtagacttaatgtcatcgatggaactcccacttttaagaccgccacattcgctgtgtttggaaaagggtttatggcaagagacatgggcttcatcaacacagctggtccatccaaacatcaagctgttgctctaatggtaagcgcagatctcacagcattttaccgttgcacgatgaacgcataccaagacacgctttacgttcatgcacaacgccaattctaccgtgaatgcaccattatcggaacagtagatttcatctttggtaactcagcttcagttctccaaagctgccggattctccctcgccgaccaatgaaaggacaacaaaacacaatcacggctcaaggacgtactgatccgaacatgaacacaggaatctcgattcaccgttgtaacatctctccactcggtgacctaaccgatgttatgacgtttctaggtcgaccatggaagaatttctcgacgacggttataatggactcgtatttgcatggttttattgaccggaaaggctggttaccgtggaccggagattctgcgccggatactatattttacggtgagtataagaataccggtcctggtgcatcgacgaagaatagggttaagtggaagggtttgaggtttcttagtacgaaggaagcgaataggtttacggtgaaacctttcatcgacggtggaagatggcttccggcgacgaaagtgccgttcaggtccggtctctga

SEQ ID NO: 89838 - protein, 561 aa, Arabidopsis thaliana
  peptide (1)..(561): Ceres Seq. ID no. 12720786
  misc_feature (255)..(548): Pfam Name: Pectinesterase Pfam Description: Pectinesterase
  misc_feature (1)..(561): Homolog of NCBI NO: 15228355 NR Description: pectinesterase family; protein id: At3g10710.1 thaliana] >gi|6630559|gb|AAF19578.1|AC011708_21 putative
  misc_feature (1)..(559): Homolog of NCBI NO: 15238377 NR Description: pectinesterase family; protein id: At5g04960.1 thaliana] >gi|10178035|dbj|BAB11518.1| pectinesterase
  misc_feature (1)..(559): Homolog of NCBI NO: 28393771 NR Description: unknown protein [Arabidopsis thaliana]
  misc_feature (5)..(561): Homolog of NCBI NO: 6093739 NR Description: Pectinesterase 3 precursor (Pectin methylesterase
  misc_feature (70)..(551): Homolog of NCBI NO: 15231826 NR Description: putative pectin methylesterase; protein id:
  misc_feature (242)..(556): Homolog of NCBI NO: 32490042 NR Description: OSJNBa0063C18.2 [Oryza sativa (japonica
  misc_feature (25)..(263): Homolog of NCBI NO: 32490042 NR Description: OSJNBa0063C18.2 [Oryza sativa (japonica
  misc_feature (20)..(561): Homolog of NCBI NO: 15229105 NR Description: pectinesterase - like protein; protein id: supported by cDNA: gi_16648928 [Arabidopsis thaliana]
  misc_feature (43)..(561): Homolog of NCBI NO: 14334992 NR Description: At1g11580/T23J18_33 [Arabidopsis thaliana]
  misc_feature (43)..(561): Homolog of NCBI NO: 15220424 NR Description: pectin methylesterase, putative; protein id:
MSSPYGKVDEREHVRLEARRKTRKNIAIIAVSLVILAGIVIGAVFGTMAHKKSPETVETNNNGDSISVSVKAVCDVTLHKEKCFETLGSAPNASSLNPEELFRYAVKITIAEVSKAINAFSSSLGDEKNNITMNACAELLDLTIDNLNNTLTSSSNGDVTVPELVDDLRTWLSSAGTYQRTCVETLAPDMRPFGESHLKNSTELTSNALAIITWLGKIADSFKLRRRLLTTADVEVDFHAGRRLLQSTDLRKVADIVVAKDGSGKYRTIKRALQDVPEKSEKRTIIYVKKGVYFENVKVEKKMWNVIVVGDGESKSIVSGRLNVIDGTPTFKTATFAVFGKGFMARDMGFINTAGPSKHQAVALMVSADLTAFYRCTMNAYQDTLYVHAQRQFYRECTIIGTVDFIFGNSASVLQSCRILPRRPMKGQQNTITAQGRTDPNMNTGISIHRCNISPLGDLTDVMTFLGRPWKNFSTTVIMDSYLHGFIDRKGWLPWTGDSAPDTIFYGEYKNTGPGASTKNRVKWKGLRFLSTKEANRFTVKPFIDGGRWLPATKVPFRSGL

SEQ ID NO: 89839 - protein, 514 aa, Arabidopsis thaliana
  peptide (1)..(514): Ceres Seq. ID no. 12720787
  misc_feature (208)..(501): Pfam Name: Pectinesterase Pfam Description: Pectinesterase
  misc_feature (1)..(514): Homolog of NCBI NO: 15228355 NR Description: pectinesterase family; protein id: At3g10710.1 thaliana] >gi|6630559|gb|AAF19578.1|AC011708_21 putative
  misc_feature (1)..(512): Homolog of NCBI NO: 15238377 NR Description: pectinesterase family; protein id: At5g04960.1 thaliana] >gi|10178035|dbj|BAB11518.1| pectinesterase
  misc_feature (1)..(512): Homolog of NCBI NO: 28393771 NR Description: unknown protein [Arabidopsis thaliana]
  misc_feature (1)..(514): Homolog of NCBI NO: 6093739 NR Description: Pectinesterase 3 precursor (Pectin methylesterase
  misc_feature (23)..(504): Homolog of NCBI NO: 15231826 NR Description: putative pectin methylesterase; protein id:
  misc_feature (195)..(509): Homolog of NCBI NO: 32490042 NR Description: OSJNBa0063C18.2 [Oryza sativa (japonica
  misc_feature (1)..(216): Homolog of NCBI NO: 32490042 NR Description: OSJNBa0063C18.2 [Oryza sativa (japonica
  misc_feature (1)..(514): Homolog of NCBI NO: 15229105 NR Description: pectinesterase - like protein; protein id: supported by cDNA: gi_16648928 [Arabidopsis thaliana]
  misc_feature (1)..(514): Homolog of NCBI NO: 14334992 NR Description: At1g11580/T23J18_33 [Arabidopsis thaliana]
  misc_feature (1)..(514): Homolog of NCBI NO: 15220424 NR Description: pectin methylesterase, putative; protein id:
MAHKKSPETVETNNNGDSISVSVKAVCDVTLHKEKCFETLGSAPNASSLNPEELFRYAVKITIAEVSKAINAFSSSLGDEKNNITMNACAELLDLTIDNLNNTLTSSSNGDVTVPELVDDLRTWLSSAGTYQRTCVETLAPDMRPFGESHLKNSTELTSNALAIITWLGKIADSFKLRRRLLTTADVEVDFHAGRRLLQSTDLRKVADIVVAKDGSGKYRTIKRALQDVPEKSEKRTIIYVKKGVYFENVKVEKKMWNVIVVGDGESKSIVSGRLNVIDGTPTFKTATFAVFGKGFMARDMGFINTAGPSKHQAVALMVSADLTAFYRCTMNAYQDTLYVHAQRQFYRECTIIGTVDFIFGNSASVLQSCRILPRRPMKGQQNTITAQGRTDPNMNTGISIHRCNISPLGDLTDVMTFLGRPWKNFSTTVIMDSYLHGFIDRKGWLPWTGDSAPDTIFYGEYKNTGPGASTKNRVKWKGLRFLSTKEANRFTVKPFIDGGRWLPATKVPFRSGL

SEQ ID NO: 89840 - protein, 429 aa, Arabidopsis thaliana
  peptide (1)..(429): Ceres Seq. ID no. 12720788
  misc_feature (123)..(416): Pfam Name: Pectinesterase Pfam Description: Pectinesterase
  misc_feature (1)..(429): Homolog of NCBI NO: 15228355 NR Description: pectinesterase family; protein id: At3g10710.1 thaliana] >gi|6630559|gb|AAF19578.1|AC011708_21 putative
  misc_feature (1)..(427): Homolog of NCBI NO: 15238377 NR Description: pectinesterase family; protein id: At5g04960.1 thaliana] >gi|10178035|dbj|BAB11518.1| pectinesterase
  misc_feature (1)..(427): Homolog of NCBI NO: 28393771 NR Description: unknown protein [Arabidopsis thaliana]
  misc_feature (1)..(429): Homolog of NCBI NO: 6093739 NR Description: Pectinesterase 3 precursor (Pectin methylesterase
  misc_feature (1)..(419): Homolog of NCBI NO: 15231826 NR Description: putative pectin methylesterase; protein id:
  misc_feature (110)..(424): Homolog of NCBI NO: 32490042 NR Description: OSJNBa0063C18.2 [Oryza sativa (japonica
  misc_feature (1)..(131): Homolog of NCBI NO: 32490042 NR Description: OSJNBa0063C18.2 [Oryza sativa (japonica
  misc_feature (1)..(429): Homolog of NCBI NO: 15229105 NR Description: pectinesterase - like protein; protein id: supported by cDNA: gi_16648928 [Arabidopsis thaliana]
  misc_feature (1)..(429): Homolog of NCBI NO: 14334992 NR Description: At1g11580/T23J18_33 [Arabidopsis thaliana]
  misc_feature (1)..(429): Homolog of NCBI NO: 15220424 NR Description: pectin methylesterase, putative; protein id:
MNACAELLDLTIDNLNNTLTSSSNGDVTVPELVDDLRTWLSSAGTYQRTCVETLAPDMRPFGESHLKNSTELTSNALAIITWLGKIADSFKLRRRLLTTADVEVDFHAGRRLLQSTDLRKVADIVVAKDGSGKYRTIKRALQDVPEKSEKRTIIYVKKGVYFENVKVEKKMWNVIVVGDGESKSIVSGRLNVIDGTPTFKTATFAVFGKGFMARDMGFINTAGPSKHQAVALMVSADLTAFYRCTMNAYQDTLYVHAQRQFYRECTIIGTVDFIFGNSASVLQSCRILPRRPMKGQQNTITAQGRTDPNMNTGISIHRCNISPLGDLTDVMTFLGRPWKNFSTTVIMDSYLHGFIDRKGWLPWTGDSAPDTIFYGEYKNTGPGASTKNRVKWKGLRFLSTKEANRFTVKPFIDGGRWLPATKVPFRSGL

SEQ ID NO: 89841 - DNA, 1227 bp, Arabidopsis thaliana
  misc_feature (1)..(1227): Ceres Seq. ID no. 12720815
  misc_feature: MA Experiment ID: 20001451 Result: Up-regulated in Transcription
  misc_feature: MA Experiment 20001451 PARAMETER Experiment Name: At_Far-red-induction_P Parameter: Age (day) Value: 7
  misc_feature: MA Experiment 20001451 PARAMETER Experiment Name: At_Far-red-induction_P Parameter: Light Value: Far-red vs. White
  misc_feature: MA Experiment 20001451 PARAMETER Experiment Name: At_Far-red-induction_P Parameter: Organism Value: A. thaliana
  misc_feature: MA Experiment 20001451 PARAMETER Experiment Name: At_Far-red-induction_P Parameter: Plant Line Value: Columbia
  misc_feature: MA Experiment 20001451 PARAMETER Experiment Name: At_Far-red-induction_P Parameter: Timepoint (hr) Value: 24
  misc_feature: MA Experiment 20001451 PARAMETER Experiment Name: At_Far-red-induction_P Parameter: Tissue Value: Whole Plant
atgaagtgtttgtgttttatcgtgcttttagcgattgtgatcgcacaaagctatgtaggagtagaagctgcgccaagtgatgggttcgtgagcagaaatggcgtccaatttattctaaatgggaaaccattttacgctaatggcttcaatgcttactggctcgcgtacgaagctaccgatccgaccacaagatttaagatcactaatgtgtttcaaaacgcaactagtctcggtttgaccatcgcccgcacctgggggttccgcgatggcgccatataccgcgctctccaaacagcccctggttcctacgatgaacaaacgtttcagggtttggattttgtgatagccgaagcaaaaagaatcggtataaaattgataatcctccttgtcaataattgggatgactacggagggaaaaaacaatacgtggattgggctagaagtaaaggcgaagtggtatcttccaatgacgatttctacagaaacccagttattaaagatttctacaagaaccacgtcaagactgtgttaaacagagtgaatacatttactaaagttgcatacaaagatgaacccgccattatggcttggcagcttatgaacgagccacgatgcggtgtggataagagtggaaaaacccttatggattggattaatgaaatggctccttttgtaaaatcagttgatccaaaccatctcctctctactggtcatgaaggtttctatggtgattcatctcctgaaagaaagaattctctaaatccagtttcagccaacacagttggagctgatttcatagctaatcacaatatcgatgccattgatttcgcatcgatgcactgtggaagtgacttatggtttcaaaggttggatcagaactctcgactggccttcataaaaagatggcttgaaggccacatcgaagatgcgcagaacattcttaaaaaacctgtaattctagcagaatttgggttaggatcggacacaccacgttacactctggctaatagagacggcgtgttcaccacaacatatgacatcatttacgcatctgcgcaaaaaggcggttcggccgcgggagcattgttttgggaggttattagcgaaggcatgagcaactttgcaggtccctcctccattatacttagtgacaagtcgtcgacggttaatattataagtgagcatgcacgaaagatgggtttgcttggtgagaccacaagaaagtaa

SEQ ID NO: 89842 - protein, 408 aa, Arabidopsis thaliana
  peptide (1)..(408): Ceres Seq. ID no. 12720816
  misc_feature (34)..(359): Pfam Name: Cellulase (glycosyl hydrolase family 5) Pfam Description: Cellulase (glycosyl hydrolase family 5)
  misc_feature (1)..(408): Homolog of NCBI NO: 15228394 NR Description: glycosyl hydrolase family 5/cellulase
  misc_feature (1)..(349): Homolog of NCBI NO: 15230798 NR Description: putative beta-mannan endohydrolase; protein id:
  misc_feature (1)..(402): Homolog of NCBI NO: 15228393 NR Description: glycosyl hydrolase family 5/cellulase
  misc_feature (85)..(349): Homolog of NCBI NO: 9279563 NR Description: (1-4)-beta-mannan endohydrolase-like protein
  misc_feature (1)..(34): Homolog of NCBI NO: 9279563 NR Description: (1-4)-beta-mannan endohydrolase-like protein
  misc_feature (1)..(402): Homolog of NCBI NO: 15239973 NR Description: glycosyl hydrolase family 5/cellulase
  misc_feature (4)..(404): Homolog of NCBI NO: 34912090 NR Description: putative mannan endo-1,4-beta-mannosidase [Oryza
  misc_feature (4)..(402): Homolog of NCBI NO: 10178872 NR Description: (1-4)-beta-mannan endohydrolase [Coffea arabica]
  misc_feature (4)..(402): Homolog of NCBI NO: 23477717 NR Description: endo-beta-mannanase [Daucus carota]
  misc_feature (1)..(407): Homolog of NCBI NO: 37544517 NR Description: mannan endo-1,4-beta-mannosidase precursor
MKCLCFIVLLAIVIAQSYVGVEAAPSDGFVSRNGVQFILNGKPFYANGFNAYWLAYEATDPTTRFKITNVFQNATSLGLTIARTWGFRDGAIYRALQTAPGSYDEQTFQGLDFVIAEAKRIGIKLIILLVNNWDDYGGKKQYVDWARSKGEVVSSNDDFYRNPVIKDFYKNHVKTVLNRVNTFTKVAYKDEPAIMAWQLMNEPRCGVDKSGKTLMDWINEMAPFVKSVDPNHLLSTGHEGFYGDSSPERKNSLNPVSANTVGADFIANHNIDAIDFASMHCGSDLWFQRLDQNSRLAFIKRWLEGHIEDAQNILKKPVILAEFGLGSDTPRYTLANRDGVFTTTYDIIYASAQKGGSAAGALFWEVISEGMSNFAGPSSIILSDKSSTVNIISEHARKMGLLGETTRK

SEQ ID NO: 89843 - protein, 214 aa, Arabidopsis thaliana
  peptide (1)..(214): Ceres Seq. ID no. 12720817
  misc_feature (1)..(165): Pfam Name: Cellulase (glycosyl hydrolase family 5) Pfam Description: Cellulase (glycosyl hydrolase family 5)
  misc_feature (1)..(214): Homolog of NCBI NO: 15228394 NR Description: glycosyl hydrolase family 5/cellulase
  misc_feature (1)..(155): Homolog of NCBI NO: 15230798 NR Description: putative beta-mannan endohydrolase; protein id:
  misc_feature (1)..(208): Homolog of NCBI NO: 15228393 NR Description: glycosyl hydrolase family 5/cellulase
  misc_feature (1)..(155): Homolog of NCBI NO: 9279563 NR Description: (1-4)-beta-mannan endohydrolase-like protein
  misc_feature (1)..(208): Homolog of NCBI NO: 15239973 NR Description: glycosyl hydrolase family 5/cellulase
  misc_feature (1)..(210): Homolog of NCBI NO: 34912090 NR Description: putative mannan endo-1,4-beta-mannosidase [Oryza
  misc_feature (1)..(208): Homolog of NCBI NO: 10178872 NR Description: (1-4)-beta-mannan endohydrolase [Coffea arabica]
  misc_feature (1)..(208): Homolog of NCBI NO: 23477717 NR Description: endo-beta-mannanase [Daucus carota]
  misc_feature (1)..(213): Homolog of NCBI NO: 37544517 NR Description: mannan endo-1,4-beta-mannosidase precursor
  misc_feature (1)..(205): Homolog of NCBI NO: 10129675 NR Description: (1-4)-beta-mannan endohydrolase [Coffea arabica]
MAWQLMNEPRCGVDKSGKTLMDWINEMAPFVKSVDPNHLLSTGHEGFYGDSSPERKNSLNPVSANTVGADFIANHNIDAIDFASMHCGSDLWFQRLDQNSRLAFIKRWLEGHIEDAQNILKKPVILAEFGLGSDTPRYTLANRDGVFTTTYDIIYASAQKGGSAAGALFWEVISEGMSNFAGPSSIILSDKSSTVNIISEHARKMGLLGETTRK

SEQ ID NO: 89844 - protein, 209 aa, Arabidopsis thaliana
  peptide (1)..(209): Ceres Seq. ID no. 12720818
  misc_feature (1)..(160): Pfam Name: Cellulase (glycosyl hydrolase family 5) Pfam Description: Cellulase (glycosyl hydrolase family 5)
  misc_feature (1)..(209): Homolog of NCBI NO: 15228394 NR Description: glycosyl hydrolase family 5/cellulase
  misc_feature (1)..(150): Homolog of NCBI NO: 15230798 NR Description: putative beta-mannan endohydrolase; protein id:
  misc_feature (1)..(203): Homolog of NCBI NO: 15228393 NR Description: glycosyl hydrolase family 5/cellulase
  misc_feature (1)..(150): Homolog of NCBI NO: 9279563 NR Description: (1-4)-beta-mannan endohydrolase-like protein
  misc_feature (1)..(203): Homolog of NCBI NO: 15239973 NR Description: glycosyl hydrolase family 5/cellulase
  misc_feature (1)..(205): Homolog of NCBI NO: 34912090 NR Description: putative mannan endo-1,4-beta-mannosidase [Oryza
  misc_feature (1)..(203): Homolog of NCBI NO: 10178872 NR Description: (1-4)-beta-mannan endohydrolase [Coffea arabica]
  misc_feature (1)..(203): Homolog of NCBI NO: 23477717 NR Description: endo-beta-mannanase [Daucus carota]
  misc_feature (1)..(208): Homolog of NCBI NO: 37544517 NR Description: mannan endo-1,4-beta-mannosidase precursor
  misc_feature (1)..(200): Homolog of NCBI NO: 10129675 NR Description: (1-4)-beta-mannan endohydrolase [Coffea arabica]
MNEPRCGVDKSGKTLMDWINEMAPFVKSVDPNHLLSTGHEGFYGDSSPERKNSLNPVSANTVGADFIANHNIDAIDFASMHCGSDLWFQRLDQNSRLAFIKRWLEGHIEDAQNILKKPVILAEFGLGSDTPRYTLANRDGVFTTTYDIIYASAQKGGSAAGALFWEVISEGMSNFAGPSSIILSDKSSTVNIISEHARKMGLLGETTRK

SEQ ID NO: 89845 - DNA, 477 bp, Arabidopsis thaliana
  misc_feature (1)..(477): Ceres Seq. ID no. 12720848
  misc_feature: MA Experiment ID: 20000184 Result: Up-regulated in Transcription
  misc_feature: MA Experiment 20000184 PARAMETER Experiment Name: At_Shoots__P Parameter: Age (day) Value: 7
  misc_feature: MA Experiment 20000184 PARAMETER Experiment Name: At_Shoots__P Parameter: Tissue Value: Shoots vs. Whole Plant
  misc_feature: MA Experiment ID: 20000185 Result: Down-regulated in Transcription
  misc_feature: MA Experiment 20000185 PARAMETER Experiment Name: At_Roots__P Parameter: Age (day) Value: 7 vs. 21
  misc_feature: MA Experiment 20000185 PARAMETER Experiment Name: At_Roots__P Parameter: Organism Value: A. thaliana
  misc_feature: MA Experiment 20000185 PARAMETER Experiment Name: At_Roots__P Parameter: Tissue Value: Roots vs. Whole Plant
  misc_feature: MA Experiment ID: 20000437 Result: Down-regulated in Transcription
  misc_feature: MA Experiment 20000437 PARAMETER Experiment Name: At_Drought_P Parameter: Age (day) Value: 8
  misc_feature: MA Experiment 20000437 PARAMETER Experiment Name: At_Drought_P Parameter: Organism Value: A. thaliana
  misc_feature: MA Experiment 20000437 PARAMETER Experiment Name: At_Drought_P Parameter: Plant Line Value: WS
  misc_feature: MA Experiment 20000437 PARAMETER Experiment Name: At_Drought_P Parameter: Timepoint (hr) Value: 24
  misc_feature: MA Experiment 20000437 PARAMETER Experiment Name: At_Drought_P Parameter: Tissue Value: Whole Plant
  misc_feature: MA Experiment 20000437 PARAMETER Experiment Name: At_Drought_P Parameter: Treatment Value: Drought vs. No Drought
  misc_feature: MA Experiment ID: 20000438 Result: Up-regulated in Transcription
  misc_feature: MA Experiment 20000438 PARAMETER Experiment Name: At_Shoots__P Parameter: Age (day) Value: 14
  misc_feature: MA Experiment 20000438 PARAMETER Experiment Name: At_Shoots__P Parameter: Tissue Value: Shoots vs. Whole Plant
  misc_feature: MA Experiment ID: 20000439 Result: Down-regulated in Transcription
  misc_feature: MA Experiment 20000439 PARAMETER Experiment Name: At_Roots__P Parameter: Age (day) Value: 14 vs. 21
  misc_feature: MA Experiment 20000439 PARAMETER Experiment Name: At_Roots__P Parameter: Organism Value: A. thaliana
  misc_feature: MA Experiment 20000439 PARAMETER Experiment Name: At_Roots__P Parameter: Tissue Value: Roots vs. Whole Plant
  misc_feature: MA Experiment ID: 20000496 Result: Down-regulated in Transcription
  misc_feature: MA Experiment 20000496 PARAMETER Experiment Name: At_Guard_Cells_P Parameter: Harvest Date Value: 7/19/2002
  misc_feature: MA Experiment 20000496 PARAMETER Experiment Name: At_Guard_Cells_P Parameter: Organism Value: Canola
  misc_feature: MA Experiment 20000496 PARAMETER Experiment Name: At_Guard_Cells_P Parameter: Tissue Value: Guard Cells vs. Leaves
  misc_feature: MA Experiment ID: 20001247 Result: Up-regulated in Transcription
  misc_feature: MA Experiment 20001247 PARAMETER Experiment Name: At_Far-red-induction_P Parameter: Age (day) Value: 7
  misc_feature: MA Experiment 20001247 PARAMETER Experiment Name: At_Far-red-induction_P Parameter: Light Value: Far-red vs. White
  misc_feature: MA Experiment 20001247 PARAMETER Experiment Name: At_Far-red-induction_P Parameter: Organism Value: A. thaliana
  misc_feature: MA Experiment 20001247 PARAMETER Experiment Name: At_Far-red-induction_P Parameter: Plant Line Value: Columbia
  misc_feature: MA Experiment 20001247 PARAMETER Experiment Name: At_Far-red-induction_P Parameter: Timepoint (hr) Value: 1
  misc_feature: MA Experiment 20001247 PARAMETER Experiment Name: At_Far-red-induction_P Parameter: Tissue Value: Whole Plant
  misc_feature: MA Experiment ID: 20001248 Result: Down-regulated in Transcription
  misc_feature: MA Experiment 20001248 PARAMETER Experiment Name: At_Far-red-induction_P Parameter: Age (day) Value: 7
  misc_feature: MA Experiment 20001248 PARAMETER Experiment Name: At_Far-red-induction_P Parameter: Light Value: Far-red vs. White
  misc_feature: MA Experiment 20001248 PARAMETER Experiment Name: At_Far-red-induction_P Parameter: Organism Value: A. thaliana
  misc_feature: MA Experiment 20001248 PARAMETER Experiment Name: At_Far-red-induction_P Parameter: Plant Line Value: Columbia
  misc_feature: MA Experiment 20001248 PARAMETER Experiment Name: At_Far-red-induction_P Parameter: Timepoint (hr) Value: 4
  misc_feature: MA Experiment 20001248 PARAMETER Experiment Name: At_Far-red-induction_P Parameter: Tissue Value: Whole Plant
  misc_feature: MA Experiment ID: 20001451 Result: Up-regulated in Transcription
  misc_feature: MA Experiment 20001451 PARAMETER Experiment Name: At_Far-red-induction_P Parameter: Age (day) Value: 7
  misc_feature: MA Experiment 20001451 PARAMETER Experiment Name: At_Far-red-induction_P Parameter: Light Value: Far-red vs. White
  misc_feature: MA Experiment 20001451 PARAMETER Experiment Name: At_Far-red-induction_P Parameter: Organism Value: A. thaliana
  misc_feature: MA Experiment 20001451 PARAMETER Experiment Name: At_Far-red-induction_P Parameter: Plant Line Value: Columbia
  misc_feature: MA Experiment 20001451 PARAMETER Experiment Name: At_Far-red-induction_P Parameter: Timepoint (hr) Value: 24
  misc_feature: MA Experiment 20001451 PARAMETER Experiment Name: At_Far-red-induction_P Parameter: Tissue Value: Whole Plant
  misc_feature: MA Experiment ID: 20001556 Result: Down-regulated in Transcription
  misc_feature: MA Experiment 20001556 PARAMETER Experiment Name: At_Drought_Soil_Dry_P Parameter: Age (day) Value: 26
  misc_feature: MA Experiment 20001556 PARAMETER Experiment Name: At_Drought_Soil_Dry_P Parameter: Organism Value: A. thaliana
  misc_feature: MA Experiment 20001556 PARAMETER Experiment Name: At_Drought_Soil_Dry_P Parameter: Plant Line Value: WS
  misc_feature: MA Experiment 20001556 PARAMETER Experiment Name: At_Drought_Soil_Dry_P Parameter: Post Timepoint (hr) Value: None
  misc_feature: MA Experiment 20001556 PARAMETER Experiment Name: At_Drought_Soil_Dry_P Parameter: Post-Treatment Value: None
  misc_feature: MA Experiment 20001556 PARAMETER Experiment Name: At_Drought_Soil_Dry_P Parameter: Timepoint (day) Value: 12
  misc_feature: MA Experiment 20001556 PARAMETER Experiment Name: At_Drought_Soil_Dry_P Parameter: Treatment Value: Drought vs. No Drought
  misc_feature: MA Experiment ID: 20001904 Result: Down-regulated in Transcription
  misc_feature: MA Experiment 20001904 PARAMETER Experiment Name: At_Drought_Reproduction_P Parameter: Age (day) Value: 37
  misc_feature: MA Experiment 20001904 PARAMETER Experiment Name: At_Drought_Reproduction_P Parameter: Organism Value: A. thaliana
  misc_feature: MA Experiment 20001904 PARAMETER Experiment Name: At_Drought_Reproduction_P Parameter: Plant Line Value: WS
  misc_feature: MA Experiment 20001904 PARAMETER Experiment Name: At_Drought_Reproduction_P Parameter: Timepoint (day) Value: 7
  misc_feature: MA Experiment 20001904 PARAMETER Experiment Name: At_Drought_Reproduction_P Parameter: Tissue Value: Rosettes
  misc_feature: MA Experiment 20001904 PARAMETER Experiment Name: At_Drought_Reproduction_P Parameter: Treatment Value: Drought vs. No Drought
atgacgtcatcttcaccgtctccacaagcctcgatgcttttgtactggcacgagaatcaatacgacgaccggaacttccagattcatggccggacactcttcttcgccttagctttattctccgtcgtgctcttcttcgcactactcactctctacatccaccggaactgcctcccccgggattctatcaatctccacgcgtcctctcccgatcgactcacgcgttgccgtagcggagggcttgatccggcggagattcggagcttgccggtggtgctttgccggagagaaagggcggaggaggaggaggagaaggagtgttgtatatgtctaggtggtttcgaagaaggagagaagatgaaagtgcttcctccgtgtagccattgttaccactgcgaatgtgtggatcggtggcttaaaaccgagtcgagttgtccgctctgccgagtctccatccgtgtcgactcgtcaagctaa

SEQ ID NO: 89846 - protein, 158 aa, Arabidopsis thaliana
  peptide (1)..(158): Ceres Seq. ID no. 12720849
  misc_feature (107)..(148): Pfam Name: Zinc finger, C3HC4 type (RING finger) Pfam Description: Zinc finger, C3HC4 type (RING finger)
  misc_feature (1)..(158): Homolog of NCBI NO: 15228437 NR Description: RING zinc finger protein; protein id: At3g11110.1 thaliana] >gi|6016703|gb|AAF01530.1|AC009991_26 hypothetical [Arabidopsis thaliana] >gi|12321864|gb|AAG50960.1|AC073395_2 RING
  misc_feature (22)..(152): Homolog of NCBI NO: 28558782 NR Description: RING/C3HC4/PHD zinc finger-like protein [Cucumis
  misc_feature (33)..(157): Homolog of NCBI NO: 28071301 NR Description: P0705A05.3 [Oryza sativa (japonica
  misc_feature (79)..(154): Homolog of NCBI NO: 8698833 NR Description: EL5 [Oryza sativa (japonica cultivar-group)]
  misc_feature (33)..(152): Homolog of NCBI NO: 34907968 NR Description: P0446G04.15 [Oryza sativa (japonica
  misc_feature (80)..(149): Homolog of NCBI NO: 15226289 NR Description: putative RING zinc finger protein; protein id: [Arabidopsis thaliana] >gi|25407935|pir||G84678 probable RING
  misc_feature (22)..(152): Homolog of NCBI NO: 34903920 NR Description: OSJNBa0038J17.5 [Oryza sativa (japonica
  misc_feature (3)..(158): Homolog of NCBI NO: 15228395 NR Description: putative RING zinc finger protein; protein id: [Arabidopsis thaliana] >gi|6630539|gb|AAF19558.1|AC011708_1 RING zinc finger protein [Arabidopsis thaliana]
  misc_feature (18)..(149): Homolog of NCBI NO: 25456278 NR Description: probable zinc finger protein [imported] - thaliana >gi|3873408|gb|AAC77829.1| putative zinc finger protein
  misc_feature (79)..(152): Homolog of NCBI NO: 27261477 NR Description: Hypothetical protein [Oryza sativa (japonica
MTSSSPSPQASMLLYWHENQYDDRNFQIHGRTLFFALALFSVVLFFALLTLYIHRNCLPRDSINLHASSPDRLTRCRSGGLDPAEIRSLPVVLCRRERAEEEEEKECCICLGGFEEGEKMKVLPPCSHCYHCECVDRWLKTESSCPLCRVSIRVDSSS

SEQ ID NO: 89847 - protein, 147 aa, Arabidopsis thaliana
  peptide (1)..(147): Ceres Seq. ID no. 12720850
  misc_feature (96)..(137): Pfam Name: Zinc finger, C3HC4 type (RING finger) Pfam Description: Zinc finger, C3HC4 type (RING finger)
  misc_feature (1)..(147): Homolog of NCBI NO: 15228437 NR Description: RING zinc finger protein; protein id: At3g11110.1 thaliana] >gi|6016703|gb|AAF01530.1|AC009991_26 hypothetical [Arabidopsis thaliana] >gi|12321864|gb|AAG50960.1|AC073395_2 RING
  misc_feature (11)..(141): Homolog of NCBI NO: 28558782 NR Description: RING/C3HC4/PHD zinc finger-like protein [Cucumis
  misc_feature (22)..(146): Homolog of NCBI NO: 28071301 NR Description: P0705A05.3 [Oryza sativa (japonica
  misc_feature (68)..(143): Homolog of NCBI NO: 8698833 NR Description: EL5 [Oryza sativa (japonica cultivar-group)]
  misc_feature (22)..(141): Homolog of NCBI NO: 34907968 NR Description: P0446G04.15 [Oryza sativa (japonica
  misc_feature (69)..(138): Homolog of NCBI NO: 15226289 NR Description: putative RING zinc finger protein; protein id: [Arabidopsis thaliana] >gi|25407935|pir||G84678 probable RING
  misc_feature (11)..(141): Homolog of NCBI NO: 34903920 NR Description: OSJNBa0038J17.5 [Oryza sativa (japonica
  misc_feature (1)..(147): Homolog of NCBI NO: 15228395 NR Description: putative RING zinc finger protein; protein id: [Arabidopsis thaliana] >gi|6630539|gb|AAF19558.1|AC011708_1 RING zinc finger protein [Arabidopsis thaliana]
  misc_feature (7)..(138): Homolog of NCBI NO: 25456278 NR Description: probable zinc finger protein [imported] - thaliana >gi|3873408|gb|AAC77829.1| putative zinc finger protein
  misc_feature (68)..(141): Homolog of NCBI NO: 27261477 NR Description: Hypothetical protein [Oryza sativa (japonica
MLLYWHENQYDDRNFQIHGRTLFFALALFSVVLFFALLTLYIHRNCLPRDSINLHASSPDRLTRCRSGGLDPAEIRSLPVVLCRRERAEEEEEKECCICLGGFEEGEKMKVLPPCSHCYHCECVDRWLKTESSCPLCRVSIRVDSSS

SEQ ID NO: 89848 - DNA, 1203 bp, Arabidopsis thaliana
  misc_feature (1)..(1203): Ceres Seq. ID no. 12720851
  misc_feature: MA Experiment ID: 20000182 Result: Up-regulated in Transcription
  misc_feature: MA Experiment 20000182 PARAMETER Experiment Name: At_2mM_SA_P Parameter: Age (day) Value: 14
  misc_feature: MA Experiment 20000182 PARAMETER Experiment Name: At_2mM_SA_P Parameter: Organism Value: A. thaliana
  misc_feature: MA Experiment 20000182 PARAMETER Experiment Name: At_2mM_SA_P Parameter: Plant Line Value: WS
  misc_feature: MA Experiment 20000182 PARAMETER Experiment Name: At_2mM_SA_P Parameter: Timepoint (hr) Value: 6
  misc_feature: MA Experiment 20000182 PARAMETER Experiment Name: At_2mM_SA_P Parameter: Tissue Value: Aerial
  misc_feature: MA Experiment 20000182 PARAMETER Experiment Name: At_2mM_SA_P Parameter: Treatment Value: 2mM SA vs. No Treatment
  misc_feature: MA Experiment ID: 20000211 Result: Up-regulated in Transcription
  misc_feature: MA Experiment 20000211 PARAMETER Experiment Name: At_0.001percent_MeJA__P Parameter: Age (day) Value: 14
  misc_feature: MA Experiment 20000211 PARAMETER Experiment Name: At_0.001percent_MeJA__P Parameter: Organism Value: A. thaliana
  misc_feature: MA Experiment 20000211 PARAMETER Experiment Name: At_0.001percent_MeJA__P Parameter: Plant Line Value: WS
  misc_feature: MA Experiment 20000211 PARAMETER Experiment Name: At_0.001percent_MeJA__P Parameter: Timepoint (hr) Value: 1
  misc_feature: MA Experiment 20000211 PARAMETER Experiment Name: At_0.001percent_MeJA__P Parameter: Tissue Value: Aerial
  misc_feature: MA Experiment 20000211 PARAMETER Experiment Name: At_0.001percent_MeJA__P Parameter: Treatment Value: 0.001percent MeJA vs. No Treatment
atgaacaacctagacgagatcaagatcgagagcaagacctgcctcaacgatcaagaacaagaagtcaaaatagacaacatgcacatgagcgaccaagacaagaacaagatcgaaatcaagaacaagagtggcctcggcgaaaagtggccagaacccatcgtccgagtccaatctctagccgagagcaacctcactagtctccctgaccgttacatcaagccgccgtctcaacgccctcaaaccaccatcatcgaccaccaaccggaagtagctgacataaatataccgatcatagacctagacagtctattctctggcaatgaagacgacaagaagaggatatccgaggcatgccgtgaatggggattcttccaggtaatcaaccatggcgtgaagccggagctgatggacgcagctagagaaacttggaagagcttctttaatttgcctgttgaagccaaagaagtttactcaaactccccaagaacctatgaaggatatggaagcagattgggtgtggaaaaaggagccattcttgattggaatgattattactatctccattttcttcctcttgccttgaaggatttcaacaaatggccttctttaccttccaacattagagaaatgaatgatgagtacggtaaggaactagtgaagctaggtgggagactaatgacgatcttatcgtcaaatttggggctaagagcagaacaacttcaagaagcatttggtggagaagacgttggtgcatgtttgagggttaattattacccaaagtgccctcaaccggagcttgccctcggcctctcccctcattctgatcccggcggcatgaccatcctcttgccggacgatcaagtcgtcggccttcaggtccgtcacggtgacacgtggatcactgtcaatcctctccgccacgcttttatcgtcaatatcggcgatcaaattcagatactaagcaattcgaaatacaagagcgtggaacatcgagtgatagtgaattcggaaaaagaaagggtttcactagcattcttctataaccctaagagtgacattccgatccaaccaatgcaacaacttgtcacctctacgatgcctcccttgtatcctcccatgacctttgatcaatatagactcttcattagaacgcaaggtccacgtggaaaatcccacgttgagtctcatatatctcctcgttaa

SEQ ID NO: 89849 - protein, 400 aa, Arabidopsis thaliana
  peptide (1)..(400): Ceres Seq. ID no. 12720852
  misc_feature (249)..(349): Pfam Name: 2OG-Fe(II) oxygenase superfamily Pfam Description: 2OG-Fe(II) oxygenase superfamily
  misc_feature (1)..(400): Homolog of NCBI NO: 15229694 NR Description: putative leucoanthocyanidin dioxygenase; protein At3g11180.1 [Arabidopsis thaliana]
  misc_feature (33)..(400): Homolog of NCBI NO: 15239179 NR Description: leucoanthocyanidin dioxygenase-like protein; id: At5g05600.1, supported by cDNA: 13012., supported by cDNA: [Arabidopsis thaliana] >gi|10178137|dbj|BAB11549.1|
  misc_feature (47)..(400): Homolog of NCBI NO: 21537324 NR Description: leucoanthocyanidin dioxygenase-like protein
  misc_feature (47)..(400): Homolog of NCBI NO: 15228785 NR Description: leucoanthocyanidin dioxygenase -like protein; id: At3g55970.1 [Arabidopsis thaliana] >gi|11255840|pir||T49209
  misc_feature (47)..(323): Homolog of NCBI NO: 34907994 NR Description: leucoanthocyanidin dioxygenase-like protein
  misc_feature (315)..(395): Homolog of NCBI NO: 34907994 NR Description: leucoanthocyanidin dioxygenase-like protein
  misc_feature (49)..(400): Homolog of NCBI NO: 15224472 NR Description: putative anthocyanidin synthase; protein id: supported by cDNA: 256433., supported by cDNA: gi_17065133, by cDNA: gi_20259907 [Arabidopsis thaliana]
  misc_feature (49)..(400): Homolog of NCBI NO: 21554535 NR Description: putative anthocyanidin synthase [Arabidopsis
  misc_feature (52)..(386): Homolog of NCBI NO: 2116599 NR Description: leucoanthocyanidin dioxygenase [Perilla
  misc_feature (51)..(395): Homolog of NCBI NO: 20260150 NR Description: strong similarity to naringenin 3-dioxygenase
MNNLDEIKIESKTCLNDQEQEVKIDNMHMSDQDKNKIEIKNKSGLGEKWPEPIVRVQSLAESNLTSLPDRYIKPPSQRPQTTIIDHQPEVADINIPIIDLDSLFSGNEDDKKRISEACREWGFFQVINHGVKPELMDAARETWKSFFNLPVEAKEVYSNSPRTYEGYGSRLGVEKGAILDWNDYYYLHFLPLALKDFNKWPSLPSNIREMNDEYGKELVKLGGRLMTILSSNLGLRAEQLQEAFGGEDVGACLRVNYYPKCPQPELALGLSPHSDPGGMTILLPDDQVVGLQVRHGDTWITVNPLRHAFIVNIGDQIQILSNSKYKSVEHRVIVNSEKERVSLAFFYNPKSDIPIQPMQQLVTSTMPPLYPPMTFDQYRLFIRTQGPRGKSHVESHISPR

SEQ ID NO: 89850 - protein, 374 aa, Arabidopsis thaliana
  peptide (1)..(374): Ceres Seq. ID no. 12720853
  misc_feature (223)..(323): Pfam Name: 2OG-Fe(II) oxygenase superfamily Pfam Description: 2OG-Fe(II) oxygenase superfamily
  misc_feature (1)..(374): Homolog of NCBI NO: 15229694 NR Description: putative leucoanthocyanidin dioxygenase; protein At3g11180.1 [Arabidopsis thaliana]
  misc_feature (7)..(374): Homolog of NCBI NO: 15239179 NR Description: leucoanthocyanidin dioxygenase-like protein; id: At5g05600.1, supported by cDNA: 13012., supported by cDNA: [Arabidopsis thaliana] >gi|10178137|dbj|BAB11549.1|
  misc_feature (21)..(374): Homolog of NCBI NO: 21537324 NR Description: leucoanthocyanidin dioxygenase-like protein
  misc_feature (21)..(374): Homolog of NCBI NO: 15228785 NR Description: leucoanthocyanidin dioxygenase -like protein; id: At3g55970.1 [Arabidopsis thaliana] >gi|11255840|pir||T49209
  misc_feature (21)..(297): Homolog of NCBI NO: 34907994 NR Description: leucoanthocyanidin dioxygenase-like protein
  misc_feature (289)..(369): Homolog of NCBI NO: 34907994 NR Description: leucoanthocyanidin dioxygenase-like protein
  misc_feature (23)..(374): Homolog of NCBI NO: 15224472 NR Description: putative anthocyanidin synthase; protein id: supported by cDNA: 256433., supported by cDNA: gi_17065133, by cDNA: gi_20259907 [Arabidopsis thaliana]
  misc_feature (23)..(374): Homolog of NCBI NO: 21554535 NR Description: putative anthocyanidin synthase [Arabidopsis
  misc_feature (26)..(360): Homolog of NCBI NO: 2116599 NR Description: leucoanthocyanidin dioxygenase [Perilla
  misc_feature (25)..(369): Homolog of NCBI NO: 20260150 NR Description: strong similarity to naringenin 3-dioxygenase
MHMSDQDKNKIEIKNKSGLGEKWPEPIVRVQSLAESNLTSLPDRYIKPPSQRPQTTIIDHQPEVADINIPIIDLDSLFSGNEDDKKRISEACREWGFFQVINHGVKPELMDAARETWKSFFNLPVEAKEVYSNSPRTYEGYGSRLGVEKGAILDWNDYYYLHFLPLALKDFNKWPSLPSNIREMNDEYGKELVKLGGRLMTILSSNLGLRAEQLQEAFGGEDVGACLRVNYYPKCPQPELALGLSPHSDPGGMTILLPDDQVVGLQVRHGDTWITVNPLRHAFIVNIGDQIQILSNSKYKSVEHRVIVNSEKERVSLAFFYNPKSDIPIQPMQQLVTSTMPPLYPPMTFDQYRLFIRTQGPRGKSHVESHISPR

SEQ ID NO: 89851 - protein, 372 aa, Arabidopsis thaliana
  peptide (1)..(372): Ceres Seq. ID no. 12720854
  misc_feature (221)..(321): Pfam Name: 2OG-Fe(II) oxygenase superfamily Pfam Description: 2OG-Fe(II) oxygenase superfamily
  misc_feature (1)..(372): Homolog of NCBI NO: 15229694 NR Description: putative leucoanthocyanidin dioxygenase; protein At3g11180.1 [Arabidopsis thaliana]
  misc_feature (5)..(372): Homolog of NCBI NO: 15239179 NR Description: leucoanthocyanidin dioxygenase-like protein; id: At5g05600.1, supported by cDNA: 13012., supported by cDNA: [Arabidopsis thaliana] >gi|10178137|dbj|BAB11549.1|
  misc_feature (19)..(372): Homolog of NCBI NO: 21537324 NR Description: leucoanthocyanidin dioxygenase-like protein
  misc_feature (19)..(372): Homolog of NCBI NO: 15228785 NR Description: leucoanthocyanidin dioxygenase -like protein; id: At3g55970.1 [Arabidopsis thaliana] >gi|11255840|pir||T49209
  misc_feature (19)..(295): Homolog of NCBI NO: 34907994 NR Description: leucoanthocyanidin dioxygenase-like protein
  misc_feature (287)..(367): Homolog of NCBI NO: 34907994 NR Description: leucoanthocyanidin dioxygenase-like protein
  misc_feature (21)..(372): Homolog of NCBI NO: 15224472 NR Description: putative anthocyanidin synthase; protein id: supported by cDNA: 256433., supported by cDNA: gi_17065133, by cDNA: gi_20259907 [Arabidopsis thaliana]
  misc_feature (21)..(372): Homolog of NCBI NO: 21554535 NR Description: putative anthocyanidin synthase [Arabidopsis
  misc_feature (24)..(358): Homolog of NCBI NO: 2116599 NR Description: leucoanthocyanidin dioxygenase [Perilla
  misc_feature (23)..(367): Homolog of NCBI NO: 20260150 NR Description: strong similarity to naringenin 3-dioxygenase
MSDQDKNKIEIKNKSGLGEKWPEPIVRVQSLAESNLTSLPDRYIKPPSQRPQTTIIDHQPEVADINIPIIDLDSLFSGNEDDKKRISEACREWGFFQVINHGVKPELMDAARETWKSFFNLPVEAKEVYSNSPRTYEGYGSRLGVEKGAILDWNDYYYLHFLPLALKDFNKWPSLPSNIREMNDEYGKELVKLGGRLMTILSSNLGLRAEQLQEAFGGEDVGACLRVNYYPKCPQPELALGLSPHSDPGGMTILLPDDQVVGLQVRHGDTWITVNPLRHAFIVNIGDQIQILSNSKYKSVEHRVIVNSEKERVSLAFFYNPKSDIPIQPMQQLVTSTMPPLYPPMTFDQYRLFIRTQGPRGKSHVESHISPR

SEQ ID NO: 89852 - DNA, 1982 bp, Arabidopsis thaliana
  misc_feature (1)..(1982): Ceres Seq. ID no. 12720859
  misc_feature: MA Experiment ID: 20000179 Result: Up-regulated in Transcription
  misc_feature: MA Experiment 20000179 PARAMETER Experiment Name: At_Germinating_Seeds_P Parameter: Age (hr) Value: 6 vs. 0
  misc_feature: MA Experiment 20000179 PARAMETER Experiment Name: At_Germinating_Seeds_P Parameter: Tissue Value: Germinating Seeds
  misc_feature: MA Experiment ID: 20000180 Result: Up-regulated in Transcription
  misc_feature: MA Experiment 20000180 PARAMETER Experiment Name: At_Germinating_Seeds_P Parameter: Age (hr) Value: 24 vs. 0
  misc_feature: MA Experiment 20000180 PARAMETER Experiment Name: At_Germinating_Seeds_P Parameter: Tissue Value: Germinating Seeds
  misc_feature: MA Experiment ID: 20000184 Result: Down-regulated in Transcription
  misc_feature: MA Experiment 20000184 PARAMETER Experiment Name: At_Shoots__P Parameter: Age (day) Value: 7
  misc_feature: MA Experiment 20000184 PARAMETER Experiment Name: At_Shoots__P Parameter: Tissue Value: Shoots vs. Whole Plant
atcgttgtggattctctccgatcatgtcgtcgaagaaagcgaagacgaagaacgaggcgagtagcagccgtggtggcatcggcggagagagtatagtcgctgattgtggacgaaataaatcaacttgcggttactgtaaatcttctacccgctttagtatttctcacggtttatggacagagagactcaccgttaatgactatcaagctcttcttgacagtggatggagacgatctggctgctatctttacaaacctgagatggagaagacttgttgcccttcttatacaatccgcttgaaagcaagtgattttgtcccttctaaggagcagcagcgagtgcgtagaagaatagaaaggtttttggatggtgaactagatgcgaagccgagtgagcagacagaagatcaagatgtctctttctcccgtgaagtttcagtgtcagtgaaaaaatcacttggagctgctaaaagagaaaaaaacaatgaactggaaccaatcatgaaagatttgtctgaacaaattgataatgcggtacaaaaatgcatacagagtggtgagtttccttctaatgttcagattcccaaagcttcagtaaagaaagttttttctgctaaaaggaagaaactagctgaagggtcagaagacctcttatacaccagcaacattgcttttccaatagtagctgctatgaaacacacacagacattggagaaaggcaaaaacgtagaagaaaacagattatcaccagaggctgtttctgagaagttgttaagtgcaatgaataaggttggagagtttactggtttttctgttaaggtctccaagggtcatatcaacttcctttcagctacccaagttacttcctcagatagaaatgaaggtgaagaaagcctatgtgctacaacaataaagtcttcttcgaacaagcttcatgcaagaaagcggaagctggagatgcacttgaaaaggtcgagttttgaaccagaggaatatgaattatacaaacggtatcaaatgaaagtgcataatgataagccggagagcatctcagaaacttcatacaaacggtttttggtagacactccgctcactgaagttccttcttcaggttatgatgatgaagaaaagattcctctttgtggctttggttctttccatcaacaataccgagttgatgaccgtctaattgctgttggggtgattgatattcttcctaaatgtttgtctagtaaatacctgttctgggatccggatttcgcatccttgtctcttggaaactactcagccctgcaagaaatcgattgggtaaaacagaaccaagctcattgctctactcttgagtattactatcttggctattacatacattcctgtaacaagatgagatataaagcagcctatcgtccgtctgagcttctatgccctctccggtaccaatgggttccattcgaagtagccaagcctctgcttgataaaaagccttattccgtcttgtccaatatcagtaaggtttcttcatcatcatcatcacctcaagcttctgaaaccctattggaatctacgagtgaacatgaagacatggaacaaggggatacaaatgatgatgatgatgaaatgtataactctgatgaagactcagactcagactctagcagtagcagaaaccggagtgacattaccaatatccttatcagtcttaatggacctcgacttcgatacaaggatataccgcggttcaagaatccagtggttcagaaacaactcgaatcgatgttggttagttacaggaaagttgttggggccgagctatcggagataatggtgtatgaactccggtaacattaagcttaagtgcttaactcaagccagttgaaagcattttgcaacattattaacaatattagtgttgtcatgtgtctccttattttgatcacatgatacccaaaaaaatatataatctataattgttacatttttccc

SEQ ID NO: 89853 - protein, 612 aa, Arabidopsis thaliana
  peptide (1)..(612): Ceres Seq. ID no. 12720860
  misc_feature (323)..(482): Pfam Name: Arginine-tRNA-protein transferase, C terminus Pfam Description: Arginine-tRNA-protein transferase, C terminus
  misc_feature (16)..(562): Homolog of NCBI NO: 15239222 NR Description: arginine-tRNA-protein transferase 1 homolog; id: At5g05700.1, supported by cDNA: gi_3806097 [Arabidopsis
  misc_feature (523)..(611): Homolog of NCBI NO: 15239222 NR Description: arginine-tRNA-protein transferase 1 homolog; id: At5g05700.1, supported by cDNA: gi_3806097 [Arabidopsis
  misc_feature (16)..(562): Homolog of NCBI NO: 11357175 NR Description: arginine-tRNA-protein transferase 1 [imported] -
  misc_feature (512)..(611): Homolog of NCBI NO: 11357175 NR Description: arginine-tRNA-protein transferase 1 [imported] -
  misc_feature (257)..(495): Homolog of NCBI NO: 22002033 NR Description: Arginine-tRNA-protein transferase 1
  misc_feature (27)..(176): Homolog of NCBI NO: 22002033 NR Description: Arginine-tRNA-protein transferase 1
  misc_feature (257)..(495): Homolog of NCBI NO: 3806094 NR Description: arginine-tRNA-protein transferase 1-1p; ATE1-1p
  misc_feature (42)..(176): Homolog of NCBI NO: 3806094 NR Description: arginine-tRNA-protein transferase 1-1p; ATE1-1p
  misc_feature (257)..(495): Homolog of NCBI NO: 3806096 NR Description: arginine-tRNA-protein transferase 1-2p; ATE1-2p
  misc_feature (42)..(176): Homolog of NCBI NO: 3806096 NR Description: arginine-tRNA-protein transferase 1-2p; ATE1-2p
RCGFSPIMSSKKAKTKNEASSSRGGIGGESIVADCGRNKSTCGYCKSSTRFSISHGLWTERLTVNDYQALLDSGWRRSGCYLYKPEMEKTCCPSYTIRLKASDFVPSKEQQRVRRRIERFLDGELDAKPSEQTEDQDVSFSREVSVSVKKSLGAAKREKNNELEPIMKDLSEQIDNAVQKCIQSGEFPSNVQIPKASVKKVFSAKRKKLAEGSEDLLYTSNIAFPIVAAMKHTQTLEKGKNVEENRLSPEAVSEKLLSAMNKVGEFTGFSVKVSKGHINFLSATQVTSSDRNEGEESLCATTIKSSSNKLHARKRKLEMHLKRSSFEPEEYELYKRYQMKVHNDKPESISETSYKRFLVDTPLTEVPSSGYDDEEKIPLCGFGSFHQQYRVDDRLIAVGVIDILPKCLSSKYLFWDPDFASLSLGNYSALQEIDWVKQNQAHCSTLEYYYLGYYIHSCNKMRYKAAYRPSELLCPLRYQWVPFEVAKPLLDKKPYSVLSNISKVSSSSSSPQASETLLESTSEHEDMEQGDTNDDDDEMYNSDEDSDSDSSSSRNRSDITNILISLNGPRLRYKDIPRFKNPVVQKQLESMLVSYRKVVGAELSEIMVYELR

SEQ ID NO: 89854 - protein, 605 aa, Arabidopsis thaliana
  peptide (1)..(605): Ceres Seq. ID no. 12720861
  misc_feature (316)..(475): Pfam Name: Arginine-tRNA-protein transferase, C terminus Pfam Description: Arginine-tRNA-protein transferase, C terminus
  misc_feature (9)..(555): Homolog of NCBI NO: 15239222 NR Description: arginine-tRNA-protein transferase 1 homolog; id: At5g05700.1, supported by cDNA: gi_3806097 [Arabidopsis
  misc_feature (516)..(604): Homolog of NCBI NO: 15239222 NR Description: arginine-tRNA-protein transferase 1 homolog; id: At5g05700.1, supported by cDNA: gi_3806097 [Arabidopsis
  misc_feature (9)..(555): Homolog of NCBI NO: 11357175 NR Description: arginine-tRNA-protein transferase 1 [imported] -
  misc_feature (505)..(604): Homolog of NCBI NO: 11357175 NR Description: arginine-tRNA-protein transferase 1 [imported] -
  misc_feature (250)..(488): Homolog of NCBI NO: 22002033 NR Description: Arginine-tRNA-protein transferase 1
  misc_feature (20)..(169): Homolog of NCBI NO: 22002033 NR Description: Arginine-tRNA-protein transferase 1
  misc_feature (250)..(488): Homolog of NCBI NO: 3806094 NR Description: arginine-tRNA-protein transferase 1-1p; ATE1-1p
  misc_feature (35)..(169): Homolog of NCBI NO: 3806094 NR Description: arginine-tRNA-protein transferase 1-1p; ATE1-1p
  misc_feature (250)..(488): Homolog of NCBI NO: 3806096 NR Description: arginine-tRNA-protein transferase 1-2p; ATE1-2p
  misc_feature (35)..(169): Homolog of NCBI NO: 3806096 NR Description: arginine-tRNA-protein transferase 1-2p; ATE1-2p
MSSKKAKTKNEASSSRGGIGGESIVADCGRNKSTCGYCKSSTRFSISHGLWTERLTVNDYQALLDSGWRRSGCYLYKPEMEKTCCPSYTIRLKASDFVPSKEQQRVRRRIERFLDGELDAKPSEQTEDQDVSFSREVSVSVKKSLGAAKREKNNELEPIMKDLSEQIDNAVQKCIQSGEFPSNVQIPKASVKKVFSAKRKKLAEGSEDLLYTSNIAFPIVAAMKHTQTLEKGKNVEENRLSPEAVSEKLLSAMNKVGEFTGFSVKVSKGHINFLSATQVTSSDRNEGEESLCATTIKSSSNKLHARKRKLEMHLKRSSFEPEEYELYKRYQMKVHNDKPESISETSYKRFLVDTPLTEVPSSGYDDEEKIPLCGFGSFHQQYRVDDRLIAVGVIDILPKCLSSKYLFWDPDFASLSLGNYSALQEIDWVKQNQAHCSTLEYYYLGYYIHSCNKMRYKAAYRPSELLCPLRYQWVPFEVAKPLLDKKPYSVLSNISKVSSSSSSPQASETLLESTSEHEDMEQGDTNDDDDEMYNSDEDSDSDSSSSRNRSDITNILISLNGPRLRYKDIPRFKNPVVQKQLESMLVSYRKVVGAELSEIMVYELR

SEQ ID NO: 89855 - protein, 526 aa, Arabidopsis thaliana
  peptide (1)..(526): Ceres Seq. ID no. 12720862
  misc_feature (237)..(396): Pfam Name: Arginine-tRNA-protein transferase, C terminus Pfam Description: Arginine-tRNA-protein transferase, C terminus
  misc_feature (1)..(476): Homolog of NCBI NO: 15239222 NR Description: arginine-tRNA-protein transferase 1 homolog; id: At5g05700.1, supported by cDNA: gi_3806097 [Arabidopsis
  misc_feature (437)..(525): Homolog of NCBI NO: 15239222 NR Description: arginine-tRNA-protein transferase 1 homolog; id: At5g05700.1, supported by cDNA: gi_3806097 [Arabidopsis
  misc_feature (1)..(476): Homolog of NCBI NO: 11357175 NR Description: arginine-tRNA-protein transferase 1 [imported] -
  misc_feature (426)..(525): Homolog of NCBI NO: 11357175 NR Description: arginine-tRNA-protein transferase 1 [imported] -
  misc_feature (171)..(409): Homolog of NCBI NO: 22002033 NR Description: Arginine-tRNA-protein transferase 1
  misc_feature (1)..(90): Homolog of NCBI NO: 22002033 NR Description: Arginine-tRNA-protein transferase 1
  misc_feature (171)..(409): Homolog of NCBI NO: 3806094 NR Description: arginine-tRNA-protein transferase 1-1p; ATE1-1p
  misc_feature (1)..(90): Homolog of NCBI NO: 3806094 NR Description: arginine-tRNA-protein transferase 1-1p; ATE1-1p
  misc_feature (171)..(409): Homolog of NCBI NO: 3806096 NR Description: arginine-tRNA-protein transferase 1-2p; ATE1-2p
  misc_feature (1)..(90): Homolog of NCBI NO: 3806096 NR Description: arginine-tRNA-protein transferase 1-2p; ATE1-2p
MEKTCCPSYTIRLKASDFVPSKEQQRVRRRIERFLDGELDAKPSEQTEDQDVSFSREVSVSVKKSLGAAKREKNNELEPIMKDLSEQIDNAVQKCIQSGEFPSNVQIPKASVKKVFSAKRKKLAEGSEDLLYTSNIAFPIVAAMKHTQTLEKGKNVEENRLSPEAVSEKLLSAMNKVGEFTGFSVKVSKGHINFLSATQVTSSDRNEGEESLCATTIKSSSNKLHARKRKLEMHLKRSSFEPEEYELYKRYQMKVHNDKPESISETSYKRFLVDTPLTEVPSSGYDDEEKIPLCGFGSFHQQYRVDDRLIAVGVIDILPKCLSSKYLFWDPDFASLSLGNYSALQEIDWVKQNQAHCSTLEYYYLGYYIHSCNKMRYKAAYRPSELLCPLRYQWVPFEVAKPLLDKKPYSVLSNISKVSSSSSSPQASETLLESTSEHEDMEQGDTNDDDDEMYNSDEDSDSDSSSSRNRSDITNILISLNGPRLRYKDIPRFKNPVVQKQLESMLVSYRKVVGAELSEIMVYELR

SEQ ID NO: 89856 - DNA, 1797 bp, Arabidopsis thaliana
  misc_feature (1)..(1797): Ceres Seq. ID no. 12720871
  misc_feature: MA Experiment ID: 20000314 Result: Up-regulated in Transcription
  misc_feature: MA Experiment 20000314 PARAMETER Experiment Name: At_14day_Shoots-Roots_Sub_P Parameter: Age (day) Value: 14
  misc_feature: MA Experiment 20000314 PARAMETER Experiment Name: At_14day_Shoots-Roots_Sub_P Parameter: Organism Value: A. thaliana
  misc_feature: MA Experiment 20000314 PARAMETER Experiment Name: At_14day_Shoots-Roots_Sub_P Parameter: Plant Line Value: WS
  misc_feature: MA Experiment 20000314 PARAMETER Experiment Name: At_14day_Shoots-Roots_Sub_P Parameter: Tissue Value: Roots vs. Whole Plant
  misc_feature: MA Experiment ID: 20000347 Result: Up-regulated in Transcription
  misc_feature: MA Experiment 20000347 PARAMETER Experiment Name: At_2mM_SA_Sub_P Parameter: Age (day) Value: 14
  misc_feature: MA Experiment 20000347 PARAMETER Experiment Name: At_2mM_SA_Sub_P Parameter: Organism Value: A. thaliana
  misc_feature: MA Experiment 20000347 PARAMETER Experiment Name: At_2mM_SA_Sub_P Parameter: Plant Line Value: WS
  misc_feature: MA Experiment 20000347 PARAMETER Experiment Name: At_2mM_SA_Sub_P Parameter: Timepoint (hr) Value: 6
  misc_feature: MA Experiment 20000347 PARAMETER Experiment Name: At_2mM_SA_Sub_P Parameter: Tissue Value: Aerial
  misc_feature: MA Experiment 20000347 PARAMETER Experiment Name: At_2mM_SA_Sub_P Parameter: Treatment Value: 2mM SA vs. No Treatment
ctggatcaatcatcatcttcatcaatttccagattcagattccaaatctccgaagcttaacgaaaacaatggcggcagaacctaaccctaagaatttccctgtcctctcttatgtcttggctcgtctcccttctttcaccgccaaatccccttcctcctccgttcctcccttcgacatcgaacaaccaccaccatcatcatcatcatcatcgattgagatcgtcactcagatgcctcacttaacacaaccagatgttctcgcttcaatgacaagtgcgatctctgacgtcgccgagactcgatctatccttcgaaccctaggacctagaccagatcacgaatcagtcgataaggctcgtgctaaactctcggaaatcgaatcgttcttatctgaatcgttcgaggatatcgcgttaaccgatgcggcggcgaaagatgagaagaggagacaagagatggatcaggagaagacttggtgtgagtcgattttgaagcttgatgaggttcatgcttcgtatgagaagcttttgaaagaagcagaggagaggcttgttaggatttatgaatctgctgagaagaatgcggcggaggatgaggagaatgttgcggctgtggaggttaatgaggaggttgttgggatattgcagcatgcttctgctaatccggtggatcgtgttgatttgtctgggaggaaactgaggttgctacctgaagcttttgggaggattcaagggttgcttgttcttaatctctccaacaataagcttgagtcgattcctgattcaattgctggattgcatagtcttgttgaactggatgtctccacgaattctctggagacattacctgattccatcggtttactgtccaaactaaaaatcctgaatgtttcgactaacaagctcacatccttgcctgactccatctgccgctgtgggtcgttggttatcttggacgtgagcttcaaccgtctcacctacttaccgaccaacatcggtcctgagctagtgaatctagaaaagctcctggttcagtataacaagatccgatccttcccgaccagtataggcgaaatgagatccctaaaacacctcgacgcccacttcaacgaacttaacggccttcctgattctttcgtgttgctcacaaatctcgagtacttaaacctaagcagcaacttcagtgatctcaaggatctcccattctcattcggcgaactcataagcctccaagaactcgacttgagtaacaaccaaatccatgccctccctgacacttttggcacacttgatagcctgaccaaactgaatgtggatcagaacccgctcgtcgtcccacccgaggaagtggtgaaggaaggtgttgaagctgtgaagacgtacatgggtcagagaaggatcagtatgttggaagaagaagagaagaagaaaatggaggaagagatggagcaggcaaacgccgggtggctcacacgaaccacatcgaagctgaaaacatatgtcgcagatgtttcagagtatctcggatcaaattctcctcgagacccttaccttgaacgacagctatgatgtgacttggcttgaagaacaatgaatccaaagaggttgaaatttctcgttttggctggttctgtctcagttttttctcctatcattcggtatataacgaaggggctctcttcgttactgtgttgtctggtgttattctttctgacgggtaaggcctgtcattaacttaggttcaattcaaacttaaaagactctcacggggtccaactaataagagaaaacacttagt

SEQ ID NO: 89857 - protein, 521 aa, Arabidopsis thaliana
  peptide (1)..(521): Ceres Seq. ID no. 12720872
  misc_feature (383)..(407): Pfam Name: Leucine Rich Repeat Pfam Description: Leucine Rich Repeat
  misc_feature (23)..(521): Homolog of NCBI NO: 22330985 NR Description: hypothetical protein; protein id: At3g11330.1, by cDNA: gi_18175637 [Arabidopsis thaliana] unknown protein [Arabidopsis thaliana]
  misc_feature (23)..(521): Homolog of NCBI NO: 15239256 NR Description: putative protein; protein id: At5g05850.1 thaliana] >gi|9759110|dbj|BAB09679.1|
  misc_feature (23)..(447): Homolog of NCBI NO: 12321872 NR Description: hypothetical protein; 91861-89496 [Arabidopsis
  misc_feature (111)..(521): Homolog of NCBI NO: 12321872 NR Description: hypothetical protein; 91861-89496 [Arabidopsis
  misc_feature (23)..(490): Homolog of NCBI NO: 7489337 NR Description: leucine-rich protein - common sunflower
  misc_feature (89)..(520): Homolog of NCBI NO: 38605760 NR Description: OSJNBa0044K18.1 [Oryza sativa (japonica
  misc_feature (145)..(521): Homolog of NCBI NO: 18391461 NR Description: expressed protein; protein id: At1g12970.1, by cDNA: gi_17063164 [Arabidopsis thaliana] At1g12970/F13K23_18 [Arabidopsis thaliana]
  misc_feature (141)..(508): Homolog of NCBI NO: 30688342 NR Description: leucine rich repeat protein family [Arabidopsis
  misc_feature (32)..(521): Homolog of NCBI NO: 25518616 NR Description: hypothetical protein F13K23.23 - Arabidopsis >gi|8698744|gb|AAF78502.1|AC012187_22 Contains similarity to CYR1 Candida albicans gb|AB034965 and contains multiple Leucine Rich
  misc_feature (212)..(476): Homolog of NCBI NO: 38346910 NR Description: OSJNBb0015N08.10 [Oryza sativa (japonica
GSIIIFINFQIQIPNLRSLTKTMAAEPNPKNFPVLSYVLARLPSFTAKSPSSSVPPFDIEQPPPSSSSSSIEIVTQMPHLTQPDVLASMTSAISDVAETRSILRTLGPRPDHESVDKARAKLSEIESFLSESFEDIALTDAAAKDEKRRQEMDQEKTWCESILKLDEVHASYEKLLKEAEERLVRIYESAEKNAAEDEENVAAVEVNEEVVGILQHASANPVDRVDLSGRKLRLLPEAFGRIQGLLVLNLSNNKLESIPDSIAGLHSLVELDVSTNSLETLPDSIGLLSKLKILNVSTNKLTSLPDSICRCGSLVILDVSFNRLTYLPTNIGPELVNLEKLLVQYNKIRSFPTSIGEMRSLKHLDAHFNELNGLPDSFVLLTNLEYLNLSSNFSDLKDLPFSFGELISLQELDLSNNQIHALPDTFGTLDSLTKLNVDQNPLVVPPEEVVKEGVEAVKTYMGQRRISMLEEEEKKKMEEEMEQANAGWLTRTTSKLKTYVADVSEYLGSNSPRDPYLERQL

SEQ ID NO: 89858 - protein, 499 aa, Arabidopsis thaliana
  peptide (1)..(499): Ceres Seq. ID no. 12720873
  misc_feature (361)..(385): Pfam Name: Leucine Rich Repeat Pfam Description: Leucine Rich Repeat
  misc_feature (1)..(499): Homolog of NCBI NO: 22330985 NR Description: hypothetical protein; protein id: At3g11330.1, by cDNA: gi_18175637 [Arabidopsis thaliana] unknown protein [Arabidopsis thaliana]
  misc_feature (1)..(499): Homolog of NCBI NO: 15239256 NR Description: putative protein; protein id: At5g05850.1 thaliana] >gi|9759110|dbj|BAB09679.1|
  misc_feature (1)..(425): Homolog of NCBI NO: 12321872 NR Description: hypothetical protein; 91861-89496 [Arabidopsis
  misc_feature (89)..(499): Homolog of NCBI NO: 12321872 NR Description: hypothetical protein; 91861-89496 [Arabidopsis
  misc_feature (1)..(468): Homolog of NCBI NO: 7489337 NR Description: leucine-rich protein - common sunflower
  misc_feature (67)..(498): Homolog of NCBI NO: 38605760 NR Description: OSJNBa0044K18.1 [Oryza sativa (japonica
  misc_feature (123)..(499): Homolog of NCBI NO: 18391461 NR Description: expressed protein; protein id: At1g12970.1, by cDNA: gi_17063164 [Arabidopsis thaliana] At1g12970/F13K23_18 [Arabidopsis thaliana]
  misc_feature (119)..(486): Homolog of NCBI NO: 30688342 NR Description: leucine rich repeat protein family [Arabidopsis
  misc_feature (10)..(499): Homolog of NCBI NO: 25518616 NR Description: hypothetical protein F13K23.23 - Arabidopsis >gi|8698744|gb|AAF78502.1|AC012187_22 Contains similarity to CYR1 Candida albicans gb|AB034965 and contains multiple Leucine Rich
  misc_feature (190)..(454): Homolog of NCBI NO: 38346910 NR Description: OSJNBb0015N08.10 [Oryza sativa (japonica
MAAEPNPKNFPVLSYVLARLPSFTAKSPSSSVPPFDIEQPPPSSSSSSIEIVTQMPHLTQPDVLASMTSAISDVAETRSILRTLGPRPDHESVDKARAKLSEIESFLSESFEDIALTDAAAKDEKRRQEMDQEKTWCESILKLDEVHASYEKLLKEAEERLVRIYESAEKNAAEDEENVAAVEVNEEVVGILQHASANPVDRVDLSGRKLRLLPEAFGRIQGLLVLNLSNNKLESIPDSIAGLHSLVELDVSTNSLETLPDSIGLLSKLKILNVSTNKLTSLPDSICRCGSLVILDVSFNRLTYLPTNIGPELVNLEKLLVQYNKIRSFPTSIGEMRSLKHLDAHFNELNGLPDSFVLLTNLEYLNLSSNFSDLKDLPFSFGELISLQELDLSNNQIHALPDTFGTLDSLTKLNVDQNPLVVPPEEVVKEGVEAVKTYMGQRRISMLEEEEKKKMEEEMEQANAGWLTRTTSKLKTYVADVSEYLGSNSPRDPYLERQL

SEQ ID NO: 89859 - protein, 445 aa, Arabidopsis thaliana
  peptide (1)..(445): Ceres Seq. ID no. 12720874
  misc_feature (307)..(331): Pfam Name: Leucine Rich Repeat Pfam Description: Leucine Rich Repeat
  misc_feature (1)..(445): Homolog of NCBI NO: 22330985 NR Description: hypothetical protein; protein id: At3g11330.1, by cDNA: gi_18175637 [Arabidopsis thaliana] unknown protein [Arabidopsis thaliana]
  misc_feature (1)..(445): Homolog of NCBI NO: 15239256 NR Description: putative protein; protein id: At5g05850.1 thaliana] >gi|9759110|dbj|BAB09679.1|
  misc_feature (1)..(371): Homolog of NCBI NO: 12321872 NR Description: hypothetical protein; 91861-89496 [Arabidopsis
  misc_feature (35)..(445): Homolog of NCBI NO: 12321872 NR Description: hypothetical protein; 91861-89496 [Arabidopsis
  misc_feature (1)..(414): Homolog of NCBI NO: 7489337 NR Description: leucine-rich protein - common sunflower
  misc_feature (13)..(444): Homolog of NCBI NO: 38605760 NR Description: OSJNBa0044K18.1 [Oryza sativa (japonica
  misc_feature (69)..(445): Homolog of NCBI NO: 18391461 NR Description: expressed protein; protein id: At1g12970.1, by cDNA: gi_17063164 [Arabidopsis thaliana] At1g12970/F13K23_18 [Arabidopsis thaliana]
  misc_feature (65)..(432): Homolog of NCBI NO: 30688342 NR Description: leucine rich repeat protein family [Arabidopsis
  misc_feature (1)..(445): Homolog of NCBI NO: 25518616 NR Description: hypothetical protein F13K23.23 - Arabidopsis >gi|8698744|gb|AAF78502.1|AC012187_22 Contains similarity to CYR1 Candida albicans gb|AB034965 and contains multiple Leucine Rich
  misc_feature (136)..(400): Homolog of NCBI NO: 38346910 NR Description: OSJNBb0015N08.10 [Oryza sativa (japonica
MPHLTQPDVLASMTSAISDVAETRSILRTLGPRPDHESVDKARAKLSEIESFLSESFEDIALTDAAAKDEKRRQEMDQEKTWCESILKLDEVHASYEKLLKEAEERLVRIYESAEKNAAEDEENVAAVEVNEEVVGILQHASANPVDRVDLSGRKLRLLPEAFGRIQGLLVLNLSNNKLESIPDSIAGLHSLVELDVSTNSLETLPDSIGLLSKLKILNVSTNKLTSLPDSICRCGSLVILDVSFNRLTYLPTNIGPELVNLEKLLVQYNKIRSFPTSIGEMRSLKHLDAHFNELNGLPDSFVLLTNLEYLNLSSNFSDLKDLPFSFGELISLQELDLSNNQIHALPDTFGTLDSLTKLNVDQNPLVVPPEEVVKEGVEAVKTYMGQRRISMLEEEEKKKMEEEMEQANAGWLTRTTSKLKTYVADVSEYLGSNSPRDPYLERQL

SEQ ID NO: 89860 - DNA, 1872 bp, Arabidopsis thaliana
  misc_feature (1)..(1872): Ceres Seq. ID no. 12720894
  misc_feature: MA Experiment ID: 20000180 Result: Down-regulated in Transcription
  misc_feature: MA Experiment 20000180 PARAMETER Experiment Name: At_Germinating_Seeds_P Parameter: Age (hr) Value: 24 vs. 0
  misc_feature: MA Experiment 20000180 PARAMETER Experiment Name: At_Germinating_Seeds_P Parameter: Tissue Value: Germinating Seeds
  misc_feature: MA Experiment ID: 20001248 Result: Up-regulated in Transcription
  misc_feature: MA Experiment 20001248 PARAMETER Experiment Name: At_Far-red-induction_P Parameter: Age (day) Value: 7
  misc_feature: MA Experiment 20001248 PARAMETER Experiment Name: At_Far-red-induction_P Parameter: Light Value: Far-red vs. White
  misc_feature: MA Experiment 20001248 PARAMETER Experiment Name: At_Far-red-induction_P Parameter: Organism Value: A. thaliana
  misc_feature: MA Experiment 20001248 PARAMETER Experiment Name: At_Far-red-induction_P Parameter: Plant Line Value: Columbia
  misc_feature: MA Experiment 20001248 PARAMETER Experiment Name: At_Far-red-induction_P Parameter: Timepoint (hr) Value: 4
  misc_feature: MA Experiment 20001248 PARAMETER Experiment Name: At_Far-red-induction_P Parameter: Tissue Value: Whole Plant
atgatcgtcgttacaagctttgtacggaactccgccgtcgctgcggtggcttcgacgccatggaacgtacgtttgagagagctcgcatatcagtcattgttttctgaatctatatctctttaccggtcaatgctccgttctggttcttctcccgacgcgttctctttccctttcattctcaagtcttgtgcttccctttcgctccctgtctccggccaacagctacattgccacgtgaccaaaggcggttgcgagactgagccgtttgtactaacggctctgatctcaatgtattgtaaatgcggtttggttgcagatgcacgtaaagtgttcgaagaaaatcctcagtcaagtcagcttagtgtttgttacaatgctttgatatctgggtacacagcaaactcgaaggtcactgatgctgcgtatatgtttcgtagaatgaaggaaactggtgtgtctgtggattcagttacaatgcttgggcttgtcccgctatgcacggttcctgaatacctctggcttgggaggtctcttcacggtcaatgtgttaaaggaggactggattctgaagtagctgttttgaatagtttcatcacaatgtacatgaaatgcgggtcggtagaagctggtaggaggttgtttgatgagatgcctgtgaagggtttgattacttggaatgctgtgatttctggatattcacagaacgggctagcttacgatgttctggaactttatgagcagatgaaatcatcgggtgtttgtcctgatccttttacattggttagtgttctgtcttcttgtgcccatcttggagctaagaagattggtcacgaagtagggaagttagtagaatccaatggttttgtaccaaatgtttttgtaagcaatgcatcgattagcatgtatgctagatgcggtaacttggcaaaggcacgtgctgttttcgacatcatgcctgtaaaaagcttagtttcatggaccgccatgattggttgctatgggatgcatggaatgggagagattgggcttatgctttttgatgatatgataaaaagaggcataagaccagatggggcggtgtttgtaatggttttatctgcttgcagccattcagggctaacggataaaggtttagagttatttagagcgatgaagagagagtataagctggagcctggtcctgaacactactcttgtttagttgatctactcggaagagctggtcggctagatgaagccatggagtttatagagtcaatgcctgttgaaccggacggtgctgtttggggtgctctattgggtgcttgtaaaatccataagaatgtggatatggcagagttagcttttgcaaaggtgattgagtttgaacccaataacattggctactatgtattgatgtcaaatatatattcagactcgaaaaaccaagaaggaatctggagaatccgggtaatgatgagagagagagcattcaggaaaaagcctgggtatagttatgtggaacacaagggaagagttcacttgtttttagctggcgatagaagtcatgagcaaacagaggaagtccatagaatgttggatgagttagagacttctgtgatggagcttgcgggaaacatggactgtgatagaggcgaagaggtttcgagcactacccgtgagcatagcgagaggttagcaatagcttttgggattctcaacagtattccaggcacagaaattcttgtgataaagaatttgagggtttgtgaagattgtcatgtgttcctcaagcaggttagcaagattgtagatcgccagtttgttgtaagggatgcatctcggttccactatttcaaagacggggtctgctcgtgcaaagattactggtga

SEQ ID NO: 89861 - protein, 623 aa, Arabidopsis thaliana
  peptide (1)..(623): Ceres Seq. ID no. 12720895
  misc_feature (324)..(358): Pfam Name: PPR repeat Pfam Description: PPR repeat
  misc_feature (20)..(623): Homolog of NCBI NO: 34909302 NR Description: OJ1529_G03.13 [Oryza sativa (japonica
  misc_feature (21)..(623): Homolog of NCBI NO: 15234831 NR Description: putative protein; protein id: At4g30700.1
  misc_feature (20)..(623): Homolog of NCBI NO: 11994419 NR Description: selenium-binding protein-like [Arabidopsis
  misc_feature (21)..(623): Homolog of NCBI NO: 9279668 NR Description: selenium-binding protein-like [Arabidopsis
  misc_feature (21)..(623): Homolog of NCBI NO: 15231617 NR Description: unknown protein; protein id: At3g26780.1
  misc_feature (20)..(622): Homolog of NCBI NO: 15230593 NR Description: unknown protein; protein id: At3g12770.1
  misc_feature (104)..(623): Homolog of NCBI NO: 15229426 NR Description: hypothetical protein; protein id: At3g23330.1 thaliana] >gi|11994318|dbj|BAB02277.1|
  misc_feature (21)..(121): Homolog of NCBI NO: 15229426 NR Description: hypothetical protein; protein id: At3g23330.1 thaliana] >gi|11994318|dbj|BAB02277.1|
  misc_feature (21)..(623): Homolog of NCBI NO: 34897884 NR Description: Similar to Arabidopsis thaliana DNA chromosome 4,
  misc_feature (21)..(623): Homolog of NCBI NO: 15220337 NR Description: hypothetical protein; protein id: At1g11290.1
MIVVTSFVRNSAVAAVASTPWNVRLRELAYQSLFSESISLYRSMLRSGSSPDAFSFPFILKSCASLSLPVSGQQLHCHVTKGGCETEPFVLTALISMYCKCGLVADARKVFEENPQSSQLSVCYNALISGYTANSKVTDAAYMFRRMKETGVSVDSVTMLGLVPLCTVPEYLWLGRSLHGQCVKGGLDSEVAVLNSFITMYMKCGSVEAGRRLFDEMPVKGLITWNAVISGYSQNGLAYDVLELYEQMKSSGVCPDPFTLVSVLSSCAHLGAKKIGHEVGKLVESNGFVPNVFVSNASISMYARCGNLAKARAVFDIMPVKSLVSWTAMIGCYGMHGMGEIGLMLFDDMIKRGIRPDGAVFVMVLSACSHSGLTDKGLELFRAMKREYKLEPGPEHYSCLVDLLGRAGRLDEAMEFIESMPVEPDGAVWGALLGACKIHKNVDMAELAFAKVIEFEPNNIGYYVLMSNIYSDSKNQEGIWRIRVMMRERAFRKKPGYSYVEHKGRVHLFLAGDRSHEQTEEVHRMLDELETSVMELAGNMDCDRGEEVSSTTREHSERLAIAFGILNSIPGTEILVIKNLRVCEDCHVFLKQVSKIVDRQFVVRDASRFHYFKDGVCSCKDYW

SEQ ID NO: 89862 - protein, 580 aa, Arabidopsis thaliana
  peptide (1)..(580): Ceres Seq. ID no. 12720896
  misc_feature (281)..(315): Pfam Name: PPR repeat Pfam Description: PPR repeat
  misc_feature (1)..(580): Homolog of NCBI NO: 34909302 NR Description: OJ1529_G03.13 [Oryza sativa (japonica
  misc_feature (1)..(580): Homolog of NCBI NO: 15234831 NR Description: putative protein; protein id: At4g30700.1
  misc_feature (1)..(580): Homolog of NCBI NO: 11994419 NR Description: selenium-binding protein-like [Arabidopsis
  misc_feature (1)..(580): Homolog of NCBI NO: 9279668 NR Description: selenium-binding protein-like [Arabidopsis
  misc_feature (1)..(580): Homolog of NCBI NO: 15231617 NR Description: unknown protein; protein id: At3g26780.1
  misc_feature (1)..(579): Homolog of NCBI NO: 15230593 NR Description: unknown protein; protein id: At3g12770.1
  misc_feature (61)..(580): Homolog of NCBI NO: 15229426 NR Description: hypothetical protein; protein id: At3g23330.1 thaliana] >gi|11994318|dbj|BAB02277.1|
  misc_feature (1)..(78): Homolog of NCBI NO: 15229426 NR Description: hypothetical protein; protein id: At3g23330.1 thaliana] >gi|11994318|dbj|BAB02277.1|
  misc_feature (1)..(580): Homolog of NCBI NO: 34897884 NR Description: Similar to Arabidopsis thaliana DNA chromosome 4,
  misc_feature (1)..(580): Homolog of NCBI NO: 15220337 NR Description: hypothetical protein; protein id: At1g11290.1
MLRSGSSPDAFSFPFILKSCASLSLPVSGQQLHCHVTKGGCETEPFVLTALISMYCKCGLVADARKVFEENPQSSQLSVCYNALISGYTANSKVTDAAYMFRRMKETGVSVDSVTMLGLVPLCTVPEYLWLGRSLHGQCVKGGLDSEVAVLNSFITMYMKCGSVEAGRRLFDEMPVKGLITWNAVISGYSQNGLAYDVLELYEQMKSSGVCPDPFTLVSVLSSCAHLGAKKIGHEVGKLVESNGFVPNVFVSNASISMYARCGNLAKARAVFDIMPVKSLVSWTAMIGCYGMHGMGEIGLMLFDDMIKRGIRPDGAVFVMVLSACSHSGLTDKGLELFRAMKREYKLEPGPEHYSCLVDLLGRAGRLDEAMEFIESMPVEPDGAVWGALLGACKIHKNVDMAELAFAKVIEFEPNNIGYYVLMSNIYSDSKNQEGIWRIRVMMRERAFRKKPGYSYVEHKGRVHLFLAGDRSHEQTEEVHRMLDELETSVMELAGNMDCDRGEEVSSTTREHSERLAIAFGILNSIPGTEILVIKNLRVCEDCHVFLKQVSKIVDRQFVVRDASRFHYFKDGVCSCKDYW

SEQ ID NO: 89863 - protein, 527 aa, Arabidopsis thaliana
  peptide (1)..(527): Ceres Seq. ID no. 12720897
  misc_feature (228)..(262): Pfam Name: PPR repeat Pfam Description: PPR repeat
  misc_feature (1)..(527): Homolog of NCBI NO: 34909302 NR Description: OJ1529_G03.13 [Oryza sativa (japonica
  misc_feature (1)..(527): Homolog of NCBI NO: 15234831 NR Description: putative protein; protein id: At4g30700.1
  misc_feature (1)..(527): Homolog of NCBI NO: 11994419 NR Description: selenium-binding protein-like [Arabidopsis
  misc_feature (1)..(527): Homolog of NCBI NO: 9279668 NR Description: selenium-binding protein-like [Arabidopsis
  misc_feature (1)..(527): Homolog of NCBI NO: 15231617 NR Description: unknown protein; protein id: At3g26780.1
  misc_feature (1)..(526): Homolog of NCBI NO: 15230593 NR Description: unknown protein; protein id: At3g12770.1
  misc_feature (8)..(527): Homolog of NCBI NO: 15229426 NR Description: hypothetical protein; protein id: At3g23330.1 thaliana] >gi|11994318|dbj|BAB02277.1|
  misc_feature (1)..(25): Homolog of NCBI NO: 15229426 NR Description: hypothetical protein; protein id: At3g23330.1 thaliana] >gi|11994318|dbj|BAB02277.1|
  misc_feature (1)..(527): Homolog of NCBI NO: 34897884 NR Description: Similar to Arabidopsis thaliana DNA chromosome 4,
  misc_feature (1)..(527): Homolog of NCBI NO: 15220337 NR Description: hypothetical protein; protein id: At1g11290.1
MYCKCGLVADARKVFEENPQSSQLSVCYNALISGYTANSKVTDAAYMFRRMKETGVSVDSVTMLGLVPLCTVPEYLWLGRSLHGQCVKGGLDSEVAVLNSFITMYMKCGSVEAGRRLFDEMPVKGLITWNAVISGYSQNGLAYDVLELYEQMKSSGVCPDPFTLVSVLSSCAHLGAKKIGHEVGKLVESNGFVPNVFVSNASISMYARCGNLAKARAVFDIMPVKSLVSWTAMIGCYGMHGMGEIGLMLFDDMIKRGIRPDGAVFVMVLSACSHSGLTDKGLELFRAMKREYKLEPGPEHYSCLVDLLGRAGRLDEAMEFIESMPVEPDGAVWGALLGACKIHKNVDMAELAFAKVIEFEPNNIGYYVLMSNIYSDSKNQEGIWRIRVMMRERAFRKKPGYSYVEHKGRVHLFLAGDRSHEQTEEVHRMLDELETSVMELAGNMDCDRGEEVSSTTREHSERLAIAFGILNSIPGTEILVIKNLRVCEDCHVFLKQVSKIVDRQFVVRDASRFHYFKDGVCSCKDYW

SEQ ID NO: 89864 - DNA, 2174 bp, Arabidopsis thaliana
  misc_feature (1)..(2174): Ceres Seq. ID no. 12720909
  misc_feature: MA Experiment ID: 20000180 Result: Up-regulated in Transcription
  misc_feature: MA Experiment 20000180 PARAMETER Experiment Name: At_Germinating_Seeds_P Parameter: Age (hr) Value: 24 vs. 0
  misc_feature: MA Experiment 20000180 PARAMETER Experiment Name: At_Germinating_Seeds_P Parameter: Tissue Value: Germinating Seeds
  misc_feature: MA Experiment ID: 20000227 Result: Up-regulated in Transcription
  misc_feature: MA Experiment 20000227 PARAMETER Experiment Name: At_Root-Tips-vs-Tops_P Parameter: Tissue Value: Root Tips vs. Root Tops
agtctgatcaaaaaacctcaaaacacagcaaccgccatttctttccaaattcccccaattcccattccaactttatcttctgaagtagaagaagaagccatagaaatgctttgaagtttctgtaaagagaaagatctacaattgttttgaatatgccgaggcagaatcaaagcgtagagaatctacttctacttggcaaaatcaggaaacgtggttgttcttcgccgacatcgtcgacttcttcgattctccgtgaaggttatagattcaaaagagcgatagttgttggtaaaagaggaggatccactactcctgtacctacatggagacttatgggtcgatctccttctccacgagcttccggtgctttacacgctgctgcttctccgtcgtctcactgcgggagcaaaaccggtaaagtatcagctcctgctcctgtttcagctaggaagttagctgcgacgctttgggagatgaacgagatgccttcacctagagttgtggaggaggctgcgccaatgattagaaagagtagaaaggagagaatcgcgccgcttcctccgccgagatcatcggttcattctggttctctaccgcctcatctttctgatccgtcgcatagtccagtctctgagaggatggaaagatcagggactgggagtcgccagagaagagcttcatcaactgtgcaaaagcttaggcttggagactgcaatgtgggggctagggatcctattaacagtggcagcttcatggatattgagactcgatcacgggtggagacaccgactgggtcaactgtgggtgtcaaaacacggttgaaggattgtagtaacgctctcacaacatcaaaagagcttctcaaaatcattaacagaatgtggggtcaagacgaccgcccatcttctagcatgtccctcgtctctgctttacattctgagctcgaaagagctcgcttacaggtcaatcagttaatccacgaacataaaccggaaaacaacgacattagctacttgatgaagcgttttgccgaagagaaagctgtgtggaaaagcaacgagcaagaagttgttgaggctgcaatcgaatctgttgctggtgagctagaagtggagaggaagctgaggagacggtttgagagcttgaacaagaaattgggcaaagaattggctgaaacaaaatcagctctgatgaaagcagttaaagaaatcgagaacgagaagcgagcgagagtgatggttgagaaagtttgtgatgaactagcaagagacataagcgaagacaaagccgaagttgaagaactgaagagagaatcttttaaagtcaaagaagaagtcgaaaaggaaagagagatgttgcagttagcagatgcattgcgggaagagagagtacagatgaaactatcggaggctaaacaccagctcgaggagaaaaacgcagctgttgataagctaagaaaccagcttcaaacttacctcaaagcaaaaagatgtaaagagaagacccgtgaaccacctcaaactcagctacataacgaagaggctggagattatttaaaccatcacatcagttttggatcatataacatcgaagatggagaagtcgagaatggaaatgaagaaggttcaggcgaaagcgaccttcattccatagaactgaacatagacaacaagagctataaatggccttatggtgaagagaacagaggaagaaaatcaacgccaaggaaaagcctttctttacaaagaagcatatcggattgtgttgattgggttgtacagagcgagaagcttcaaaaaagtggagatggagggttggattggggaagatctattgacgttgagcctaaagggtatatagatgaaacacaagcttataaaccaaacaaggcttcttcaaaagatcaccatatcctctcgggttcgagactaagtaacttccgcggtggatctgtttcaaagtcgcggttatcggatgcttcgaaaggcgagaaccagaatgccagaaaatcaagatggtaatatgatcaagaaattttattcacattttcagcgcagagataacagaatctaaagactttacatctacattttttctctgttcgctcgttttgtcaagagtgattctctcatctgtaagtgacataaaacatgaatttgaactggtaatgatcc

SEQ ID NO: 89865 - protein, 622 aa, Arabidopsis thaliana
  peptide (1)..(622): Ceres Seq. ID no. 12720910
  misc_feature (270)..(539): Pfam Name: Myosin tail Pfam Description: Myosin tail
  misc_feature (14)..(557): Homolog of NCBI NO: 38346645 NR Description: OSJNBa0072D21.15 [Oryza sativa (japonica
  misc_feature (96)..(610): Homolog of NCBI NO: 15238129 NR Description: putative protein; protein id: At5g41620.1 thaliana] >gi|10178016|dbj|BAB11468.1|
  misc_feature (230)..(464): Homolog of NCBI NO: 15223613 NR Description: unknown protein; protein id: At1g50660.1
  misc_feature (230)..(445): Homolog of NCBI NO: 9294553 NR Description: gb|AAF00675.1~gene_id:MQC12.10~similar to unknown
  misc_feature (257)..(447): Homolog of NCBI NO: 38344183 NR Description: OSJNBa0053K19.22 [Oryza sativa (japonica
  misc_feature (230)..(445): Homolog of NCBI NO: 15231114 NR Description: unknown protein; protein id: At3g20350.1
  misc_feature (290)..(447): Homolog of NCBI NO: 29367527 NR Description: unknown [Oryza sativa (japonica cultivar-group)]
  misc_feature (257)..(442): Homolog of NCBI NO: 40253811 NR Description: hypothetical protein [Oryza sativa (japonica group)] >gi|40253851|dbj|BAD05787.1| hypothetical protein [Oryza
  misc_feature (93)..(550): Homolog of NCBI NO: 18407987 NR Description: expressed protein; protein id: At1g64180.1,
  misc_feature (138)..(448): Homolog of NCBI NO: 9757811 NR Description: gb|AAF00675.1~gene_id:MWD9.9~similar to unknown
MPRQNQSVENLLLLGKIRKRGCSSPTSSTSSILREGYRFKRAIVVGKRGGSTTPVPTWRLMGRSPSPRASGALHAAASPSSHCGSKTGKVSAPAPVSARKLAATLWEMNEMPSPRVVEEAAPMIRKSRKERIAPLPPPRSSVHSGSLPPHLSDPSHSPVSERMERSGTGSRQRRASSTVQKLRLGDCNVGARDPINSGSFMDIETRSRVETPTGSTVGVKTRLKDCSNALTTSKELLKIINRMWGQDDRPSSSMSLVSALHSELERARLQVNQLIHEHKPENNDISYLMKRFAEEKAVWKSNEQEVVEAAIESVAGELEVERKLRRRFESLNKKLGKELAETKSALMKAVKEIENEKRARVMVEKVCDELARDISEDKAEVEELKRESFKVKEEVEKEREMLQLADALREERVQMKLSEAKHQLEEKNAAVDKLRNQLQTYLKAKRCKEKTREPPQTQLHNEEAGDYLNHHISFGSYNIEDGEVENGNEEGSGESDLHSIELNIDNKSYKWPYGEENRGRKSTPRKSLSLQRSISDCVDWVVQSEKLQKSGDGGLDWGRSIDVEPKGYIDETQAYKPNKASSKDHHILSGSRLSNFRGGSVSKSRLSDASKGENQNARKSRW

SEQ ID NO: 89866 - protein, 562 aa, Arabidopsis thaliana
  peptide (1)..(562): Ceres Seq. ID no. 12720911
  misc_feature (210)..(479): Pfam Name: Myosin tail Pfam Description: Myosin tail
  misc_feature (1)..(497): Homolog of NCBI NO: 38346645 NR Description: OSJNBa0072D21.15 [Oryza sativa (japonica
  misc_feature (36)..(550): Homolog of NCBI NO: 15238129 NR Description: putative protein; protein id: At5g41620.1 thaliana] >gi|10178016|dbj|BAB11468.1|
  misc_feature (170)..(404): Homolog of NCBI NO: 15223613 NR Description: unknown protein; protein id: At1g50660.1
  misc_feature (170)..(385): Homolog of NCBI NO: 9294553 NR Description: gb|AAF00675.1~gene_id:MQC12.10~similar to unknown
  misc_feature (197)..(387): Homolog of NCBI NO: 38344183 NR Description: OSJNBa0053K19.22 [Oryza sativa (japonica
  misc_feature (170)..(385): Homolog of NCBI NO: 15231114 NR Description: unknown protein; protein id: At3g20350.1
  misc_feature (230)..(387): Homolog of NCBI NO: 29367527 NR Description: unknown [Oryza sativa (japonica cultivar-group)]
  misc_feature (197)..(382): Homolog of NCBI NO: 40253811 NR Description: hypothetical protein [Oryza sativa (japonica group)] >gi|40253851|dbj|BAD05787.1| hypothetical protein [Oryza
  misc_feature (33)..(490): Homolog of NCBI NO: 18407987 NR Description: expressed protein; protein id: At1g64180.1,
  misc_feature (78)..(388): Homolog of NCBI NO: 9757811 NR Description: gb|AAF00675.1~gene_id:MWD9.9~similar to unknown
MGRSPSPRASGALHAAASPSSHCGSKTGKVSAPAPVSARKLAATLWEMNEMPSPRVVEEAAPMIRKSRKERIAPLPPPRSSVHSGSLPPHLSDPSHSPVSERMERSGTGSRQRRASSTVQKLRLGDCNVGARDPINSGSFMDIETRSRVETPTGSTVGVKTRLKDCSNALTTSKELLKIINRMWGQDDRPSSSMSLVSALHSELERARLQVNQLIHEHKPENNDISYLMKRFAEEKAVWKSNEQEVVEAAIESVAGELEVERKLRRRFESLNKKLGKELAETKSALMKAVKEIENEKRARVMVEKVCDELARDISEDKAEVEELKRESFKVKEEVEKEREMLQLADALREERVQMKLSEAKHQLEEKNAAVDKLRNQLQTYLKAKRCKEKTREPPQTQLHNEEAGDYLNHHISFGSYNIEDGEVENGNEEGSGESDLHSIELNIDNKSYKWPYGEENRGRKSTPRKSLSLQRSISDCVDWVVQSEKLQKSGDGGLDWGRSIDVEPKGYIDETQAYKPNKASSKDHHILSGSRLSNFRGGSVSKSRLSDASKGENQNARKSRW

SEQ ID NO: 89867 - protein, 515 aa, Arabidopsis thaliana
  peptide (1)..(515): Ceres Seq. ID no. 12720912
  misc_feature (163)..(432): Pfam Name: Myosin tail Pfam Description: Myosin tail
  misc_feature (1)..(450): Homolog of NCBI NO: 38346645 NR Description: OSJNBa0072D21.15 [Oryza sativa (japonica
  misc_feature (1)..(503): Homolog of NCBI NO: 15238129 NR Description: putative protein; protein id: At5g41620.1 thaliana] >gi|10178016|dbj|BAB11468.1|
  misc_feature (123)..(357): Homolog of NCBI NO: 15223613 NR Description: unknown protein; protein id: At1g50660.1
  misc_feature (123)..(338): Homolog of NCBI NO: 9294553 NR Description: gb|AAF00675.1~gene_id:MQC12.10~similar to unknown
  misc_feature (150)..(340): Homolog of NCBI NO: 38344183 NR Description: OSJNBa0053K19.22 [Oryza sativa (japonica
  misc_feature (123)..(338): Homolog of NCBI NO: 15231114 NR Description: unknown protein; protein id: At3g20350.1
  misc_feature (183)..(340): Homolog of NCBI NO: 29367527 NR Description: unknown [Oryza sativa (japonica cultivar-group)]
  misc_feature (150)..(335): Homolog of NCBI NO: 40253811 NR Description: hypothetical protein [Oryza sativa (japonica group)] >gi|40253851|dbj|BAD05787.1| hypothetical protein [Oryza
  misc_feature (1)..(443): Homolog of NCBI NO: 18407987 NR Description: expressed protein; protein id: At1g64180.1,
  misc_feature (31)..(341): Homolog of NCBI NO: 9757811 NR Description: gb|AAF00675.1~gene_id:MWD9.9~similar to unknown
MNEMPSPRVVEEAAPMIRKSRKERIAPLPPPRSSVHSGSLPPHLSDPSHSPVSERMERSGTGSRQRRASSTVQKLRLGDCNVGARDPINSGSFMDIETRSRVETPTGSTVGVKTRLKDCSNALTTSKELLKIINRMWGQDDRPSSSMSLVSALHSELERARLQVNQLIHEHKPENNDISYLMKRFAEEKAVWKSNEQEVVEAAIESVAGELEVERKLRRRFESLNKKLGKELAETKSALMKAVKEIENEKRARVMVEKVCDELARDISEDKAEVEELKRESFKVKEEVEKEREMLQLADALREERVQMKLSEAKHQLEEKNAAVDKLRNQLQTYLKAKRCKEKTREPPQTQLHNEEAGDYLNHHISFGSYNIEDGEVENGNEEGSGESDLHSIELNIDNKSYKWPYGEENRGRKSTPRKSLSLQRSISDCVDWVVQSEKLQKSGDGGLDWGRSIDVEPKGYIDETQAYKPNKASSKDHHILSGSRLSNFRGGSVSKSRLSDASKGENQNARKSRW

SEQ ID NO: 89868 - DNA, 1968 bp, Arabidopsis thaliana
  misc_feature (1)..(1968): Ceres Seq. ID no. 12720913
  misc_feature: MA Experiment ID: 20000171 Result: Down-regulated in Transcription
  misc_feature: MA Experiment 20000171 PARAMETER Experiment Name: At_42deg_Heat_P Parameter: Age (day) Value: 14
  misc_feature: MA Experiment 20000171 PARAMETER Experiment Name: At_42deg_Heat_P Parameter: Organism Value: A. thaliana
  misc_feature: MA Experiment 20000171 PARAMETER Experiment Name: At_42deg_Heat_P Parameter: Plant Line Value: WS
  misc_feature: MA Experiment 20000171 PARAMETER Experiment Name: At_42deg_Heat_P Parameter: Temperature (deg C) Value: 42 vs. 22
  misc_feature: MA Experiment 20000171 PARAMETER Experiment Name: At_42deg_Heat_P Parameter: Timepoint (hr) Value: 1
  misc_feature: MA Experiment 20000171 PARAMETER Experiment Name: At_42deg_Heat_P Parameter: Tissue Value: Aerial
  misc_feature: MA Experiment ID: 20000173 Result: Down-regulated in Transcription
  misc_feature: MA Experiment 20000173 PARAMETER Experiment Name: At_42deg_Heat_P Parameter: Age (day) Value: 14
  misc_feature: MA Experiment 20000173 PARAMETER Experiment Name: At_42deg_Heat_P Parameter: Organism Value: A. thaliana
  misc_feature: MA Experiment 20000173 PARAMETER Experiment Name: At_42deg_Heat_P Parameter: Plant Line Value: WS
  misc_feature: MA Experiment 20000173 PARAMETER Experiment Name: At_42deg_Heat_P Parameter: Temperature (deg C) Value: 42 vs. 22
  misc_feature: MA Experiment 20000173 PARAMETER Experiment Name: At_42deg_Heat_P Parameter: Timepoint (hr) Value: 6
  misc_feature: MA Experiment 20000173 PARAMETER Experiment Name: At_42deg_Heat_P Parameter: Tissue Value: Aerial
  misc_feature: MA Experiment ID: 20000179 Result: Up-regulated in Transcription
  misc_feature: MA Experiment 20000179 PARAMETER Experiment Name: At_Germinating_Seeds_P Parameter: Age (hr) Value: 6 vs. 0
  misc_feature: MA Experiment 20000179 PARAMETER Experiment Name: At_Germinating_Seeds_P Parameter: Tissue Value: Germinating Seeds
  misc_feature: MA Experiment ID: 20000180 Result: Up-regulated in Transcription
  misc_feature: MA Experiment 20000180 PARAMETER Experiment Name: At_Germinating_Seeds_P Parameter: Age (hr) Value: 24 vs. 0
  misc_feature: MA Experiment 20000180 PARAMETER Experiment Name: At_Germinating_Seeds_P Parameter: Tissue Value: Germinating Seeds
  misc_feature: MA Experiment ID: 20000227 Result: Up-regulated in Transcription
  misc_feature: MA Experiment 20000227 PARAMETER Experiment Name: At_Root-Tips-vs-Tops_P Parameter: Tissue Value: Root Tips vs. Root Tops
  misc_feature: MA Experiment ID: 20000264 Result: Down-regulated in Transcription
  misc_feature: MA Experiment 20000264 PARAMETER Experiment Name: At_Open_Flower_P Parameter: Age (day) Value: 21
  misc_feature: MA Experiment 20000264 PARAMETER Experiment Name: At_Open_Flower_P Parameter: Plant Line Value: WS
  misc_feature: MA Experiment 20000264 PARAMETER Experiment Name: At_Open_Flower_P Parameter: Tissue Value: Open Flower vs. Whole Plant
  misc_feature: MA Experiment ID: 20000794 Result: Down-regulated in Transcription
  misc_feature: MA Experiment 20000794 PARAMETER Experiment Name: At_Petals_P Parameter: Age (day) Value: 23-25 days
  misc_feature: MA Experiment 20000794 PARAMETER Experiment Name: At_Petals_P Parameter: Plant Line Value: WS
  misc_feature: MA Experiment 20000794 PARAMETER Experiment Name: At_Petals_P Parameter: Tissue Value: Petals vs. Whole plant
  misc_feature: MA Experiment ID: 20001451 Result: Up-regulated in Transcription
  misc_feature: MA Experiment 20001451 PARAMETER Experiment Name: At_Far-red-induction_P Parameter: Age (day) Value: 7
  misc_feature: MA Experiment 20001451 PARAMETER Experiment Name: At_Far-red-induction_P Parameter: Light Value: Far-red vs. White
  misc_feature: MA Experiment 20001451 PARAMETER Experiment Name: At_Far-red-induction_P Parameter: Organism Value: A. thaliana
  misc_feature: MA Experiment 20001451 PARAMETER Experiment Name: At_Far-red-induction_P Parameter: Plant Line Value: Columbia
  misc_feature: MA Experiment 20001451 PARAMETER Experiment Name: At_Far-red-induction_P Parameter: Timepoint (hr) Value: 24
  misc_feature: MA Experiment 20001451 PARAMETER Experiment Name: At_Far-red-induction_P Parameter: Tissue Value: Whole Plant
  misc_feature: MA Experiment ID: 20001555 Result: Down-regulated in Transcription
  misc_feature: MA Experiment 20001555 PARAMETER Experiment Name: At_Drought_Soil_Dry_P Parameter: Age (day) Value: 24
  misc_feature: MA Experiment 20001555 PARAMETER Experiment Name: At_Drought_Soil_Dry_P Parameter: Organism Value: A. thaliana
  misc_feature: MA Experiment 20001555 PARAMETER Experiment Name: At_Drought_Soil_Dry_P Parameter: Plant Line Value: WS
  misc_feature: MA Experiment 20001555 PARAMETER Experiment Name: At_Drought_Soil_Dry_P Parameter: Post Timepoint (hr) Value: None
  misc_feature: MA Experiment 20001555 PARAMETER Experiment Name: At_Drought_Soil_Dry_P Parameter: Post-Treatment Value: None
  misc_feature: MA Experiment 20001555 PARAMETER Experiment Name: At_Drought_Soil_Dry_P Parameter: Timepoint (day) Value: 10
  misc_feature: MA Experiment 20001555 PARAMETER Experiment Name: At_Drought_Soil_Dry_P Parameter: Treatment Value: Drought vs. No Drought
  misc_feature: MA Experiment ID: 20001557 Result: Up-regulated in Transcription
  misc_feature: MA Experiment 20001557 PARAMETER Experiment Name: At_Drought_Soil_Dry_P Parameter: Age (day) Value: 27
  misc_feature: MA Experiment 20001557 PARAMETER Experiment Name: At_Drought_Soil_Dry_P Parameter: Organism Value: A. thaliana
  misc_feature: MA Experiment 20001557 PARAMETER Experiment Name: At_Drought_Soil_Dry_P Parameter: Plant Line Value: WS
  misc_feature: MA Experiment 20001557 PARAMETER Experiment Name: At_Drought_Soil_Dry_P Parameter: Post Timepoint (hr) Value: 3
  misc_feature: MA Experiment 20001557 PARAMETER Experiment Name: At_Drought_Soil_Dry_P Parameter: Post-Treatment Value: Re-Water vs. No Drought
  misc_feature: MA Experiment 20001557 PARAMETER Experiment Name: At_Drought_Soil_Dry_P Parameter: Timepoint (day) Value: 13
  misc_feature: MA Experiment 20001557 PARAMETER Experiment Name: At_Drought_Soil_Dry_P Parameter: Treatment Value: Drought vs. No Drought
  misc_feature: MA Experiment ID: 20001558 Result: Up-regulated in Transcription
  misc_feature: MA Experiment 20001558 PARAMETER Experiment Name: At_Drought_Soil_Dry_P Parameter: Age (day) Value: 27
  misc_feature: MA Experiment 20001558 PARAMETER Experiment Name: At_Drought_Soil_Dry_P Parameter: Organism Value: A. thaliana
  misc_feature: MA Experiment 20001558 PARAMETER Experiment Name: At_Drought_Soil_Dry_P Parameter: Plant Line Value: WS
  misc_feature: MA Experiment 20001558 PARAMETER Experiment Name: At_Drought_Soil_Dry_P Parameter: Post Timepoint (hr) Value: 6
  misc_feature: MA Experiment 20001558 PARAMETER Experiment Name: At_Drought_Soil_Dry_P Parameter: Post-Treatment Value: Re-Water vs. No Drought
  misc_feature: MA Experiment 20001558 PARAMETER Experiment Name: At_Drought_Soil_Dry_P Parameter: Timepoint (day) Value: 13
  misc_feature: MA Experiment 20001558 PARAMETER Experiment Name: At_Drought_Soil_Dry_P Parameter: Treatment Value: Drought vs. No Drought
  misc_feature: MA Experiment ID: 20001560 Result: Up-regulated in Transcription
  misc_feature: MA Experiment 20001560 PARAMETER Experiment Name: At_Drought_Soil_Dry_P Parameter: Age (day) Value: 28
  misc_feature: MA Experiment 20001560 PARAMETER Experiment Name: At_Drought_Soil_Dry_P Parameter: Organism Value: A. thaliana
  misc_feature: MA Experiment 20001560 PARAMETER Experiment Name: At_Drought_Soil_Dry_P Parameter: Plant Line Value: WS
  misc_feature: MA Experiment 20001560 PARAMETER Experiment Name: At_Drought_Soil_Dry_P Parameter: Post Timepoint (hr) Value: None
  misc_feature: MA Experiment 20001560 PARAMETER Experiment Name: At_Drought_Soil_Dry_P Parameter: Post-Treatment Value: None
  misc_feature: MA Experiment 20001560 PARAMETER Experiment Name: At_Drought_Soil_Dry_P Parameter: Timepoint (day) Value: 14
  misc_feature: MA Experiment 20001560 PARAMETER Experiment Name: At_Drought_Soil_Dry_P Parameter: Treatment Value: Drought vs. No Drought
  misc_feature: MA Experiment ID: 20001904 Result: Down-regulated in Transcription
  misc_feature: MA Experiment 20001904 PARAMETER Experiment Name: At_Drought_Reproduction_P Parameter: Age (day) Value: 37
  misc_feature: MA Experiment 20001904 PARAMETER Experiment Name: At_Drought_Reproduction_P Parameter: Organism Value: A. thaliana
  misc_feature: MA Experiment 20001904 PARAMETER Experiment Name: At_Drought_Reproduction_P Parameter: Plant Line Value: WS
  misc_feature: MA Experiment 20001904 PARAMETER Experiment Name: At_Drought_Reproduction_P Parameter: Timepoint (day) Value: 7
  misc_feature: MA Experiment 20001904 PARAMETER Experiment Name: At_Drought_Reproduction_P Parameter: Tissue Value: Rosettes
  misc_feature: MA Experiment 20001904 PARAMETER Experiment Name: At_Drought_Reproduction_P Parameter: Treatment Value: Drought vs. No Drought
  misc_feature: MA Experiment ID: 20001905 Result: Down-regulated in Transcription
  misc_feature: MA Experiment 20001905 PARAMETER Experiment Name: At_Drought_Reproduction_P Parameter: Age (day) Value: 40
  misc_feature: MA Experiment 20001905 PARAMETER Experiment Name: At_Drought_Reproduction_P Parameter: Organism Value: A. thaliana
  misc_feature: MA Experiment 20001905 PARAMETER Experiment Name: At_Drought_Reproduction_P Parameter: Plant Line Value: WS
  misc_feature: MA Experiment 20001905 PARAMETER Experiment Name: At_Drought_Reproduction_P Parameter: Timepoint (day) Value: 10
  misc_feature: MA Experiment 20001905 PARAMETER Experiment Name: At_Drought_Reproduction_P Parameter: Tissue Value: Rosettes
  misc_feature: MA Experiment 20001905 PARAMETER Experiment Name: At_Drought_Reproduction_P Parameter: Treatment Value: Drought vs. No Drought
  misc_feature: MA Experiment ID: 20001911 Result: Down-regulated in Transcription
  misc_feature: MA Experiment 20001911 PARAMETER Experiment Name: At_Drought_Reproduction_P Parameter: Age (day) Value: 40
  misc_feature: MA Experiment 20001911 PARAMETER Experiment Name: At_Drought_Reproduction_P Parameter: Organism Value: A. thaliana
  misc_feature: MA Experiment 20001911 PARAMETER Experiment Name: At_Drought_Reproduction_P Parameter: Plant Line Value: WS
  misc_feature: MA Experiment 20001911 PARAMETER Experiment Name: At_Drought_Reproduction_P Parameter: Timepoint (day) Value: 10
  misc_feature: MA Experiment 20001911 PARAMETER Experiment Name: At_Drought_Reproduction_P Parameter: Tissue Value: Flowers
  misc_feature: MA Experiment 20001911 PARAMETER Experiment Name: At_Drought_Reproduction_P Parameter: Treatment Value: Drought vs. No Drought
aaaactcacatctatctctatctctcttctctgtctctcactctccactttccgatcaccgacgattcaacaaaacatagtaaaaaacaaagcaaattctttttttctccttagttacttcttctacagattatctcaatcttacagagcaccatggatcgttgtatctatggttgctccgtcattactatcttcttctccttcttcttcctcctcaatgcatccgctttagaatcgggtcaccacaacataactgggtcgggtcaaataaactcaaactccgtcctcgtagctctcctcgattctcgttacactgaactcgccgagctagttgagaaggctcttcttctccaaaccctcgaagacgccgttggtcgtcacaatattactattttcgccccacgcaatgaagcactcgagcgtgaccttgacccggattttaaacggttcttgctccaaccaggtaacctcaaatctctccaaacgcttctcttgtctcacattatccccaaacgagtcgggtcaaaccaatggcctgaggagaattcgggtcgggtcaaacacgtcacgttagggcatgaccaagtgctgcatttgagtaaactcaaaggaacaaatggaaagagattggtgaattccgctgtaattacccgacccgatgatttaacccgacccgacgggttgatccacggaatcgaacggcttttaatccctcgttccgttcaagaagatttcaaccgacggagaaatctccgatcaatctccgccgtattacccgaaggagctccggaaatcgacccgagaaccaaccgtctcaagaaatctgccaccgccgtctcagtacccgccggatctccaccagtgcttccgattgaatccgctatggctccaggtccatcgctagctccggctccggctccaggacctggaggtgcacacaaacatttcaacggcgatgctcaggtcaaagatttcatccacacattgttacattacggtggatacaacgaaatggcggatattctcgtgaatctgacgtcacttgcgacggagatgggtcgattggtgtcagaaggttacgtcctcaccgtgttagctccgaacgatgaagctatggggaaattaacgactgatcagcttagcgagcccggagctccggagcaaattatgtattaccacattattccagagtatcagacggaggaaagcatgtataattctgttaggagatttgggaaggtgaagtatgaaacgctgcgttttcctcacaaggttggggctaaagaagctgatggctcggttaaattcggttctggtgaccggtcggcttatttgtttgatccggatatttacaccgatggtcgcatttcggttcaggggattgatggtgttttgttcccagaggagaaggaagaagagacggttaagaaaccgaccggtccggttaagaaagttgttcagccgagaagagggaagttgctggaagtagcatgtagtatgcttggagctattgggaaggactcatatctaagcagatgctgatgaattcacaaacctgaagagattattgaaggaaaatctctcaagtgttatctgtaaacacacacaaaaggttctttggagcagaatgaaagatttagaagaagagcaaaaaaaaaaaaaaaaaacaagagagtaatacatcaatgtccaaaacttcaaaagaatattcttcagtggaatatgagaatagggtttgttgagtttttttatataaaaaatattttttttgggtggggttttgattttggggttataaatactgtaattagatataagaactcattttttcaattgatttggtgtatgaaaaatgaatcaaaaagtggggagcaaaagaaaaagtcttgagaacccaccaccactttctttcttctacttggtcctttatttgtgaatggtttggtaagtaaaatttccacttaattg

SEQ ID NO: 89869 - protein, 462 aa, Arabidopsis thaliana
  peptide (1)..(462): Ceres Seq. ID no. 12720914
  misc_feature (40)..(187): Pfam Name: Fasciclin domain Pfam Description: Fasciclin domain
  misc_feature (1)..(462): Homolog of NCBI NO: 18399319 NR Description: expressed protein; protein id: At3g11700.1, by cDNA: gi_15810316, supported by cDNA: gi_16604518 [Arabidopsis >gi|15810317|gb|AAL07046.1| unknown protein [Arabidopsis
  misc_feature (1)..(440): Homolog of NCBI NO: 6041822 NR Description: unknown protein [Arabidopsis thaliana]
  misc_feature (1)..(443): Homolog of NCBI NO: 15240029 NR Description: putative protein; protein id: At5g06390.1 thaliana] >gi|9758419|dbj|BAB08961.1|
  misc_feature (18)..(452): Homolog of NCBI NO: 15231197 NR Description: unknown protein; protein id: At3g52370.1
  misc_feature (15)..(452): Homolog of NCBI NO: 30686588 NR Description: expressed protein [Arabidopsis thaliana] unknown protein [Arabidopsis thaliana]
  misc_feature (15)..(441): Homolog of NCBI NO: 25370583 NR Description: hypothetical protein At2g35860 [imported] - thaliana >gi|4510383|gb|AAD21471.1| unknown protein [Arabidopsis
  misc_feature (28)..(462): Homolog of NCBI NO: 33146739 NR Description: GPI-anchored protein -like [Oryza sativa
  misc_feature (28)..(439): Homolog of NCBI NO: 34899886 NR Description: OJ1714_H10.26 [Oryza sativa (japonica
  misc_feature (22)..(427): Homolog of NCBI NO: 27819499 NR Description: putative arabinogalactan-protein [Oryza sativa
  misc_feature (116)..(440): Homolog of NCBI NO: 7486009 NR Description: hypothetical protein F22O6.250 - Arabidopsis
MDRCIYGCSVITIFFSFFFLLNASALESGHHNITGSGQINSNSVLVALLDSRYTELAELVEKALLLQTLEDAVGRHNITIFAPRNEALERDLDPDFKRFLLQPGNLKSLQTLLLSHIIPKRVGSNQWPEENSGRVKHVTLGHDQVLHLSKLKGTNGKRLVNSAVITRPDDLTRPDGLIHGIERLLIPRSVQEDFNRRRNLRSISAVLPEGAPEIDPRTNRLKKSATAVSVPAGSPPVLPIESAMAPGPSLAPAPAPGPGGAHKHFNGDAQVKDFIHTLLHYGGYNEMADILVNLTSLATEMGRLVSEGYVLTVLAPNDEAMGKLTTDQLSEPGAPEQIMYYHIIPEYQTEESMYNSVRRFGKVKYETLRFPHKVGAKEADGSVKFGSGDRSAYLFDPDIYTDGRISVQGIDGVLFPEEKEEETVKKPTGPVKKVVQPRRGKLLEVACSMLGAIGKDSYLSRC

SEQ ID NO: 89870 - DNA, 2109 bp, Arabidopsis thaliana
  misc_feature (1)..(2109): Ceres Seq. ID no. 12720922
  misc_feature: MA Experiment ID: 20000794 Result: Up-regulated in Transcription
  misc_feature: MA Experiment 20000794 PARAMETER Experiment Name: At_Petals_P Parameter: Age (day) Value: 23-25 days
  misc_feature: MA Experiment 20000794 PARAMETER Experiment Name: At_Petals_P Parameter: Plant Line Value: WS
  misc_feature: MA Experiment 20000794 PARAMETER Experiment Name: At_Petals_P Parameter: Tissue Value: Petals vs. Whole plant
  misc_feature: MA Experiment ID: 20001247 Result: Up-regulated in Transcription
  misc_feature: MA Experiment 20001247 PARAMETER Experiment Name: At_Far-red-induction_P Parameter: Age (day) Value: 7
  misc_feature: MA Experiment 20001247 PARAMETER Experiment Name: At_Far-red-induction_P Parameter: Light Value: Far-red vs. White
  misc_feature: MA Experiment 20001247 PARAMETER Experiment Name: At_Far-red-induction_P Parameter: Organism Value: A. thaliana
  misc_feature: MA Experiment 20001247 PARAMETER Experiment Name: At_Far-red-induction_P Parameter: Plant Line Value: Columbia
  misc_feature: MA Experiment 20001247 PARAMETER Experiment Name: At_Far-red-induction_P Parameter: Timepoint (hr) Value: 1
  misc_feature: MA Experiment 20001247 PARAMETER Experiment Name: At_Far-red-induction_P Parameter: Tissue Value: Whole Plant
  misc_feature: MA Experiment ID: 20001557 Result: Up-regulated in Transcription
  misc_feature: MA Experiment 20001557 PARAMETER Experiment Name: At_Drought_Soil_Dry_P Parameter: Age (day) Value: 27
  misc_feature: MA Experiment 20001557 PARAMETER Experiment Name: At_Drought_Soil_Dry_P Parameter: Organism Value: A. thaliana
  misc_feature: MA Experiment 20001557 PARAMETER Experiment Name: At_Drought_Soil_Dry_P Parameter: Plant Line Value: WS
  misc_feature: MA Experiment 20001557 PARAMETER Experiment Name: At_Drought_Soil_Dry_P Parameter: Post Timepoint (hr) Value: 3
  misc_feature: MA Experiment 20001557 PARAMETER Experiment Name: At_Drought_Soil_Dry_P Parameter: Post-Treatment Value: Re-Water vs. No Drought
  misc_feature: MA Experiment 20001557 PARAMETER Experiment Name: At_Drought_Soil_Dry_P Parameter: Timepoint (day) Value: 13
  misc_feature: MA Experiment 20001557 PARAMETER Experiment Name: At_Drought_Soil_Dry_P Parameter: Treatment Value: Drought vs. No Drought
atggtggtgaagatgatgaagtggcggccatggccgccgttagttacgaggaaatacgaggtgaagctttccgtgaagaagcttgagggttgggatctggtgagggaaggtgtaccggagaaagatagattaacggtggagattcgttggaaaggtcctaaggcgacattgggatctttgagaaggtcggtgaagaggaatttcaccaaggaagctgtgggagaaagcgatgtcgtttcatgggaagatgaagagtttcagagcttatgttcactcacttcttacaaggacagtttgttttatccttgggagataactttctctgtcttcaccaatggaatgaagcaagggcagaagaataaagctcctgttgttggaacggcatttttgaatcttgctgagtacgcgtgtgtgaccgataaaaaagaattcgatataaacataccacttacgctctctgcttgtgtggcctctgagacacatcctttgctctttgtatcattgagcctgcttgagcttagaactactccagaaacatcagactcggcagcacaaaccgcggttgtgcctttgcctctcccatctccatcgccacaacagcctactgaaactcactcagttgagaaggaggatgtctctgcaatcaaagctggtctcagaaaagtcaagattttcacagagtttgtttctacaaggaaagccaagaaggcttgcagggaagaagaaggcagattctcaagctttgaatcatcagaatcgcttgatgatttcgagacagattttgatgaaggcaaagaagaattgatgagtatgagaaaatctttctcttatggacctttgtcttatgcaaatggtgtgggaacttcattaaactgtggcgcgaaagttagcgatgaagacgaagattgggtttattatagccacaggaaatcagacgttggagcaggttgctctgatgctgaagattccgctgcgggtttggtgtatgaggcatcactgcttccacggcgtagcatattgccatggagaaagaggaagttgagctttaggtctccgaaatccaaaggagagcctttgttaaagaaggataatggagaagaaggtggagatgacattgattttgatcggaggcaacttagctcagatgaagctcatcctccatttgggagcaagattgatgaagattcatctgctaatccacgaacttcgttctcggagtttggagaagacagttttgcgattggaagttgggaggagaaagaagtgataagccgagatggacacatgaagctccagacaagtgtctttcttgcttctattgaccagagaagcgagcgagcagctggtgagagtgcatgcactgctcttgtagcggtcattgcggattggtttcagaagaatggtaatctcatgccaatcaagtctcagttcgatagtttgatcagagaaggttctttagaatggagaaacctctgcgaaaacgaaacgtatatgcagaaattccctgacaagcatttcgatcttgataccgtgctacaagcaaagatacggcctctaaccgttatccccggaaaatcctttgttgggtttttccatcctgatgggatgatcaacgagggtagattcgagtttctacaaggcgcaatgtctttcgatagtatttgggctgaaattattagtctggaggaaagctcggcgaatggtgatagctatgatgatgattcgccaccgcacgtttacatagtgagttggaacgatcacttctttgtcctcaaagttgaaaaagaagcttactatatcattgacacacttggagaaaggctttacgagggttgtgatcaagcttacgttttgaaattcgaccataaaaccgtcatccacaagattcttcacacagaggaagcaggatccgaatcagaacctgaatcagagattttgagcagagggaaggagtcatgtaaagagtatattaagaatttcttggcggccataccaattagggagttgcaagaggatatcaagaaaggattagcctcaaccgcgcctgttcatcaccgtttacagatcgagtttcattacaccacaaacgcagagattaccagtctataa

SEQ ID NO: 89871 - protein, 702 aa, Arabidopsis thaliana
  peptide (1)..(702): Ceres Seq. ID no. 12720923
  misc_feature (1)..(679): Homolog of NCBI NO: 15238352 NR Description: unknown protein; protein id: At5g04860.1 thaliana] >gi|9758461|dbj|BAB08990.1| gene_id:MUK11.18~unknown
  misc_feature (363)..(693): Homolog of NCBI NO: 25412320 NR Description: hypothetical protein At2g25460 [imported] -
  misc_feature (406)..(640): Homolog of NCBI NO: 34903512 NR Description: P0001B06.8 [Oryza sativa (japonica
  misc_feature (491)..(699): Homolog of NCBI NO: 15226799 NR Description: unknown protein; protein id: At2g10560.1
  misc_feature (363)..(558): Homolog of NCBI NO: 17063176 NR Description: SYNC1 protein [Arabidopsis thaliana]
  misc_feature (363)..(558): Homolog of NCBI NO: 18400834 NR Description: expressed protein; protein id: At2g25460.1, by cDNA: gi_17063175 [Arabidopsis thaliana]
  misc_feature (535)..(698): Homolog of NCBI NO: 34903512 NR Description: P0001B06.8 [Oryza sativa (japonica
  misc_feature (539)..(694): Homolog of NCBI NO: 15238352 NR Description: unknown protein; protein id: At5g04860.1 thaliana] >gi|9758461|dbj|BAB08990.1| gene_id:MUK11.18~unknown
MVVKMMKWRPWPPLVTRKYEVKLSVKKLEGWDLVREGVPEKDRLTVEIRWKGPKATLGSLRRSVKRNFTKEAVGESDVVSWEDEEFQSLCSLTSYKDSLFYPWEITFSVFTNGMKQGQKNKAPVVGTAFLNLAEYACVTDKKEFDINIPLTLSACVASETHPLLFVSLSLLELRTTPETSDSAAQTAVVPLPLPSPSPQQPTETHSVEKEDVSAIKAGLRKVKIFTEFVSTRKAKKACREEEGRFSSFESSESLDDFETDFDEGKEELMSMRKSFSYGPLSYANGVGTSLNCGAKVSDEDEDWVYYSHRKSDVGAGCSDAEDSAAGLVYEASLLPRRSILPWRKRKLSFRSPKSKGEPLLKKDNGEEGGDDIDFDRRQLSSDEAHPPFGSKIDEDSSANPRTSFSEFGEDSFAIGSWEEKEVISRDGHMKLQTSVFLASIDQRSERAAGESACTALVAVIADWFQKNGNLMPIKSQFDSLIREGSLEWRNLCENETYMQKFPDKHFDLDTVLQAKIRPLTVIPGKSFVGFFHPDGMINEGRFEFLQGAMSFDSIWAEIISLEESSANGDSYDDDSPPHVYIVSWNDHFFVLKVEKEAYYIIDTLGERLYEGCDQAYVLKFDHKTVIHKILHTEEAGSESEPESEILSRGKESCKEYIKNFLAAIPIRELQEDIKKGLASTAPVHHRLQIEFHYTTNAEITSL

SEQ ID NO: 89872 - protein, 698 aa, Arabidopsis thaliana
  peptide (1)..(698): Ceres Seq. ID no. 12720924
  misc_feature (1)..(675): Homolog of NCBI NO: 15238352 NR Description: unknown protein; protein id: At5g04860.1 thaliana] >gi|9758461|dbj|BAB08990.1| gene_id:MUK11.18~unknown
  misc_feature (359)..(689): Homolog of NCBI NO: 25412320 NR Description: hypothetical protein At2g25460 [imported] -
  misc_feature (402)..(636): Homolog of NCBI NO: 34903512 NR Description: P0001B06.8 [Oryza sativa (japonica
  misc_feature (487)..(695): Homolog of NCBI NO: 15226799 NR Description: unknown protein; protein id: At2g10560.1
  misc_feature (359)..(554): Homolog of NCBI NO: 17063176 NR Description: SYNC1 protein [Arabidopsis thaliana]
  misc_feature (359)..(554): Homolog of NCBI NO: 18400834 NR Description: expressed protein; protein id: At2g25460.1, by cDNA: gi_17063175 [Arabidopsis thaliana]
  misc_feature (531)..(694): Homolog of NCBI NO: 34903512 NR Description: P0001B06.8 [Oryza sativa (japonica
  misc_feature (535)..(690): Homolog of NCBI NO: 15238352 NR Description: unknown protein; protein id: At5g04860.1 thaliana] >gi|9758461|dbj|BAB08990.1| gene_id:MUK11.18~unknown
MMKWRPWPPLVTRKYEVKLSVKKLEGWDLVREGVPEKDRLTVEIRWKGPKATLGSLRRSVKRNFTKEAVGESDVVSWEDEEFQSLCSLTSYKDSLFYPWEITFSVFTNGMKQGQKNKAPVVGTAFLNLAEYACVTDKKEFDINIPLTLSACVASETHPLLFVSLSLLELRTTPETSDSAAQTAVVPLPLPSPSPQQPTETHSVEKEDVSAIKAGLRKVKIFTEFVSTRKAKKACREEEGRFSSFESSESLDDFETDFDEGKEELMSMRKSFSYGPLSYANGVGTSLNCGAKVSDEDEDWVYYSHRKSDVGAGCSDAEDSAAGLVYEASLLPRRSILPWRKRKLSFRSPKSKGEPLLKKDNGEEGGDDIDFDRRQLSSDEAHPPFGSKIDEDSSANPRTSFSEFGEDSFAIGSWEEKEVISRDGHMKLQTSVFLASIDQRSERAAGESACTALVAVIADWFQKNGNLMPIKSQFDSLIREGSLEWRNLCENETYMQKFPDKHFDLDTVLQAKIRPLTVIPGKSFVGFFHPDGMINEGRFEFLQGAMSFDSIWAEIISLEESSANGDSYDDDSPPHVYIVSWNDHFFVLKVEKEAYYIIDTLGERLYEGCDQAYVLKFDHKTVIHKILHTEEAGSESEPESEILSRGKESCKEYIKNFLAAIPIRELQEDIKKGLASTAPVHHRLQIEFHYTTNAEITSL

SEQ ID NO: 89873 - protein, 697 aa, Arabidopsis thaliana
  peptide (1)..(697): Ceres Seq. ID no. 12720925
  misc_feature (1)..(674): Homolog of NCBI NO: 15238352 NR Description: unknown protein; protein id: At5g04860.1 thaliana] >gi|9758461|dbj|BAB08990.1| gene_id:MUK11.18~unknown
  misc_feature (358)..(688): Homolog of NCBI NO: 25412320 NR Description: hypothetical protein At2g25460 [imported] -
  misc_feature (401)..(635): Homolog of NCBI NO: 34903512 NR Description: P0001B06.8 [Oryza sativa (japonica
  misc_feature (486)..(694): Homolog of NCBI NO: 15226799 NR Description: unknown protein; protein id: At2g10560.1
  misc_feature (358)..(553): Homolog of NCBI NO: 17063176 NR Description: SYNC1 protein [Arabidopsis thaliana]
  misc_feature (358)..(553): Homolog of NCBI NO: 18400834 NR Description: expressed protein; protein id: At2g25460.1, by cDNA: gi_17063175 [Arabidopsis thaliana]
  misc_feature (530)..(693): Homolog of NCBI NO: 34903512 NR Description: P0001B06.8 [Oryza sativa (japonica
  misc_feature (534)..(689): Homolog of NCBI NO: 15238352 NR Description: unknown protein; protein id: At5g04860.1 thaliana] >gi|9758461|dbj|BAB08990.1| gene_id:MUK11.18~unknown
MKWRPWPPLVTRKYEVKLSVKKLEGWDLVREGVPEKDRLTVEIRWKGPKATLGSLRRSVKRNFTKEAVGESDVVSWEDEEFQSLCSLTSYKDSLFYPWEITFSVFTNGMKQGQKNKAPVVGTAFLNLAEYACVTDKKEFDINIPLTLSACVASETHPLLFVSLSLLELRTTPETSDSAAQTAVVPLPLPSPSPQQPTETHSVEKEDVSAIKAGLRKVKIFTEFVSTRKAKKACREEEGRFSSFESSESLDDFETDFDEGKEELMSMRKSFSYGPLSYANGVGTSLNCGAKVSDEDEDWVYYSHRKSDVGAGCSDAEDSAAGLVYEASLLPRRSILPWRKRKLSFRSPKSKGEPLLKKDNGEEGGDDIDFDRRQLSSDEAHPPFGSKIDEDSSANPRTSFSEFGEDSFAIGSWEEKEVISRDGHMKLQTSVFLASIDQRSERAAGESACTALVAVIADWFQKNGNLMPIKSQFDSLIREGSLEWRNLCENETYMQKFPDKHFDLDTVLQAKIRPLTVIPGKSFVGFFHPDGMINEGRFEFLQGAMSFDSIWAEIISLEESSANGDSYDDDSPPHVYIVSWNDHFFVLKVEKEAYYIIDTLGERLYEGCDQAYVLKFDHKTVIHKILHTEEAGSESEPESEILSRGKESCKEYIKNFLAAIPIRELQEDIKKGLASTAPVHHRLQIEFHYTTNAEITSL

SEQ ID NO: 89874 - DNA, 2913 bp, Arabidopsis thaliana
  misc_feature (1)..(2913): Ceres Seq. ID no. 12720952
  misc_feature: MA Experiment ID: 20000495 Result: Down-regulated in Transcription
  misc_feature: MA Experiment 20000495 PARAMETER Experiment Name: At_Guard_Cells_P Parameter: Harvest Date Value: 8/2/2002
  misc_feature: MA Experiment 20000495 PARAMETER Experiment Name: At_Guard_Cells_P Parameter: Organism Value: A. thaliana
  misc_feature: MA Experiment 20000495 PARAMETER Experiment Name: At_Guard_Cells_P Parameter: Tissue Value: Guard Cells vs. Leaves
  misc_feature: MA Experiment ID: 20001248 Result: Down-regulated in Transcription
  misc_feature: MA Experiment 20001248 PARAMETER Experiment Name: At_Far-red-induction_P Parameter: Age (day) Value: 7
  misc_feature: MA Experiment 20001248 PARAMETER Experiment Name: At_Far-red-induction_P Parameter: Light Value: Far-red vs. White
  misc_feature: MA Experiment 20001248 PARAMETER Experiment Name: At_Far-red-induction_P Parameter: Organism Value: A. thaliana
  misc_feature: MA Experiment 20001248 PARAMETER Experiment Name: At_Far-red-induction_P Parameter: Plant Line Value: Columbia
  misc_feature: MA Experiment 20001248 PARAMETER Experiment Name: At_Far-red-induction_P Parameter: Timepoint (hr) Value: 4
  misc_feature: MA Experiment 20001248 PARAMETER Experiment Name: At_Far-red-induction_P Parameter: Tissue Value: Whole Plant
  misc_feature: MA Experiment ID: 20001451 Result: Down-regulated in Transcription
  misc_feature: MA Experiment 20001451 PARAMETER Experiment Name: At_Far-red-induction_P Parameter: Age (day) Value: 7
  misc_feature: MA Experiment 20001451 PARAMETER Experiment Name: At_Far-red-induction_P Parameter: Light Value: Far-red vs. White
  misc_feature: MA Experiment 20001451 PARAMETER Experiment Name: At_Far-red-induction_P Parameter: Organism Value: A. thaliana
  misc_feature: MA Experiment 20001451 PARAMETER Experiment Name: At_Far-red-induction_P Parameter: Plant Line Value: Columbia
  misc_feature: MA Experiment 20001451 PARAMETER Experiment Name: At_Far-red-induction_P Parameter: Timepoint (hr) Value: 24
  misc_feature: MA Experiment 20001451 PARAMETER Experiment Name: At_Far-red-induction_P Parameter: Tissue Value: Whole Plant
atggatcctcctgtgtcggatcttgagagtattgaagatcagaaagaaggaggaccttcctttcactgtgatctttacgatacacaagtagttcacaagattgctcaggtttttctccctggtttagccactgcttgtgtcgataacactaccggagatatcttcaggagtcctggttctgttgctgctgacattcgaaaagaaatgatagagtacttgactcgtagaagcgaaacctttgtggctgaacacattgttcttcaaggaggttctgagattgaagcttctcatgatccttttgacattatatctgatttcatcgatgatttcgccacttctaagcggaatttgttcagccgggtttcgggttggatgcttagcgaaaggagagaagataatatcgatgatttcgcgcaagagatggagataagcgggttttggttgactgatcatagagaaggtatcgctcagactttgcttaaaaacgttgattttaaaagcagtgcacattgtgagatgaaattccaaaccgaaggagaactcgccgagcacgccatgaattgtgggtatagaacaatgaactgtgagaatgagggttgtactgcggtgttttgtgcgaatcagatggagaatcacgattctgtttgcccgttcaagatcattccgtgtgagcagaactgctcagagagtatcatgagacgtgatatggataggcattgtataaccgtatgtcctatgaaacttgtcaactgtccatttcattctgttggttgtctctctgatgtacatcaatgtgaggtccaacaacatcatttggataatgttagctctcatttgatgtacattcttcggagtatttacaaggaagcatctctggatgatctcaaaccccgagctgaacagatacagcagttgtctactaggttatctgaagctcgtaatgcaagatcactaacaaatctggtcaaggaaattgatggaaagctggggcctttagaaatcaaaccaaagattgttactgactcggaatccgataaacctgaaaatacagaaaagaaagccttagaagaagctgagattaaagaaaaaccagagacgagtaacttaaaagctgttacattggagcaaaccgcgagagaagctccggaagataaattggtttcaaaagaagtagatgctgcaatggtgaaagaagctgcaaagaaagtttcagaagctgagatagcagacaatgttaatgaagaaggcgaattaaaagcgcagaagcttttagaaataggcgagttcatcaaagaaggagacaacaactctgcagatgatttatcagagagaaccgaaaccaaagctccagaagttgtggtcatggatgaggctagagaggaggaggatagtgtagagacaaaagacacaagaacatatgaaacaatcagaggtttagagattgaagccaatgaaatgattgatgaagagacaaagaaatcgactgaaaccaaaaccgaagctccatcaagaatagtcatggacaaagagggggatgaagagacaaagaaatcaactgaaacagaaaccgaagctccatcgagaatagtcatggagacagagaaggatgaagagactatgaactctagggctcgtgcttcggatgaagctgaagcactgtcaaagagctctcaagtggcatcaatggagctctcgatctcacaatcaccgcgtgttcggttctcgtctctggcgcctcgtttcttagcagcttctcatcatcatcgtccttctgtgcatttagctgggaagtttataagcctccctcgagatgttcgcttcacgagcttatcaacttcaagaatgcgcatattagccgttgctttgacttttaagtcaagatgtgtttatgtgaactatgagattcctaaagatcaaatcttggttggtgctgctgagtctgatgatccagtgctggatagaattgcccggttccaaaatgcttgctggagatttcttagaccccatacaatccgcggaacagctttaggatccactgccttggtgacaagagctttgatagagaacactcatttgatcaaatggagtcttgtactaaaggcactttcaggtcttcttgctcttatttgtgggaatggttatatagtcggcatcaatcagatctacgacattggaatcgacaaagtgaacaaaccatacttgccaatagcagcaggagatctatcagtgcagtctgcttggttgttagtgatattttttgcgatagcagggcttttagttgtcggatttaactttggtccattcattacaagcctatactctcttggcctttttctgggaaccatctattctgttccacccctcagaatgaaaagattcccagttgcagcatttcttattattgccacggtacgaggtttccttcttaactttggtgtgtaccatgctacaagagctgctcttggacttccatttcagtggagtgcacctgtggcgttcatcacatcttttgtgacactgtttgcactggtcattgctattacaaaggaccttcctgatgttgaaggagatcgaaagttccaaatatcaaccctggcaacaaaacttggagtgagaaacattgcattcctcggttctggacttctgctagtaaattatgtttcagccatatcactagctttctacatgcctcagtatgcagctttgaaaagaccaaccctcttatcctttaacaatgaacaggtttttagaggtagcttgatgattcctgcacatgtgatcttggcttcaggcttaattttccagacatgggtactagaaaaagcaaactacaccaaggaagctatctcaggatattatcggtttatatggaatctcttctacgcagagtatctgttattccccttcctctag

SEQ ID NO: 89875 - protein, 970 aa, Arabidopsis thaliana
  peptide (1)..(970): Ceres Seq. ID no. 12720953
  misc_feature (672)..(933): Pfam Name: UbiA prenyltransferase family Pfam Description: UbiA prenyltransferase family
  misc_feature (1)..(558): Homolog of NCBI NO: 6671951 NR Description: hypothetical protein [Arabidopsis thaliana]
  misc_feature (562)..(946): Homolog of NCBI NO: 10998133 NR Description: dbj|BAA17774.1~gene_id:MEC18.5~similar to unknown
  misc_feature (643)..(970): Homolog of NCBI NO: 34393498 NR Description: putative tocopherol polyprenyltransferase [Oryza
  misc_feature (1)..(329): Homolog of NCBI NO: 21741757 NR Description: OSJNBa0060B20.16 [Oryza sativa (japonica
  misc_feature (663)..(814): Homolog of NCBI NO: 23039416 NR Description: hypothetical protein [Trichodesmium erythraeum
  misc_feature (834)..(894): Homolog of NCBI NO: 23039416 NR Description: hypothetical protein [Trichodesmium erythraeum
  misc_feature (921)..(968): Homolog of NCBI NO: 23039416 NR Description: hypothetical protein [Trichodesmium erythraeum
  misc_feature (661)..(890): Homolog of NCBI NO: 23125851 NR Description: hypothetical protein [Nostoc punctiforme]
  misc_feature (921)..(968): Homolog of NCBI NO: 23125851 NR Description: hypothetical protein [Nostoc punctiforme]
  misc_feature (661)..(897): Homolog of NCBI NO: 37519852 NR Description: unknown protein [Gloeobacter violaceus]
MDPPVSDLESIEDQKEGGPSFHCDLYDTQVVHKIAQVFLPGLATACVDNTTGDIFRSPGSVAADIRKEMIEYLTRRSETFVAEHIVLQGGSEIEASHDPFDIISDFIDDFATSKRNLFSRVSGWMLSERREDNIDDFAQEMEISGFWLTDHREGIAQTLLKNVDFKSSAHCEMKFQTEGELAEHAMNCGYRTMNCENEGCTAVFCANQMENHDSVCPFKIIPCEQNCSESIMRRDMDRHCITVCPMKLVNCPFHSVGCLSDVHQCEVQQHHLDNVSSHLMYILRSIYKEASLDDLKPRAEQIQQLSTRLSEARNARSLTNLVKEIDGKLGPLEIKPKIVTDSESDKPENTEKKALEEAEIKEKPETSNLKAVTLEQTAREAPEDKLVSKEVDAAMVKEAAKKVSEAEIADNVNEEGELKAQKLLEIGEFIKEGDNNSADDLSERTETKAPEVVVMDEAREEEDSVETKDTRTYETIRGLEIEANEMIDEETKKSTETKTEAPSRIVMDKEGDEETKKSTETETEAPSRIVMETEKDEETMNSRARASDEAEALSKSSQVASMELSISQSPRVRFSSLAPRFLAASHHHRPSVHLAGKFISLPRDVRFTSLSTSRMRILAVALTFKSRCVYVNYEIPKDQILVGAAESDDPVLDRIARFQNACWRFLRPHTIRGTALGSTALVTRALIENTHLIKWSLVLKALSGLLALICGNGYIVGINQIYDIGIDKVNKPYLPIAAGDLSVQSAWLLVIFFAIAGLLVVGFNFGPFITSLYSLGLFLGTIYSVPPLRMKRFPVAAFLIIATVRGFLLNFGVYHATRAALGLPFQWSAPVAFITSFVTLFALVIAITKDLPDVEGDRKFQISTLATKLGVRNIAFLGSGLLLVNYVSAISLAFYMPQYAALKRPTLLSFNNEQVFRGSLMIPAHVILASGLIFQTWVLEKANYTKEAISGYYRFIWNLFYAEYLLFPFL

SEQ ID NO: 89876 - protein, 902 aa, Arabidopsis thaliana
  peptide (1)..(902): Ceres Seq. ID no. 12720954
  misc_feature (604)..(865): Pfam Name: UbiA prenyltransferase family Pfam Description: UbiA prenyltransferase family
  misc_feature (1)..(490): Homolog of NCBI NO: 6671951 NR Description: hypothetical protein [Arabidopsis thaliana]
  misc_feature (494)..(878): Homolog of NCBI NO: 10998133 NR Description: dbj|BAA17774.1~gene_id:MEC18.5~similar to unknown
  misc_feature (575)..(902): Homolog of NCBI NO: 34393498 NR Description: putative tocopherol polyprenyltransferase [Oryza
  misc_feature (1)..(261): Homolog of NCBI NO: 21741757 NR Description: OSJNBa0060B20.16 [Oryza sativa (japonica
  misc_feature (595)..(746): Homolog of NCBI NO: 23039416 NR Description: hypothetical protein [Trichodesmium erythraeum
  misc_feature (766)..(826): Homolog of NCBI NO: 23039416 NR Description: hypothetical protein [Trichodesmium erythraeum
  misc_feature (853)..(900): Homolog of NCBI NO: 23039416 NR Description: hypothetical protein [Trichodesmium erythraeum
  misc_feature (593)..(822): Homolog of NCBI NO: 23125851 NR Description: hypothetical protein [Nostoc punctiforme]
  misc_feature (853)..(900): Homolog of NCBI NO: 23125851 NR Description: hypothetical protein [Nostoc punctiforme]
  misc_feature (593)..(829): Homolog of NCBI NO: 37519852 NR Description: unknown protein [Gloeobacter violaceus]
MIEYLTRRSETFVAEHIVLQGGSEIEASHDPFDIISDFIDDFATSKRNLFSRVSGWMLSERREDNIDDFAQEMEISGFWLTDHREGIAQTLLKNVDFKSSAHCEMKFQTEGELAEHAMNCGYRTMNCENEGCTAVFCANQMENHDSVCPFKIIPCEQNCSESIMRRDMDRHCITVCPMKLVNCPFHSVGCLSDVHQCEVQQHHLDNVSSHLMYILRSIYKEASLDDLKPRAEQIQQLSTRLSEARNARSLTNLVKEIDGKLGPLEIKPKIVTDSESDKPENTEKKALEEAEIKEKPETSNLKAVTLEQTAREAPEDKLVSKEVDAAMVKEAAKKVSEAEIADNVNEEGELKAQKLLEIGEFIKEGDNNSADDLSERTETKAPEVVVMDEAREEEDSVETKDTRTYETIRGLEIEANEMIDEETKKSTETKTEAPSRIVMDKEGDEETKKSTETETEAPSRIVMETEKDEETMNSRARASDEAEALSKSSQVASMELSISQSPRVRFSSLAPRFLAASHHHRPSVHLAGKFISLPRDVRFTSLSTSRMRILAVALTFKSRCVYVNYEIPKDQILVGAAESDDPVLDRIARFQNACWRFLRPHTIRGTALGSTALVTRALIENTHLIKWSLVLKALSGLLALICGNGYIVGINQIYDIGIDKVNKPYLPIAAGDLSVQSAWLLVIFFAIAGLLVVGFNFGPFITSLYSLGLFLGTIYSVPPLRMKRFPVAAFLIIATVRGFLLNFGVYHATRAALGLPFQWSAPVAFITSFVTLFALVIAITKDLPDVEGDRKFQISTLATKLGVRNIAFLGSGLLLVNYVSAISLAFYMPQYAALKRPTLLSFNNEQVFRGSLMIPAHVILASGLIFQTWVLEKANYTKEAISGYYRFIWNLFYAEYLLFPFL

SEQ ID NO: 89877 - protein, 846 aa, Arabidopsis thaliana
  peptide (1)..(846): Ceres Seq. ID no. 12720955
  misc_feature (548)..(809): Pfam Name: UbiA prenyltransferase family Pfam Description: UbiA prenyltransferase family
  misc_feature (1)..(434): Homolog of NCBI NO: 6671951 NR Description: hypothetical protein [Arabidopsis thaliana]
  misc_feature (438)..(822): Homolog of NCBI NO: 10998133 NR Description: dbj|BAA17774.1~gene_id:MEC18.5~similar to unknown
  misc_feature (519)..(846): Homolog of NCBI NO: 34393498 NR Description: putative tocopherol polyprenyltransferase [Oryza
  misc_feature (1)..(205): Homolog of NCBI NO: 21741757 NR Description: OSJNBa0060B20.16 [Oryza sativa (japonica
  misc_feature (539)..(690): Homolog of NCBI NO: 23039416 NR Description: hypothetical protein [Trichodesmium erythraeum
  misc_feature (710)..(770): Homolog of NCBI NO: 23039416 NR Description: hypothetical protein [Trichodesmium erythraeum
  misc_feature (797)..(844): Homolog of NCBI NO: 23039416 NR Description: hypothetical protein [Trichodesmium erythraeum
  misc_feature (537)..(766): Homolog of NCBI NO: 23125851 NR Description: hypothetical protein [Nostoc punctiforme]
  misc_feature (797)..(844): Homolog of NCBI NO: 23125851 NR Description: hypothetical protein [Nostoc punctiforme]
  misc_feature (537)..(773): Homolog of NCBI NO: 37519852 NR Description: unknown protein [Gloeobacter violaceus]
MLSERREDNIDDFAQEMEISGFWLTDHREGIAQTLLKNVDFKSSAHCEMKFQTEGELAEHAMNCGYRTMNCENEGCTAVFCANQMENHDSVCPFKIIPCEQNCSESIMRRDMDRHCITVCPMKLVNCPFHSVGCLSDVHQCEVQQHHLDNVSSHLMYILRSIYKEASLDDLKPRAEQIQQLSTRLSEARNARSLTNLVKEIDGKLGPLEIKPKIVTDSESDKPENTEKKALEEAEIKEKPETSNLKAVTLEQTAREAPEDKLVSKEVDAAMVKEAAKKVSEAEIADNVNEEGELKAQKLLEIGEFIKEGDNNSADDLSERTETKAPEVVVMDEAREEEDSVETKDTRTYETIRGLEIEANEMIDEETKKSTETKTEAPSRIVMDKEGDEETKKSTETETEAPSRIVMETEKDEETMNSRARASDEAEALSKSSQVASMELSISQSPRVRFSSLAPRFLAASHHHRPSVHLAGKFISLPRDVRFTSLSTSRMRILAVALTFKSRCVYVNYEIPKDQILVGAAESDDPVLDRIARFQNACWRFLRPHTIRGTALGSTALVTRALIENTHLIKWSLVLKALSGLLALICGNGYIVGINQIYDIGIDKVNKPYLPIAAGDLSVQSAWLLVIFFAIAGLLVVGFNFGPFITSLYSLGLFLGTIYSVPPLRMKRFPVAAFLIIATVRGFLLNFGVYHATRAALGLPFQWSAPVAFITSFVTLFALVIAITKDLPDVEGDRKFQISTLATKLGVRNIAFLGSGLLLVNYVSAISLAFYMPQYAALKRPTLLSFNNEQVFRGSLMIPAHVILASGLIFQTWVLEKANYTKEAISGYYRFIWNLFYAEYLLFPFL

SEQ ID NO: 89878 - DNA, 3093 bp, Arabidopsis thaliana
  misc_feature (1)..(3093): Ceres Seq. ID no. 12720964
  misc_feature: MA Experiment ID: 20000173 Result: Down-regulated in Transcription
  misc_feature: MA Experiment 20000173 PARAMETER Experiment Name: At_42deg_Heat_P Parameter: Age (day) Value: 14
  misc_feature: MA Experiment 20000173 PARAMETER Experiment Name: At_42deg_Heat_P Parameter: Organism Value: A. thaliana
  misc_feature: MA Experiment 20000173 PARAMETER Experiment Name: At_42deg_Heat_P Parameter: Plant Line Value: WS
  misc_feature: MA Experiment 20000173 PARAMETER Experiment Name: At_42deg_Heat_P Parameter: Temperature (deg C) Value: 42 vs. 22
  misc_feature: MA Experiment 20000173 PARAMETER Experiment Name: At_42deg_Heat_P Parameter: Timepoint (hr) Value: 6
  misc_feature: MA Experiment 20000173 PARAMETER Experiment Name: At_42deg_Heat_P Parameter: Tissue Value: Aerial
  misc_feature: MA Experiment ID: 20000184 Result: Down-regulated in Transcription
  misc_feature: MA Experiment 20000184 PARAMETER Experiment Name: At_Shoots__P Parameter: Age (day) Value: 7
  misc_feature: MA Experiment 20000184 PARAMETER Experiment Name: At_Shoots__P Parameter: Tissue Value: Shoots vs. Whole Plant
  misc_feature: MA Experiment ID: 20000227 Result: Up-regulated in Transcription
  misc_feature: MA Experiment 20000227 PARAMETER Experiment Name: At_Root-Tips-vs-Tops_P Parameter: Tissue Value: Root Tips vs. Root Tops
  misc_feature: MA Experiment ID: 20000794 Result: Up-regulated in Transcription
  misc_feature: MA Experiment 20000794 PARAMETER Experiment Name: At_Petals_P Parameter: Age (day) Value: 23-25 days
  misc_feature: MA Experiment 20000794 PARAMETER Experiment Name: At_Petals_P Parameter: Plant Line Value: WS
  misc_feature: MA Experiment 20000794 PARAMETER Experiment Name: At_Petals_P Parameter: Tissue Value: Petals vs. Whole plant
  misc_feature: MA Experiment ID: 20001247 Result: Up-regulated in Transcription
  misc_feature: MA Experiment 20001247 PARAMETER Experiment Name: At_Far-red-induction_P Parameter: Age (day) Value: 7
  misc_feature: MA Experiment 20001247 PARAMETER Experiment Name: At_Far-red-induction_P Parameter: Light Value: Far-red vs. White
  misc_feature: MA Experiment 20001247 PARAMETER Experiment Name: At_Far-red-induction_P Parameter: Organism Value: A. thaliana
  misc_feature: MA Experiment 20001247 PARAMETER Experiment Name: At_Far-red-induction_P Parameter: Plant Line Value: Columbia
  misc_feature: MA Experiment 20001247 PARAMETER Experiment Name: At_Far-red-induction_P Parameter: Timepoint (hr) Value: 1
  misc_feature: MA Experiment 20001247 PARAMETER Experiment Name: At_Far-red-induction_P Parameter: Tissue Value: Whole Plant
atggcatctagacaaggatcaaaatcgagaaaagcagggttaaagggtgctgattctactgcatcttcgacaacctcgtcttcgaagctttatcaagagacttctatagatggccatagctcccctgcttcttcatctgctcaaagcaagcagcagttcttctcaccagatcccttaccacaaactgctcagcggtctaaagaaaacgtcacagtgacagttcgctttcgcccactcagtccaagggaaattcgccaaggggaggaggttgcatggtatgcagatggggaaactatcgtgcgaaatgagcataatccgacaatagcttatgcctatgaccgtgtctttggacctacaaccacaacacgcaatgtctatgatattgctgcacaccatgttgttaatggggctatggaggggataaatgggaccattttcgcatatggagtgacaagcagtggaaagacacacacaatgcatggtgaccagagatctcctggtattataccgttagcagtgaaagatgctttcagcatcatccaagagactcctaatcgagaatttcttctgcgtatttcctacatggaaatatataatgaggttgtcaatgatttgttgaatccagcaggacacaatttgaggatcagagaagacaagcagggaacctttgtcgaagggattaaagaagaagttgttttatcccctgctcatgcgctttctcttattgcagctggagaagagcaacgacatgttggatccacaaattttaatttgctcagcagccggagccatacaatatttacgttgacgatagaaagtagtcccttaggtgacaagagtaaaggtgaagctgtacacctctcacaactgaacctcgttgatctggcaggttccgagagttcaaaggttgaaaccagtggtgtaagacgcaaagaaggatcatatataaataaaagtttgctgacgttagggactgtgatatcaaagcttacggatgtgagggcttcacatgtaccatacagagactctaagttaaccaggatccttcagtcctcattgagtggtcatgaccgagtatctctcatttgtaccgtcactcctgcatcaagcagttcggaagaaacacacaatacactgaaatttgctcatcgtgcaaagcatattgagattcaagctgaacaaaacaagataattgatgagaaatcattaatcaagaagtaccaacgcgagattcgtcaactgaaggaagagttggaacagcttaaacaggaaattgtaccagttcctcagctgaaggatattggtgcagatgatattgttcttctgaagcagaagctagaagatggtcaagtcaagctgcaatctagactcgaagaagaggaagaagctaaagcagctctcctgagtcgaatccaaagattgacgaaattaattttggtgtcgactaaaaatccacaagcatctcgattacctcatcgttttaatccgcggaggagacattcatttggggaagaagagcttgcttacctaccatacaagaggcgggacatgatggacgatgagcaacttgacctgtatgtttctgtggagggaaatcatgagattagagataatgcgtatagagaagaaaaaaagacccgcaagcacggattgttaaattggttaaagcctaagaaaagagatcacagttcaagtgccagcgaccagtcaagtgtggtcaaatctaacagcacaccatcaactcctcaagggggaggcagtcatctgcacacagaatcaagactttcagaaggctcgcctttgatggaacaactctcagagcctagggaagacagagaagctttagaagacagttcccatgaaatggagattccggagactagcaataaaatgagcgatgagttggatcttttgagggaacagaaaaagatattatctgaagaggcggcactgcaattaagttctttaaaacggatgtcagatgaagctgcaaagtcccctcaaaatgaggagattaatgaggaaattaaagtactcaatgacgacatcaaagcaaagaatgaccagattgctacgttggagagacagataatggattttgttatgacatctcatgaggcattggataaatctgatatcatgcaggcagttgctgagctgagggatcaacttaatgagaaatcttttgaactcgaggtgatcgaattgtttctgtttatgcaatttttcttcatctatgcagaagttagagatggttttgctattgcctggataagattattcattttagctcaatattatctctcctcatacctgaataaagtttcttctgtgtatattataaaataccagtattcaaaacgccagactatattaacaatgaagctaatggttaaagctgcagataatcgcatcattcagcaaacactcaatgaaaagacatgtgaatgtgaagtgttgcaagaagaagttgcaaatctaaagcagcagctctctgaggccctggaactagcacagggaactaagattaaagagctgaaacaagacgccaaggaactaagtgaatcaaaggagcagttagaactcagaaacaggaaacttgcagaagagagttcatatgcaaaaggtcttgcatcagcagctgcagttgagctcaaggcattatccgaagaagttgcaaagcttatgaatcagaacgagagactagcagctgagctggcaacacagaagagcccaatcgcacaacgaaataagacaggaacaacaacaaatgtaaggaacaatggaagaagagagagtcttgcaaagaggcaagaacatgacagcccatcaatggagctgaagagagaactgaggatgagtaaggaacgtgagctatcgtatgaagctgcacttggtgaaaaagaacaaagagaagctgagcttgaaaggatattagaagaaacaaaacagagagaagcatatctggagaatgagcttgctaatatgtgggttcttgtttctaagctgagaagatctcaaggagcagattcagaaatctctgattctatatcagagacgcgacaaacggaacaaacggaaggttcattttga

SEQ ID NO: 89879 - protein, 1030 aa, Arabidopsis thaliana
  peptide (1)..(1030): Ceres Seq. ID no. 12720965
  misc_feature (384)..(732): Pfam Name: Myosin tail Pfam Description: Myosin tail
  misc_feature (1)..(733): Homolog of NCBI NO: 22326629 NR Description: kinesin-related protein; protein id: At5g06670.1
  misc_feature (793)..(1030): Homolog of NCBI NO: 26450189 NR Description: unknown protein [Arabidopsis thaliana]
  misc_feature (517)..(733): Homolog of NCBI NO: 26450189 NR Description: unknown protein [Arabidopsis thaliana]
  misc_feature (20)..(733): Homolog of NCBI NO: 30687506 NR Description: kinesin-related protein [Arabidopsis thaliana]
  misc_feature (821)..(903): Homolog of NCBI NO: 30687506 NR Description: kinesin-related protein [Arabidopsis thaliana]
  misc_feature (183)..(506): Homolog of NCBI NO: 21741211 NR Description: OSJNBb0086G13.6 [Oryza sativa (japonica
  misc_feature (837)..(1010): Homolog of NCBI NO: 21741211 NR Description: OSJNBb0086G13.6 [Oryza sativa (japonica
  misc_feature (3)..(160): Homolog of NCBI NO: 21741211 NR Description: OSJNBb0086G13.6 [Oryza sativa (japonica
  misc_feature (22)..(484): Homolog of NCBI NO: 18399675 NR Description: kinesin-related protein; protein id: At2g21380.1, by cDNA: gi_14532683 [Arabidopsis thaliana] putative kinesin heavy chain [Arabidopsis thaliana]
  misc_feature (633)..(1027): Homolog of NCBI NO: 18399675 NR Description: kinesin-related protein; protein id: At2g21380.1, by cDNA: gi_14532683 [Arabidopsis thaliana] putative kinesin heavy chain [Arabidopsis thaliana]
MASRQGSKSRKAGLKGADSTASSTTSSSKLYQETSIDGHSSPASSSAQSKQQFFSPDPLPQTAQRSKENVTVTVRFRPLSPREIRQGEEVAWYADGETIVRNEHNPTIAYAYDRVFGPTTTTRNVYDIAAHHVVNGAMEGINGTIFAYGVTSSGKTHTMHGDQRSPGIIPLAVKDAFSIIQETPNREFLLRISYMEIYNEVVNDLLNPAGHNLRIREDKQGTFVEGIKEEVVLSPAHALSLIAAGEEQRHVGSTNFNLLSSRSHTIFTLTIESSPLGDKSKGEAVHLSQLNLVDLAGSESSKVETSGVRRKEGSYINKSLLTLGTVISKLTDVRASHVPYRDSKLTRILQSSLSGHDRVSLICTVTPASSSSEETHNTLKFAHRAKHIEIQAEQNKIIDEKSLIKKYQREIRQLKEELEQLKQEIVPVPQLKDIGADDIVLLKQKLEDGQVKLQSRLEEEEEAKAALLSRIQRLTKLILVSTKNPQASRLPHRFNPRRRHSFGEEELAYLPYKRRDMMDDEQLDLYVSVEGNHEIRDNAYREEKKTRKHGLLNWLKPKKRDHSSSASDQSSVVKSNSTPSTPQGGGSHLHTESRLSEGSPLMEQLSEPREDREALEDSSHEMEIPETSNKMSDELDLLREQKKILSEEAALQLSSLKRMSDEAAKSPQNEEINEEIKVLNDDIKAKNDQIATLERQIMDFVMTSHEALDKSDIMQAVAELRDQLNEKSFELEVIELFLFMQFFFIYAEVRDGFAIAWIRLFILAQYYLSSYLNKVSSVYIIKYQYSKRQTILTMKLMVKAADNRIIQQTLNEKTCECEVLQEEVANLKQQLSEALELAQGTKIKELKQDAKELSESKEQLELRNRKLAEESSYAKGLASAAAVELKALSEEVAKLMNQNERLAAELATQKSPIAQRNKTGTTTNVRNNGRRESLAKRQEHDSPSMELKRELRMSKERELSYEAALGEKEQREAELERILEETKQREAYLENELANMWVLVSKLRRSQGADSEISDSISETRQTEQTEGSF

SEQ ID NO: 89880 - protein, 893 aa, Arabidopsis thaliana
  peptide (1)..(893): Ceres Seq. ID no. 12720966
  misc_feature (247)..(595): Pfam Name: Myosin tail Pfam Description: Myosin tail
  misc_feature (1)..(596): Homolog of NCBI NO: 22326629 NR Description: kinesin-related protein; protein id: At5g06670.1
  misc_feature (656)..(893): Homolog of NCBI NO: 26450189 NR Description: unknown protein [Arabidopsis thaliana]
  misc_feature (380)..(596): Homolog of NCBI NO: 26450189 NR Description: unknown protein [Arabidopsis thaliana]
  misc_feature (1)..(596): Homolog of NCBI NO: 30687506 NR Description: kinesin-related protein [Arabidopsis thaliana]
  misc_feature (684)..(766): Homolog of NCBI NO: 30687506 NR Description: kinesin-related protein [Arabidopsis thaliana]
  misc_feature (46)..(369): Homolog of NCBI NO: 21741211 NR Description: OSJNBb0086G13.6 [Oryza sativa (japonica
  misc_feature (700)..(873): Homolog of NCBI NO: 21741211 NR Description: OSJNBb0086G13.6 [Oryza sativa (japonica
  misc_feature (1)..(23): Homolog of NCBI NO: 21741211 NR Description: OSJNBb0086G13.6 [Oryza sativa (japonica
  misc_feature (1)..(347): Homolog of NCBI NO: 18399675 NR Description: kinesin-related protein; protein id: At2g21380.1, by cDNA: gi_14532683 [Arabidopsis thaliana] putative kinesin heavy chain [Arabidopsis thaliana]
  misc_feature (496)..(890): Homolog of NCBI NO: 18399675 NR Description: kinesin-related protein; protein id: At2g21380.1, by cDNA: gi_14532683 [Arabidopsis thaliana] putative kinesin heavy chain [Arabidopsis thaliana]
MEGINGTIFAYGVTSSGKTHTMHGDQRSPGIIPLAVKDAFSIIQETPNREFLLRISYMEIYNEVVNDLLNPAGHNLRIREDKQGTFVEGIKEEVVLSPAHALSLIAAGEEQRHVGSTNFNLLSSRSHTIFTLTIESSPLGDKSKGEAVHLSQLNLVDLAGSESSKVETSGVRRKEGSYINKSLLTLGTVISKLTDVRASHVPYRDSKLTRILQSSLSGHDRVSLICTVTPASSSSEETHNTLKFAHRAKHIEIQAEQNKIIDEKSLIKKYQREIRQLKEELEQLKQEIVPVPQLKDIGADDIVLLKQKLEDGQVKLQSRLEEEEEAKAALLSRIQRLTKLILVSTKNPQASRLPHRFNPRRRHSFGEEELAYLPYKRRDMMDDEQLDLYVSVEGNHEIRDNAYREEKKTRKHGLLNWLKPKKRDHSSSASDQSSVVKSNSTPSTPQGGGSHLHTESRLSEGSPLMEQLSEPREDREALEDSSHEMEIPETSNKMSDELDLLREQKKILSEEAALQLSSLKRMSDEAAKSPQNEEINEEIKVLNDDIKAKNDQIATLERQIMDFVMTSHEALDKSDIMQAVAELRDQLNEKSFELEVIELFLFMQFFFIYAEVRDGFAIAWIRLFILAQYYLSSYLNKVSSVYIIKYQYSKRQTILTMKLMVKAADNRIIQQTLNEKTCECEVLQEEVANLKQQLSEALELAQGTKIKELKQDAKELSESKEQLELRNRKLAEESSYAKGLASAAAVELKALSEEVAKLMNQNERLAAELATQKSPIAQRNKTGTTTNVRNNGRRESLAKRQEHDSPSMELKRELRMSKERELSYEAALGEKEQREAELERILEETKQREAYLENELANMWVLVSKLRRSQGADSEISDSISETRQTEQTEGSF

SEQ ID NO: 89881 - protein, 872 aa, Arabidopsis thaliana
  peptide (1)..(872): Ceres Seq. ID no. 12720967
  misc_feature (226)..(574): Pfam Name: Myosin tail Pfam Description: Myosin tail
  misc_feature (1)..(575): Homolog of NCBI NO: 22326629 NR Description: kinesin-related protein; protein id: At5g06670.1
  misc_feature (635)..(872): Homolog of NCBI NO: 26450189 NR Description: unknown protein [Arabidopsis thaliana]
  misc_feature (359)..(575): Homolog of NCBI NO: 26450189 NR Description: unknown protein [Arabidopsis thaliana]
  misc_feature (1)..(575): Homolog of NCBI NO: 30687506 NR Description: kinesin-related protein [Arabidopsis thaliana]
  misc_feature (663)..(745): Homolog of NCBI NO: 30687506 NR Description: kinesin-related protein [Arabidopsis thaliana]
  misc_feature (25)..(348): Homolog of NCBI NO: 21741211 NR Description: OSJNBb0086G13.6 [Oryza sativa (japonica
  misc_feature (679)..(852): Homolog of NCBI NO: 21741211 NR Description: OSJNBb0086G13.6 [Oryza sativa (japonica
  misc_feature (1)..(326): Homolog of NCBI NO: 18399675 NR Description: kinesin-related protein; protein id: At2g21380.1, by cDNA: gi_14532683 [Arabidopsis thaliana] putative kinesin heavy chain [Arabidopsis thaliana]
  misc_feature (475)..(869): Homolog of NCBI NO: 18399675 NR Description: kinesin-related protein; protein id: At2g21380.1, by cDNA: gi_14532683 [Arabidopsis thaliana] putative kinesin heavy chain [Arabidopsis thaliana]
  misc_feature (627)..(836): Homolog of NCBI NO: 21741211 NR Description: OSJNBb0086G13.6 [Oryza sativa (japonica
MHGDQRSPGIIPLAVKDAFSIIQETPNREFLLRISYMEIYNEVVNDLLNPAGHNLRIREDKQGTFVEGIKEEVVLSPAHALSLIAAGEEQRHVGSTNFNLLSSRSHTIFTLTIESSPLGDKSKGEAVHLSQLNLVDLAGSESSKVETSGVRRKEGSYINKSLLTLGTVISKLTDVRASHVPYRDSKLTRILQSSLSGHDRVSLICTVTPASSSSEETHNTLKFAHRAKHIEIQAEQNKIIDEKSLIKKYQREIRQLKEELEQLKQEIVPVPQLKDIGADDIVLLKQKLEDGQVKLQSRLEEEEEAKAALLSRIQRLTKLILVSTKNPQASRLPHRFNPRRRHSFGEEELAYLPYKRRDMMDDEQLDLYVSVEGNHEIRDNAYREEKKTRKHGLLNWLKPKKRDHSSSASDQSSVVKSNSTPSTPQGGGSHLHTESRLSEGSPLMEQLSEPREDREALEDSSHEMEIPETSNKMSDELDLLREQKKILSEEAALQLSSLKRMSDEAAKSPQNEEINEEIKVLNDDIKAKNDQIATLERQIMDFVMTSHEALDKSDIMQAVAELRDQLNEKSFELEVIELFLFMQFFFIYAEVRDGFAIAWIRLFILAQYYLSSYLNKVSSVYIIKYQYSKRQTILTMKLMVKAADNRIIQQTLNEKTCECEVLQEEVANLKQQLSEALELAQGTKIKELKQDAKELSESKEQLELRNRKLAEESSYAKGLASAAAVELKALSEEVAKLMNQNERLAAELATQKSPIAQRNKTGTTTNVRNNGRRESLAKRQEHDSPSMELKRELRMSKERELSYEAALGEKEQREAELERILEETKQREAYLENELANMWVLVSKLRRSQGADSEISDSISETRQTEQTEGSF

SEQ ID NO: 89882 - DNA, 669 bp, Arabidopsis thaliana
  misc_feature (1)..(669): Ceres Seq. ID no. 12720976
  misc_feature: MA Experiment ID: 20001910 Result: Up-regulated in Transcription
  misc_feature: MA Experiment 20001910 PARAMETER Experiment Name: At_Drought_Reproduction_P Parameter: Age (day) Value: 37
  misc_feature: MA Experiment 20001910 PARAMETER Experiment Name: At_Drought_Reproduction_P Parameter: Organism Value: A. thaliana
  misc_feature: MA Experiment 20001910 PARAMETER Experiment Name: At_Drought_Reproduction_P Parameter: Plant Line Value: WS
  misc_feature: MA Experiment 20001910 PARAMETER Experiment Name: At_Drought_Reproduction_P Parameter: Timepoint (day) Value: 7
  misc_feature: MA Experiment 20001910 PARAMETER Experiment Name: At_Drought_Reproduction_P Parameter: Tissue Value: Flowers
  misc_feature: MA Experiment 20001910 PARAMETER Experiment Name: At_Drought_Reproduction_P Parameter: Treatment Value: Drought vs. No Drought
atgtctaatttgtatggagattataaccaaaagatcgattacgtcttcaaagtcgtgttgatcggtgattctgccgttggcaaaactcagcttcttgctcggttcgctaggaatgagtttagcgtcgattctaaagccaccattggtgttgaattccagactaaaacgctcgtcattgataacaaaaccgtcaaagctcagatttgggatactgctggccaagaaagatatagggcggtgacaagtgcatactaccgtggagcagttggggcaatgttggtctacgacatgaccaaacgtcaatcattcgatcacatggctaaatggctggaagagttacgaggacatgcggacaagaacatagtgattatgctaattgggaacaaatgtgatcttggaagcctaagagcagtgccaacagaagacgcacaagagtttgcacaaagagaaaacttgtttttcatggaaacctctgctctagaagctaccaatgttgaaacagcatttttgaccatcttaacagagatctaccgaataatcagcaagaaatcactaacggctgatgatgatgacgccgatggtaattcaagtctcttgaaaggaactagaatcatcatcccgagcgagcaagagagtgggaaaagaggtggatgttgcggcaaatcgtaa

SEQ ID NO: 89883 - protein, 222 aa, Arabidopsis thaliana
  peptide (1)..(222): Ceres Seq. ID no. 12720977
  misc_feature (17)..(178): Pfam Name: Ras family Pfam Description: Ras family
  misc_feature (1)..(222): Homolog of NCBI NO: 15230422 NR Description: ras-related GTP-binding protein, putative;
  misc_feature (1)..(222): Homolog of NCBI NO: 12322015 NR Description: ras-related GTP-binding protein, putative;
  misc_feature (1)..(222): Homolog of NCBI NO: 15238852 NR Description: Ras-related GTP-binding protein, putative; id: At5g47960.1, supported by cDNA: gi_12004622 [Arabidopsis
MSNLYGDYNQKIDYVFKVVLIGDSAVGKTQLLARFARNEFSVDSKATIGVEFQTKTLVIDNKTVKAQIWDTAGQERYRAVTSAYYRGAVGAMLVYDMTKRQSFDHMAKWLEELRGHADKNIVIMLIGNKCDLGSLRAVPTEDAQEFAQRENLFFMETSALEATNVETAFLTILTEIYRIISKKSLTADDDDADGNSSLLKGTRIIIPSEQESGKRGGCCGKS

SEQ ID NO: 89884 - protein, 131 aa, Arabidopsis thaliana
  peptide (1)..(131): Ceres Seq. ID no. 12720978
  misc_feature (1)..(87): Pfam Name: Ras family Pfam Description: Ras family
  misc_feature (1)..(131): Homolog of NCBI NO: 15230422 NR Description: ras-related GTP-binding protein, putative;
  misc_feature (1)..(131): Homolog of NCBI NO: 12322015 NR Description: ras-related GTP-binding protein, putative;
  misc_feature (1)..(131): Homolog of NCBI NO: 15238852 NR Description: Ras-related GTP-binding protein, putative; id: At5g47960.1, supported by cDNA: gi_12004622 [Arabidopsis
MLVYDMTKRQSFDHMAKWLEELRGHADKNIVIMLIGNKCDLGSLRAVPTEDAQEFAQRENLFFMETSALEATNVETAFLTILTEIYRIISKKSLTADDDDADGNSSLLKGTRIIIPSEQESGKRGGCCGKS

SEQ ID NO: 89885 - protein, 126 aa, Arabidopsis thaliana
  peptide (1)..(126): Ceres Seq. ID no. 12720979
  misc_feature (1)..(82): Pfam Name: Ras family Pfam Description: Ras family
  misc_feature (1)..(126): Homolog of NCBI NO: 15230422 NR Description: ras-related GTP-binding protein, putative;
  misc_feature (1)..(126): Homolog of NCBI NO: 12322015 NR Description: ras-related GTP-binding protein, putative;
  misc_feature (1)..(126): Homolog of NCBI NO: 15238852 NR Description: Ras-related GTP-binding protein, putative; id: At5g47960.1, supported by cDNA: gi_12004622 [Arabidopsis
MTKRQSFDHMAKWLEELRGHADKNIVIMLIGNKCDLGSLRAVPTEDAQEFAQRENLFFMETSALEATNVETAFLTILTEIYRIISKKSLTADDDDADGNSSLLKGTRIIIPSEQESGKRGGCCGKS

SEQ ID NO: 89886 - DNA, 789 bp, Arabidopsis thaliana
  misc_feature (1)..(789): Ceres Seq. ID no. 12720980
  misc_feature: MA Experiment ID: 20000179 Result: Up-regulated in Transcription
  misc_feature: MA Experiment 20000179 PARAMETER Experiment Name: At_Germinating_Seeds_P Parameter: Age (hr) Value: 6 vs. 0
  misc_feature: MA Experiment 20000179 PARAMETER Experiment Name: At_Germinating_Seeds_P Parameter: Tissue Value: Germinating Seeds
  misc_feature: MA Experiment ID: 20000180 Result: Up-regulated in Transcription
  misc_feature: MA Experiment 20000180 PARAMETER Experiment Name: At_Germinating_Seeds_P Parameter: Age (hr) Value: 24 vs. 0
  misc_feature: MA Experiment 20000180 PARAMETER Experiment Name: At_Germinating_Seeds_P Parameter: Tissue Value: Germinating Seeds
  misc_feature: MA Experiment ID: 20000436 Result: Down-regulated in Transcription
  misc_feature: MA Experiment 20000436 PARAMETER Experiment Name: At_Drought_P Parameter: Age (day) Value: 7
  misc_feature: MA Experiment 20000436 PARAMETER Experiment Name: At_Drought_P Parameter: Organism Value: A. thaliana
  misc_feature: MA Experiment 20000436 PARAMETER Experiment Name: At_Drought_P Parameter: Plant Line Value: WS
  misc_feature: MA Experiment 20000436 PARAMETER Experiment Name: At_Drought_P Parameter: Timepoint (hr) Value: 12
  misc_feature: MA Experiment 20000436 PARAMETER Experiment Name: At_Drought_P Parameter: Tissue Value: Whole Plant
  misc_feature: MA Experiment 20000436 PARAMETER Experiment Name: At_Drought_P Parameter: Treatment Value: Drought vs. No Drought
  misc_feature: MA Experiment ID: 20000437 Result: Down-regulated in Transcription
  misc_feature: MA Experiment 20000437 PARAMETER Experiment Name: At_Drought_P Parameter: Age (day) Value: 8
  misc_feature: MA Experiment 20000437 PARAMETER Experiment Name: At_Drought_P Parameter: Organism Value: A. thaliana
  misc_feature: MA Experiment 20000437 PARAMETER Experiment Name: At_Drought_P Parameter: Plant Line Value: WS
  misc_feature: MA Experiment 20000437 PARAMETER Experiment Name: At_Drought_P Parameter: Timepoint (hr) Value: 24
  misc_feature: MA Experiment 20000437 PARAMETER Experiment Name: At_Drought_P Parameter: Tissue Value: Whole Plant
  misc_feature: MA Experiment 20000437 PARAMETER Experiment Name: At_Drought_P Parameter: Treatment Value: Drought vs. No Drought
  misc_feature: MA Experiment ID: 20000441 Result: Down-regulated in Transcription
  misc_feature: MA Experiment 20000441 PARAMETER Experiment Name: At_1uM_BR-BRZ__P Parameter: Tissue Value: Shoot Apices
  misc_feature: MA Experiment 20000441 PARAMETER Experiment Name: At_1uM_BR-BRZ__P Parameter: Treatment Value: 1uM BR vs. No Treatment
  misc_feature: MA Experiment ID: 20000443 Result: Down-regulated in Transcription
  misc_feature: MA Experiment 20000443 PARAMETER Experiment Name: At_1uM_BR-BRZ__P Parameter: Tissue Value: Shoot Apices
  misc_feature: MA Experiment 20000443 PARAMETER Experiment Name: At_1uM_BR-BRZ__P Parameter: Treatment Value: 1uM BRZ vs. No Treatment
  misc_feature: MA Experiment ID: 20000451 Result: Up-regulated in Transcription
  misc_feature: MA Experiment 20000451 PARAMETER Experiment Name: At_CS6879_Shoots-Roots_P Parameter: Age (day) Value: 14
  misc_feature: MA Experiment 20000451 PARAMETER Experiment Name: At_CS6879_Shoots-Roots_P Parameter: Organism Value: A. thaliana
  misc_feature: MA Experiment 20000451 PARAMETER Experiment Name: At_CS6879_Shoots-Roots_P Parameter: Plant Line Value: CS6879 vs. WS
  misc_feature: MA Experiment 20000451 PARAMETER Experiment Name: At_CS6879_Shoots-Roots_P Parameter: Tissue Value: Roots
  misc_feature: MA Experiment ID: 20000495 Result: Up-regulated in Transcription
  misc_feature: MA Experiment 20000495 PARAMETER Experiment Name: At_Guard_Cells_P Parameter: Harvest Date Value: 8/2/2002
  misc_feature: MA Experiment 20000495 PARAMETER Experiment Name: At_Guard_Cells_P Parameter: Organism Value: A. thaliana
  misc_feature: MA Experiment 20000495 PARAMETER Experiment Name: At_Guard_Cells_P Parameter: Tissue Value: Guard Cells vs. Leaves
atggagaatgatggaagatccaatgagaaaaatctgtacgaggttcttggtgttgaagcaacagcatctccacaagagataaggaaagcgtatcataagttagcattgaggcttcatcctgataaaaacaaggatgatgaggatgctaaagagaaatttcagcagttgcaaaaggttatttcgattctcggtgatgaagagaaaagagcagtctatgatcaaactggctcagttgatgatgctgatctttcgggagatgtggttgacaacttgagggacttcttcaaggcaatgtacaagaaggtcaccgaggaagatattgaagagtttgaggccaactataggggttctgaatccgagaagaatgatttgattgagctatataacaagtttaagggtaaaatgagcaggcttttctgctcaatgctttgctcgaaccccaagcttgattcgcaccgtttcaaagatattatcgatgaggccattgcagcgggagaagtgaaatcaacaaaagcttacaagaaatgggcaaaggagattgcagaaatggaacctcccacgaatccccagaagatgagacggaaagcagcaaaggctgcagataaagatttatacgctgtaatgtcccagcggggagatgagaggaaagagaagttcgattcaatgttctcttcacttgtctctaggtatggtagcaatgctgactctgagccaaacgaagaagagttcgaagctgctcagagaaaagttgaaagccggagatcatcgaagaagtctagaaaaaaataa

SEQ ID NO: 89887 - protein, 262 aa, Arabidopsis thaliana
  peptide (1)..(262): Ceres Seq. ID no. 12720981
  misc_feature (11)..(76): Pfam Name: DnaJ domain Pfam Description: DnaJ domain
  misc_feature (1)..(262): Homolog of NCBI NO: 15230424 NR Description: DnaJ protein, putative; protein id: At3g12170.1
  misc_feature (1)..(262): Homolog of NCBI NO: 15240212 NR Description: DnaJ homologue (gb|AAB91418.1|); protein id: supported by cDNA: gi_2689719 [Arabidopsis thaliana]
  misc_feature (1)..(262): Homolog of NCBI NO: 2689720 NR Description: DnaJ homologue [Arabidopsis thaliana]
  misc_feature (1)..(149): Homolog of NCBI NO: 12322012 NR Description: DnaJ protein, putative, 3' partial; 1110-1
  misc_feature (11)..(230): Homolog of NCBI NO: 39794528 NR Description: Unknown (protein for MGC:76175) [Silurana
  misc_feature (11)..(249): Homolog of NCBI NO: 34868976 NR Description: similar to J domain of DnaJ-like-protein 1 - rat
  misc_feature (11)..(249): Homolog of NCBI NO: 25513803 NR Description: J domain of DnaJ-like-protein 1 - rat
  misc_feature (11)..(262): Homolog of NCBI NO: 27597059 NR Description: DnaJ homolog, subfamily C, member 9; DnaJ protein
  misc_feature (11)..(230): Homolog of NCBI NO: 23956266 NR Description: similar to DnaJ protein SB73; likely ortholog of
  misc_feature (12)..(262): Homolog of NCBI NO: 9971117 NR Description: dJ1099D15.1 (putative DNAJ protein) [Homo sapiens]
MENDGRSNEKNLYEVLGVEATASPQEIRKAYHKLALRLHPDKNKDDEDAKEKFQQLQKVISILGDEEKRAVYDQTGSVDDADLSGDVVDNLRDFFKAMYKKVTEEDIEEFEANYRGSESEKNDLIELYNKFKGKMSRLFCSMLCSNPKLDSHRFKDIIDEAIAAGEVKSTKAYKKWAKEIAEMEPPTNPQKMRRKAAKAADKDLYAVMSQRGDERKEKFDSMFSSLVSRYGSNADSEPNEEEFEAAQRKVESRRSSKKSRKK

SEQ ID NO: 89888 - protein, 165 aa, Arabidopsis thaliana
  peptide (1)..(165): Ceres Seq. ID no. 12720982
  misc_feature (1)..(165): Homolog of NCBI NO: 15230424 NR Description: DnaJ protein, putative; protein id: At3g12170.1
  misc_feature (1)..(165): Homolog of NCBI NO: 15240212 NR Description: DnaJ homologue (gb|AAB91418.1|); protein id: supported by cDNA: gi_2689719 [Arabidopsis thaliana]
  misc_feature (1)..(165): Homolog of NCBI NO: 2689720 NR Description: DnaJ homologue [Arabidopsis thaliana]
  misc_feature (1)..(52): Homolog of NCBI NO: 12322012 NR Description: DnaJ protein, putative, 3' partial; 1110-1
  misc_feature (1)..(133): Homolog of NCBI NO: 39794528 NR Description: Unknown (protein for MGC:76175) [Silurana
  misc_feature (1)..(152): Homolog of NCBI NO: 34868976 NR Description: similar to J domain of DnaJ-like-protein 1 - rat
  misc_feature (1)..(152): Homolog of NCBI NO: 25513803 NR Description: J domain of DnaJ-like-protein 1 - rat
  misc_feature (1)..(165): Homolog of NCBI NO: 27597059 NR Description: DnaJ homolog, subfamily C, member 9; DnaJ protein
  misc_feature (1)..(133): Homolog of NCBI NO: 23956266 NR Description: similar to DnaJ protein SB73; likely ortholog of
  misc_feature (1)..(165): Homolog of NCBI NO: 9971117 NR Description: dJ1099D15.1 (putative DNAJ protein) [Homo sapiens]
MYKKVTEEDIEEFEANYRGSESEKNDLIELYNKFKGKMSRLFCSMLCSNPKLDSHRFKDIIDEAIAAGEVKSTKAYKKWAKEIAEMEPPTNPQKMRRKAAKAADKDLYAVMSQRGDERKEKFDSMFSSLVSRYGSNADSEPNEEEFEAAQRKVESRRSSKKSRKK

SEQ ID NO: 89889 - DNA, 848 bp, Arabidopsis thaliana
  misc_feature (1)..(848): Ceres Seq. ID no. 12721000
  misc_feature: MA Experiment ID: 20000166 Result: Up-regulated in Transcription
  misc_feature: MA Experiment 20000166 PARAMETER Experiment Name: At_100uM_ABA_P Parameter: Age (day) Value: 14
  misc_feature: MA Experiment 20000166 PARAMETER Experiment Name: At_100uM_ABA_P Parameter: Organism Value: A. thaliana
  misc_feature: MA Experiment 20000166 PARAMETER Experiment Name: At_100uM_ABA_P Parameter: Plant Line Value: WS
  misc_feature: MA Experiment 20000166 PARAMETER Experiment Name: At_100uM_ABA_P Parameter: Timepoint (hr) Value: 1
  misc_feature: MA Experiment 20000166 PARAMETER Experiment Name: At_100uM_ABA_P Parameter: Tissue Value: Aerial
  misc_feature: MA Experiment 20000166 PARAMETER Experiment Name: At_100uM_ABA_P Parameter: Treatment Value: 100uM ABA vs. No Treatment
  misc_feature: MA Experiment ID: 20000169 Result: Up-regulated in Transcription
  misc_feature: MA Experiment 20000169 PARAMETER Experiment Name: At_100uM_ABA_P Parameter: Age (day) Value: 14
  misc_feature: MA Experiment 20000169 PARAMETER Experiment Name: At_100uM_ABA_P Parameter: Organism Value: A. thaliana
  misc_feature: MA Experiment 20000169 PARAMETER Experiment Name: At_100uM_ABA_P Parameter: Plant Line Value: WS
  misc_feature: MA Experiment 20000169 PARAMETER Experiment Name: At_100uM_ABA_P Parameter: Timepoint (hr) Value: 6
  misc_feature: MA Experiment 20000169 PARAMETER Experiment Name: At_100uM_ABA_P Parameter: Tissue Value: Aerial
  misc_feature: MA Experiment 20000169 PARAMETER Experiment Name: At_100uM_ABA_P Parameter: Treatment Value: 100uM ABA vs. No Treatment
  misc_feature: MA Experiment ID: 20000180 Result: Up-regulated in Transcription
  misc_feature: MA Experiment 20000180 PARAMETER Experiment Name: At_Germinating_Seeds_P Parameter: Age (hr) Value: 24 vs. 0
  misc_feature: MA Experiment 20000180 PARAMETER Experiment Name: At_Germinating_Seeds_P Parameter: Tissue Value: Germinating Seeds
  misc_feature: MA Experiment ID: 20000264 Result: Down-regulated in Transcription
  misc_feature: MA Experiment 20000264 PARAMETER Experiment Name: At_Open_Flower_P Parameter: Age (day) Value: 21
  misc_feature: MA Experiment 20000264 PARAMETER Experiment Name: At_Open_Flower_P Parameter: Plant Line Value: WS
  misc_feature: MA Experiment 20000264 PARAMETER Experiment Name: At_Open_Flower_P Parameter: Tissue Value: Open Flower vs. Whole Plant
  misc_feature: MA Experiment ID: 20000265 Result: Down-regulated in Transcription
  misc_feature: MA Experiment 20000265 PARAMETER Experiment Name: At_Open_Flower_P Parameter: Age (day) Value: 21
  misc_feature: MA Experiment 20000265 PARAMETER Experiment Name: At_Open_Flower_P Parameter: Plant Line Value: WS
  misc_feature: MA Experiment 20000265 PARAMETER Experiment Name: At_Open_Flower_P Parameter: Tissue Value: Closed Flower vs. Whole Plant
  misc_feature: MA Experiment ID: 20000286 Result: Down-regulated in Transcription
  misc_feature: MA Experiment 20000286 PARAMETER Experiment Name: At_Open_Flower_P Parameter: Age (day) Value: 21
  misc_feature: MA Experiment 20000286 PARAMETER Experiment Name: At_Open_Flower_P Parameter: Plant Line Value: WS
  misc_feature: MA Experiment 20000286 PARAMETER Experiment Name: At_Open_Flower_P Parameter: Tissue Value: Half Open vs. Whole Plant
  misc_feature: MA Experiment ID: 20000436 Result: Up-regulated in Transcription
  misc_feature: MA Experiment 20000436 PARAMETER Experiment Name: At_Drought_P Parameter: Age (day) Value: 7
  misc_feature: MA Experiment 20000436 PARAMETER Experiment Name: At_Drought_P Parameter: Organism Value: A. thaliana
  misc_feature: MA Experiment 20000436 PARAMETER Experiment Name: At_Drought_P Parameter: Plant Line Value: WS
  misc_feature: MA Experiment 20000436 PARAMETER Experiment Name: At_Drought_P Parameter: Timepoint (hr) Value: 12
  misc_feature: MA Experiment 20000436 PARAMETER Experiment Name: At_Drought_P Parameter: Tissue Value: Whole Plant
  misc_feature: MA Experiment 20000436 PARAMETER Experiment Name: At_Drought_P Parameter: Treatment Value: Drought vs. No Drought
  misc_feature: MA Experiment ID: 20000437 Result: Up-regulated in Transcription
  misc_feature: MA Experiment 20000437 PARAMETER Experiment Name: At_Drought_P Parameter: Age (day) Value: 8
  misc_feature: MA Experiment 20000437 PARAMETER Experiment Name: At_Drought_P Parameter: Organism Value: A. thaliana
  misc_feature: MA Experiment 20000437 PARAMETER Experiment Name: At_Drought_P Parameter: Plant Line Value: WS
  misc_feature: MA Experiment 20000437 PARAMETER Experiment Name: At_Drought_P Parameter: Timepoint (hr) Value: 24
  misc_feature: MA Experiment 20000437 PARAMETER Experiment Name: At_Drought_P Parameter: Tissue Value: Whole Plant
  misc_feature: MA Experiment 20000437 PARAMETER Experiment Name: At_Drought_P Parameter: Treatment Value: Drought vs. No Drought
  misc_feature: MA Experiment ID: 20000439 Result: Down-regulated in Transcription
  misc_feature: MA Experiment 20000439 PARAMETER Experiment Name: At_Roots__P Parameter: Age (day) Value: 14 vs. 21
  misc_feature: MA Experiment 20000439 PARAMETER Experiment Name: At_Roots__P Parameter: Organism Value: A. thaliana
  misc_feature: MA Experiment 20000439 PARAMETER Experiment Name: At_Roots__P Parameter: Tissue Value: Roots vs. Whole Plant
  misc_feature: MA Experiment ID: 20000453 Result: Up-regulated in Transcription
  misc_feature: MA Experiment 20000453 PARAMETER Experiment Name: At_100uM_ABA_P Parameter: Age (day) Value: 15
  misc_feature: MA Experiment 20000453 PARAMETER Experiment Name: At_100uM_ABA_P Parameter: Organism Value: A. thaliana
  misc_feature: MA Experiment 20000453 PARAMETER Experiment Name: At_100uM_ABA_P Parameter: Plant Line Value: WS
  misc_feature: MA Experiment 20000453 PARAMETER Experiment Name: At_100uM_ABA_P Parameter: Timepoint (hr) Value: 24
  misc_feature: MA Experiment 20000453 PARAMETER Experiment Name: At_100uM_ABA_P Parameter: Tissue Value: Aerial
  misc_feature: MA Experiment 20000453 PARAMETER Experiment Name: At_100uM_ABA_P Parameter: Treatment Value: 100uM ABA vs. No Treatment
  misc_feature: MA Experiment ID: 20000573 Result: Down-regulated in Transcription
  misc_feature: MA Experiment 20000573 PARAMETER Experiment Name: At_100uM_ABA_Mutants__P Parameter: Organism Value: A. thaliana
  misc_feature: MA Experiment 20000573 PARAMETER Experiment Name: At_100uM_ABA_Mutants__P Parameter: Plant Line Value: CS22 vs. Ler wt
  misc_feature: MA Experiment 20000573 PARAMETER Experiment Name: At_100uM_ABA_Mutants__P Parameter: Timepoint (hr) Value: N/A
  misc_feature: MA Experiment 20000573 PARAMETER Experiment Name: At_100uM_ABA_Mutants__P Parameter: Tissue Value: Whole Plant
  misc_feature: MA Experiment 20000573 PARAMETER Experiment Name: At_100uM_ABA_Mutants__P Parameter: Treatment Value: None
  misc_feature: MA Experiment ID: 20000574 Result: Down-regulated in Transcription
  misc_feature: MA Experiment 20000574 PARAMETER Experiment Name: At_100uM_ABA_Mutants__P Parameter: Organism Value: A. thaliana
  misc_feature: MA Experiment 20000574 PARAMETER Experiment Name: At_100uM_ABA_Mutants__P Parameter: Plant Line Value: CS23 vs. Ler wt
  misc_feature: MA Experiment 20000574 PARAMETER Experiment Name: At_100uM_ABA_Mutants__P Parameter: Timepoint (hr) Value: N/A
  misc_feature: MA Experiment 20000574 PARAMETER Experiment Name: At_100uM_ABA_Mutants__P Parameter: Tissue Value: Whole Plant
  misc_feature: MA Experiment 20000574 PARAMETER Experiment Name: At_100uM_ABA_Mutants__P Parameter: Treatment Value: None
  misc_feature: MA Experiment ID: 20000794 Result: Down-regulated in Transcription
  misc_feature: MA Experiment 20000794 PARAMETER Experiment Name: At_Petals_P Parameter: Age (day) Value: 23-25 days
  misc_feature: MA Experiment 20000794 PARAMETER Experiment Name: At_Petals_P Parameter: Plant Line Value: WS
  misc_feature: MA Experiment 20000794 PARAMETER Experiment Name: At_Petals_P Parameter: Tissue Value: Petals vs. Whole plant
  misc_feature: MA Experiment ID: 20001554 Result: Up-regulated in Transcription
  misc_feature: MA Experiment 20001554 PARAMETER Experiment Name: At_Drought_Soil_Dry_P Parameter: Age (day) Value: 21
  misc_feature: MA Experiment 20001554 PARAMETER Experiment Name: At_Drought_Soil_Dry_P Parameter: Organism Value: A. thaliana
  misc_feature: MA Experiment 20001554 PARAMETER Experiment Name: At_Drought_Soil_Dry_P Parameter: Plant Line Value: WS
  misc_feature: MA Experiment 20001554 PARAMETER Experiment Name: At_Drought_Soil_Dry_P Parameter: Post Timepoint (hr) Value: None
  misc_feature: MA Experiment 20001554 PARAMETER Experiment Name: At_Drought_Soil_Dry_P Parameter: Post-Treatment Value: None
  misc_feature: MA Experiment 20001554 PARAMETER Experiment Name: At_Drought_Soil_Dry_P Parameter: Timepoint (day) Value: 7
  misc_feature: MA Experiment 20001554 PARAMETER Experiment Name: At_Drought_Soil_Dry_P Parameter: Treatment Value: Drought vs. No Drought
  misc_feature: MA Experiment ID: 20001555 Result: Up-regulated in Transcription
  misc_feature: MA Experiment 20001555 PARAMETER Experiment Name: At_Drought_Soil_Dry_P Parameter: Age (day) Value: 24
  misc_feature: MA Experiment 20001555 PARAMETER Experiment Name: At_Drought_Soil_Dry_P Parameter: Organism Value: A. thaliana
  misc_feature: MA Experiment 20001555 PARAMETER Experiment Name: At_Drought_Soil_Dry_P Parameter: Plant Line Value: WS
  misc_feature: MA Experiment 20001555 PARAMETER Experiment Name: At_Drought_Soil_Dry_P Parameter: Post Timepoint (hr) Value: None
  misc_feature: MA Experiment 20001555 PARAMETER Experiment Name: At_Drought_Soil_Dry_P Parameter: Post-Treatment Value: None
  misc_feature: MA Experiment 20001555 PARAMETER Experiment Name: At_Drought_Soil_Dry_P Parameter: Timepoint (day) Value: 10
  misc_feature: MA Experiment 20001555 PARAMETER Experiment Name: At_Drought_Soil_Dry_P Parameter: Treatment Value: Drought vs. No Drought
  misc_feature: MA Experiment ID: 20001557 Result: Down-regulated in Transcription
  misc_feature: MA Experiment 20001557 PARAMETER Experiment Name: At_Drought_Soil_Dry_P Parameter: Age (day) Value: 27
  misc_feature: MA Experiment 20001557 PARAMETER Experiment Name: At_Drought_Soil_Dry_P Parameter: Organism Value: A. thaliana
  misc_feature: MA Experiment 20001557 PARAMETER Experiment Name: At_Drought_Soil_Dry_P Parameter: Plant Line Value: WS
  misc_feature: MA Experiment 20001557 PARAMETER Experiment Name: At_Drought_Soil_Dry_P Parameter: Post Timepoint (hr) Value: 3
  misc_feature: MA Experiment 20001557 PARAMETER Experiment Name: At_Drought_Soil_Dry_P Parameter: Post-Treatment Value: Re-Water vs. No Drought
  misc_feature: MA Experiment 20001557 PARAMETER Experiment Name: At_Drought_Soil_Dry_P Parameter: Timepoint (day) Value: 13
  misc_feature: MA Experiment 20001557 PARAMETER Experiment Name: At_Drought_Soil_Dry_P Parameter: Treatment Value: Drought vs. No Drought
  misc_feature: MA Experiment ID: 20001558 Result: Down-regulated in Transcription
  misc_feature: MA Experiment 20001558 PARAMETER Experiment Name: At_Drought_Soil_Dry_P Parameter: Age (day) Value: 27
  misc_feature: MA Experiment 20001558 PARAMETER Experiment Name: At_Drought_Soil_Dry_P Parameter: Organism Value: A. thaliana
  misc_feature: MA Experiment 20001558 PARAMETER Experiment Name: At_Drought_Soil_Dry_P Parameter: Plant Line Value: WS
  misc_feature: MA Experiment 20001558 PARAMETER Experiment Name: At_Drought_Soil_Dry_P Parameter: Post Timepoint (hr) Value: 6
  misc_feature: MA Experiment 20001558 PARAMETER Experiment Name: At_Drought_Soil_Dry_P Parameter: Post-Treatment Value: Re-Water vs. No Drought
  misc_feature: MA Experiment 20001558 PARAMETER Experiment Name: At_Drought_Soil_Dry_P Parameter: Timepoint (day) Value: 13
  misc_feature: MA Experiment 20001558 PARAMETER Experiment Name: At_Drought_Soil_Dry_P Parameter: Treatment Value: Drought vs. No Drought
  misc_feature: MA Experiment ID: 20001560 Result: Down-regulated in Transcription
  misc_feature: MA Experiment 20001560 PARAMETER Experiment Name: At_Drought_Soil_Dry_P Parameter: Age (day) Value: 28
  misc_feature: MA Experiment 20001560 PARAMETER Experiment Name: At_Drought_Soil_Dry_P Parameter: Organism Value: A. thaliana
  misc_feature: MA Experiment 20001560 PARAMETER Experiment Name: At_Drought_Soil_Dry_P Parameter: Plant Line Value: WS
  misc_feature: MA Experiment 20001560 PARAMETER Experiment Name: At_Drought_Soil_Dry_P Parameter: Post Timepoint (hr) Value: None
  misc_feature: MA Experiment 20001560 PARAMETER Experiment Name: At_Drought_Soil_Dry_P Parameter: Post-Treatment Value: None
  misc_feature: MA Experiment 20001560 PARAMETER Experiment Name: At_Drought_Soil_Dry_P Parameter: Timepoint (day) Value: 14
  misc_feature: MA Experiment 20001560 PARAMETER Experiment Name: At_Drought_Soil_Dry_P Parameter: Treatment Value: Drought vs. No Drought
cgacagggattccggtggagggcaaaacgggaacaaccagaacggacagtcctccttgtctccaagagagcaagacaggttcttgccgatcgctaacgtcagccggatcatgaagaaggccttgcccgccaacgccaagatctctaaagatgccaaagagacgatgcaggagtgtgtctccgagttcatcagcttcgtcaccggagaagcatctgataagtgtcagaaggagaagaggaagacgatcaacggagacgatttgctctgggctatgactactctaggttttgaggattatgttgagccattgaaagtttacttgcagaggtttagggagatcgaaggggagaggactggactagggaggccacagactggtggtgaggtcggagagcatcagagagatgctgtcggagatggcggtgggttctacggtggtggtggtgggatgcagtatcaccaacatcatcagtttcttcaccagcagaaccatatgtatggagccacaggtggcggtagcgacagtggaggtggagctgcctccggtaggacaaggacttaacaaagattggtgaagtggatctctctctgtatatagatacataaatacatgtatacacatgcctatttttacgacccatataaggtatctatcatgtgatagaacgaacattggtgttggtgatgtaaaatcagatgtgcattaagggtttagattttgaggctgtgtaaagaagatcaagtgtgcttgttgaacaataggattcactaacgaatctgcttcattgaatcttgtatgtaactaaagccattgtattgaatgcaaatgttttcatttgggatgcttt

SEQ ID NO: 89890 - protein, 186 aa, Arabidopsis thaliana
  peptide (1)..(186): Ceres Seq. ID no. 12721001
  misc_feature (1)..(186): Homolog of NCBI NO: 2398529 NR Description: Transcription factor [Arabidopsis thaliana]
  misc_feature (1)..(186): Homolog of NCBI NO: 15238156 NR Description: putative protein; protein id: At5g47640.1, by cDNA: gi_14326579, supported by cDNA: gi_18700233 [Arabidopsis >gi|9758792|dbj|BAB09090.1| contains similarity to [Arabidopsis
  misc_feature (64)..(186): Homolog of NCBI NO: 9965735 NR Description: transcription factor Hap3b [Arabidopsis thaliana]
  misc_feature (1)..(160): Homolog of NCBI NO: 15233475 NR Description: CCAAT-binding transcription factor subunit protein id: At4g14540.1 [Arabidopsis thaliana]
  misc_feature (5)..(164): Homolog of NCBI NO: 22380 NR Description: CAAT-box DNA binding protein subunit B (NF-YB)
  misc_feature (5)..(164): Homolog of NCBI NO: 115840 NR Description: CCAAT-BINDING TRANSCRIPTION FACTOR SUBUNIT A
  misc_feature (1)..(135): Homolog of NCBI NO: 15231796 NR Description: transcription factor NF-Y, CCAAT-binding - like protein id: At3g53340.1 [Arabidopsis thaliana]
  misc_feature (2)..(164): Homolog of NCBI NO: 30409461 NR Description: NF-YB [Oryza sativa (japonica cultivar-group)]
  misc_feature (15)..(145): Homolog of NCBI NO: 18404885 NR Description: putative CCAAT-binding transcription factor protein id: At2g38880.1, supported by cDNA: 7805. [Arabidopsis >gi|2398527|emb|CAA74051.1| Transcription factor [Arabidopsis
  misc_feature (5)..(155): Homolog of NCBI NO: 17979253 NR Description: At2g37060/T2N18.18 [Arabidopsis thaliana]
DRDSGGGQNGNNQNGQSSLSPREQDRFLPIANVSRIMKKALPANAKISKDAKETMQECVSEFISFVTGEASDKCQKEKRKTINGDDLLWAMTTLGFEDYVEPLKVYLQRFREIEGERTGLGRPQTGGEVGEHQRDAVGDGGGFYGGGGGMQYHQHHQFLHQQNHMYGATGGGSDSGGGAASGRTRT

SEQ ID NO: 89891 - protein, 150 aa, Arabidopsis thaliana; identical to SEQ ID NO: 48331
  peptide (1)..(150): Ceres Seq. ID no. 12721002
  misc_feature (1)..(150): Homolog of NCBI NO: 2398529 NR Description: Transcription factor [Arabidopsis thaliana]
  misc_feature (1)..(150): Homolog of NCBI NO: 15238156 NR Description: putative protein; protein id: At5g47640.1, by cDNA: gi_14326579, supported by cDNA: gi_18700233 [Arabidopsis >gi|9758792|dbj|BAB09090.1| contains similarity to [Arabidopsis
  misc_feature (28)..(150): Homolog of NCBI NO: 9965735 NR Description: transcription factor Hap3b [Arabidopsis thaliana]
  misc_feature (1)..(124): Homolog of NCBI NO: 15233475 NR Description: CCAAT-binding transcription factor subunit protein id: At4g14540.1 [Arabidopsis thaliana]
  misc_feature (1)..(128): Homolog of NCBI NO: 22380 NR Description: CAAT-box DNA binding protein subunit B (NF-YB)
  misc_feature (1)..(128): Homolog of NCBI NO: 115840 NR Description: CCAAT-BINDING TRANSCRIPTION FACTOR SUBUNIT A
  misc_feature (1)..(99): Homolog of NCBI NO: 15231796 NR Description: transcription factor NF-Y, CCAAT-binding - like protein id: At3g53340.1 [Arabidopsis thaliana]
  misc_feature (1)..(128): Homolog of NCBI NO: 30409461 NR Description: NF-YB [Oryza sativa (japonica cultivar-group)]
  misc_feature (1)..(109): Homolog of NCBI NO: 18404885 NR Description: putative CCAAT-binding transcription factor protein id: At2g38880.1, supported by cDNA: 7805. [Arabidopsis >gi|2398527|emb|CAA74051.1| Transcription factor [Arabidopsis
  misc_feature (1)..(119): Homolog of NCBI NO: 17979253 NR Description: At2g37060/T2N18.18 [Arabidopsis thaliana]

SEQ ID NO: 89892 - protein, 132 aa, Arabidopsis thaliana; identical to SEQ ID NO: 48332
  peptide (1)..(132): Ceres Seq. ID no. 12721003
  misc_feature (1)..(132): Homolog of NCBI NO: 2398529 NR Description: Transcription factor [Arabidopsis thaliana]
  misc_feature (1)..(132): Homolog of NCBI NO: 15238156 NR Description: putative protein; protein id: At5g47640.1, by cDNA: gi_14326579, supported by cDNA: gi_18700233 [Arabidopsis >gi|9758792|dbj|BAB09090.1| contains similarity to [Arabidopsis
  misc_feature (10)..(132): Homolog of NCBI NO: 9965735 NR Description: transcription factor Hap3b [Arabidopsis thaliana]
  misc_feature (1)..(106): Homolog of NCBI NO: 15233475 NR Description: CCAAT-binding transcription factor subunit protein id: At4g14540.1 [Arabidopsis thaliana]
  misc_feature (1)..(110): Homolog of NCBI NO: 22380 NR Description: CAAT-box DNA binding protein subunit B (NF-YB)
  misc_feature (1)..(110): Homolog of NCBI NO: 115840 NR Description: CCAAT-BINDING TRANSCRIPTION FACTOR SUBUNIT A
  misc_feature (1)..(81): Homolog of NCBI NO: 15231796 NR Description: transcription factor NF-Y, CCAAT-binding - like protein id: At3g53340.1 [Arabidopsis thaliana]
  misc_feature (1)..(110): Homolog of NCBI NO: 30409461 NR Description: NF-YB [Oryza sativa (japonica cultivar-group)]
  misc_feature (1)..(91): Homolog of NCBI NO: 18404885 NR Description: putative CCAAT-binding transcription factor protein id: At2g38880.1, supported by cDNA: 7805. [Arabidopsis >gi|2398527|emb|CAA74051.1| Transcription factor [Arabidopsis
  misc_feature (1)..(101): Homolog of NCBI NO: 17979253 NR Description: At2g37060/T2N18.18 [Arabidopsis thaliana]

SEQ ID NO: 89893 - DNA, 661 bp, Arabidopsis thaliana
  misc_feature (1)..(661): Ceres Seq. ID no. 12721011
  misc_feature: MA Experiment ID: 20000088 Result: Down-regulated in Transcription
  misc_feature: MA Experiment 20000088 PARAMETER Experiment Name: At_100uM_ABA_Mutants_cDNA_P Parameter: Plant Line Value: Landsberg
  misc_feature: MA Experiment 20000088 PARAMETER Experiment Name: At_100uM_ABA_Mutants_cDNA_P Parameter: Timepoint (hr) Value: 6
  misc_feature: MA Experiment 20000088 PARAMETER Experiment Name: At_100uM_ABA_Mutants_cDNA_P Parameter: Tissue Value: Aerial
  misc_feature: MA Experiment 20000088 PARAMETER Experiment Name: At_100uM_ABA_Mutants_cDNA_P Parameter: Treatment Value: 100uM ABA vs. No Treatment
  misc_feature: MA Experiment ID: 20000227 Result: Down-regulated in Transcription
  misc_feature: MA Experiment 20000227 PARAMETER Experiment Name: At_Root-Tips-vs-Tops_P Parameter: Tissue Value: Root Tips vs. Root Tops
accaagaaatgtataggttataagagaagtgtacttgatattcggaaaaaaaaaaaaccaaaaactaggtaggttaagattattcaaacttcaaaggcaaaaccaaatgagcttcgtgtggtccgctgcggtgtgggtcatagctgtagccgctgttgtgattagcaaatggttataccgatggtcgaacccgaagtgcaatggcaagttaccaccgggatcaatgggtttaccgatcatcggagagacatgcgacttctttgagccccatggattatacgagatctcaccctttgtcaagaagaggatgttaaagtacgggccattgtttcggacaaatattttcggatcgaacaccgtggttttgacagaacctgatatcatcttcgaagtttttcggcaagagaacaagtcttttgtgtttagctatccagaagcttttgtcaagccatttggaaaagaaaacgtgttcctcaaacatggaaacatccacaagcacgtcaagcaaatcagtcttcaacatcttggctctgaggctttaaaaaaaaagatgataggagaaatagacagagtaacctatgagcatcttagatcgaaggctaaccagggtagcttcgatgctaaggaggcagttgaaagtgtacttacataatttcttaat

SEQ ID NO: 89894 - protein, 181 aa, Arabidopsis thaliana
  peptide (1)..(181): Ceres Seq. ID no. 12721012
  misc_feature (1)..(180): Homolog of NCBI NO: 30695347 NR Description: cytochrome p450 family [Arabidopsis thaliana]
  misc_feature (1)..(180): Homolog of NCBI NO: 22530982 NR Description: cytochrome P450-like protein [Arabidopsis
  misc_feature (1)..(180): Homolog of NCBI NO: 30695352 NR Description: cytochrome p450 family [Arabidopsis thaliana]
  misc_feature (1)..(181): Homolog of NCBI NO: 15218388 NR Description: cytochrome P450, putative; protein id: supported by cDNA: gi_17473540 [Arabidopsis thaliana]
  misc_feature (1)..(181): Homolog of NCBI NO: 25282639 NR Description: hypothetical protein T30F21.17 [imported] - thaliana >gi|4836883|gb|AAD30586.1|AC007260_17 Similar to
  misc_feature (1)..(180): Homolog of NCBI NO: 15230572 NR Description: cytochrome P450 - like protein; protein id:
  misc_feature (1)..(174): Homolog of NCBI NO: 15222806 NR Description: cytochrome P450, putative; protein id:
  misc_feature (1)..(174): Homolog of NCBI NO: 8778326 NR Description: F14J16.21 [Arabidopsis thaliana]
  misc_feature (4)..(180): Homolog of NCBI NO: 9502380 NR Description: T12C24.27 [Arabidopsis thaliana]
  misc_feature (4)..(180): Homolog of NCBI NO: 30682922 NR Description: cytochrome P450, putative [Arabidopsis thaliana]
MSFVWSAAVWVIAVAAVVISKWLYRWSNPKCNGKLPPGSMGLPIIGETCDFFEPHGLYEISPFVKKRMLKYGPLFRTNIFGSNTVVLTEPDIIFEVFRQENKSFVFSYPEAFVKPFGKENVFLKHGNIHKHVKQISLQHLGSEALKKKMIGEIDRVTYEHLRSKANQGSFDAKEAVESVLT

SEQ ID NO: 89895 - protein, 142 aa, Arabidopsis thaliana
  peptide (1)..(142): Ceres Seq. ID no. 12721013
  misc_feature (1)..(141): Homolog of NCBI NO: 30695347 NR Description: cytochrome p450 family [Arabidopsis thaliana]
  misc_feature (1)..(141): Homolog of NCBI NO: 22530982 NR Description: cytochrome P450-like protein [Arabidopsis
  misc_feature (1)..(141): Homolog of NCBI NO: 30695352 NR Description: cytochrome p450 family [Arabidopsis thaliana]
  misc_feature (1)..(142): Homolog of NCBI NO: 15218388 NR Description: cytochrome P450, putative; protein id: supported by cDNA: gi_17473540 [Arabidopsis thaliana]
  misc_feature (1)..(142): Homolog of NCBI NO: 25282639 NR Description: hypothetical protein T30F21.17 [imported] - thaliana >gi|4836883|gb|AAD30586.1|AC007260_17 Similar to
  misc_feature (1)..(141): Homolog of NCBI NO: 15230572 NR Description: cytochrome P450 - like protein; protein id:
  misc_feature (1)..(135): Homolog of NCBI NO: 15222806 NR Description: cytochrome P450, putative; protein id:
  misc_feature (1)..(135): Homolog of NCBI NO: 8778326 NR Description: F14J16.21 [Arabidopsis thaliana]
  misc_feature (1)..(141): Homolog of NCBI NO: 9502380 NR Description: T12C24.27 [Arabidopsis thaliana]
  misc_feature (1)..(141): Homolog of NCBI NO: 30682922 NR Description: cytochrome P450, putative [Arabidopsis thaliana]
MGLPIIGETCDFFEPHGLYEISPFVKKRMLKYGPLFRTNIFGSNTVVLTEPDIIFEVFRQENKSFVFSYPEAFVKPFGKENVFLKHGNIHKHVKQISLQHLGSEALKKKMIGEIDRVTYEHLRSKANQGSFDAKEAVESVLT

SEQ ID NO: 89896 - protein, 114 aa, Arabidopsis thaliana
  peptide (1)..(114): Ceres Seq. ID no. 12721014
  misc_feature (1)..(113): Homolog of NCBI NO: 30695347 NR Description: cytochrome p450 family [Arabidopsis thaliana]
  misc_feature (1)..(113): Homolog of NCBI NO: 22530982 NR Description: cytochrome P450-like protein [Arabidopsis
  misc_feature (1)..(113): Homolog of NCBI NO: 30695352 NR Description: cytochrome p450 family [Arabidopsis thaliana]
  misc_feature (1)..(114): Homolog of NCBI NO: 15218388 NR Description: cytochrome P450, putative; protein id: supported by cDNA: gi_17473540 [Arabidopsis thaliana]
  misc_feature (1)..(114): Homolog of NCBI NO: 25282639 NR Description: hypothetical protein T30F21.17 [imported] - thaliana >gi|4836883|gb|AAD30586.1|AC007260_17 Similar to
  misc_feature (1)..(113): Homolog of NCBI NO: 15230572 NR Description: cytochrome P450 - like protein; protein id:
  misc_feature (1)..(107): Homolog of NCBI NO: 15222806 NR Description: cytochrome P450, putative; protein id:
  misc_feature (1)..(107): Homolog of NCBI NO: 8778326 NR Description: F14J16.21 [Arabidopsis thaliana]
  misc_feature (1)..(113): Homolog of NCBI NO: 9502380 NR Description: T12C24.27 [Arabidopsis thaliana]
  misc_feature (1)..(113): Homolog of NCBI NO: 30682922 NR Description: cytochrome P450, putative [Arabidopsis thaliana]
MLKYGPLFRTNIFGSNTVVLTEPDIIFEVFRQENKSFVFSYPEAFVKPFGKENVFLKHGNIHKHVKQISLQHLGSEALKKKMIGEIDRVTYEHLRSKANQGSFDAKEAVESVLT

SEQ ID NO: 89897 - DNA, 1161 bp, Arabidopsis thaliana
  misc_feature (1)..(1161): Ceres Seq. ID no. 12721188
  misc_feature: MA Experiment ID: 20000184 Result: Down-regulated in Transcription
  misc_feature: MA Experiment 20000184 PARAMETER Experiment Name: At_Shoots__P Parameter: Age (day) Value: 7
  misc_feature: MA Experiment 20000184 PARAMETER Experiment Name: At_Shoots__P Parameter: Tissue Value: Shoots vs. Whole Plant
  misc_feature: MA Experiment ID: 20000214 Result: Down-regulated in Transcription
  misc_feature: MA Experiment 20000214 PARAMETER Experiment Name: At_4deg_Cold_P Parameter: Timepoint (hr) Value: 6
  misc_feature: MA Experiment ID: 20001248 Result: Up-regulated in Transcription
  misc_feature: MA Experiment 20001248 PARAMETER Experiment Name: At_Far-red-induction_P Parameter: Age (day) Value: 7
  misc_feature: MA Experiment 20001248 PARAMETER Experiment Name: At_Far-red-induction_P Parameter: Light Value: Far-red vs. White
  misc_feature: MA Experiment 20001248 PARAMETER Experiment Name: At_Far-red-induction_P Parameter: Organism Value: A. thaliana
  misc_feature: MA Experiment 20001248 PARAMETER Experiment Name: At_Far-red-induction_P Parameter: Plant Line Value: Columbia
  misc_feature: MA Experiment 20001248 PARAMETER Experiment Name: At_Far-red-induction_P Parameter: Timepoint (hr) Value: 4
  misc_feature: MA Experiment 20001248 PARAMETER Experiment Name: At_Far-red-induction_P Parameter: Tissue Value: Whole Plant
  misc_feature: MA Experiment ID: 20001450 Result: Up-regulated in Transcription
  misc_feature: MA Experiment 20001450 PARAMETER Experiment Name: At_Far-red-induction_P Parameter: Age (day) Value: 7
  misc_feature: MA Experiment 20001450 PARAMETER Experiment Name: At_Far-red-induction_P Parameter: Light Value: Far-red vs. White
  misc_feature: MA Experiment 20001450 PARAMETER Experiment Name: At_Far-red-induction_P Parameter: Organism Value: A. thaliana
  misc_feature: MA Experiment 20001450 PARAMETER Experiment Name: At_Far-red-induction_P Parameter: Plant Line Value: Columbia
  misc_feature: MA Experiment 20001450 PARAMETER Experiment Name: At_Far-red-induction_P Parameter: Timepoint (hr) Value: 8
  misc_feature: MA Experiment 20001450 PARAMETER Experiment Name: At_Far-red-induction_P Parameter: Tissue Value: Whole Plant
atggccgggatcttgaataaattgcggaatctagatgcatatcctaagatcaatgaagatttttacagccgtacattatccggcggagttatcactctcctctcctccgttgttatgttccttctcttcttctccgagctccgtctttatcttcatacagtcaccgagacgaagcttatagtagatacttcaaggggagagacgttacgcatcaactttgatattacgtttcctgctctagcatgttcgattcttagtgttgatgctatggatattagtggagagcttcatcttgacgtgaaacatgatatcataaagagaagattagattctaatggcaacactatagaggcaagacaggacggaataggcgctactaagattgaaaacccactgcagaaacatggtggcaggctgggacataatgagacttactgtggttcttgctatggggctgaagcggaagagcatgactgctgcaattcgtgtgaggatgttcgtgaagcatatagaaagaaaggttggggggttactaatccagatttgattgaccagtgtaaacgagaaggttttctacaaagagtaaaggatgaagaaggtgaagggtgtaatatatatgggttcttggaggtcaataaggtggctgggaacttccactttgctcctgggaaaagctttcatcagtcgggcgtgcatgttcacgatcttcttgcttttcagaaagacagttttaacataagtcacaagatcaatagacttacttatggagactactttcctggcgtcgttaaccctcttgacaaagtcgagtggagtcaagacacacctaatgctatgtaccaatactttatcaaggttgtaccaacagtatacacagatatcagaggacacacaattcaatcgaatcagttctcagtgaccgaacatgtaaagagctcagaagcaggtcaactgcaatctttacctggagttttcttcttctatgatctctctccaatcaaggtaacatttacggaggaacacatatcattcttgcacttcttgacgaatgtttgcgccatagttggaggtgtcttcacagtgtccgggataatagacgcgtttatataccatggtcaaaaagctatcaagaagaagatggaaattggtaaatttagctaa

SEQ ID NO: 89898 - protein, 386 aa, Arabidopsis thaliana
  peptide (1)..(386): Ceres Seq. ID no. 12721189
  misc_feature (1)..(386): Homolog of NCBI NO: 30693281 NR Description: expressed protein [Arabidopsis thaliana]
  misc_feature (149)..(362): Homolog of NCBI NO: 6598578 NR Description: F5J5.4 [Arabidopsis thaliana]
  misc_feature (1)..(154): Homolog of NCBI NO: 6598578 NR Description: F5J5.4 [Arabidopsis thaliana]
  misc_feature (358)..(386): Homolog of NCBI NO: 6598578 NR Description: F5J5.4 [Arabidopsis thaliana]
  misc_feature (1)..(386): Homolog of NCBI NO: 38347102 NR Description: OSJNBa0006M15.17 [Oryza sativa (japonica
  misc_feature (1)..(386): Homolog of NCBI NO: 18395087 NR Description: expressed protein; protein id: At1g22200.1, by cDNA: 16380., supported by cDNA: gi_13878150, supported by gi_21281041 [Arabidopsis thaliana] >gi|25350066|pir||F86354
  misc_feature (5)..(384): Homolog of NCBI NO: 13384938 NR Description: serologically defined breast cancer antigen 84; segment, Chr 2, University of California at Los Angeles 1 [Mus >gi|12844094|dbj|BAB26233.1| unnamed protein product [Mus
  misc_feature (5)..(384): Homolog of NCBI NO: 34860248 NR Description: similar to serologically defined breast cancer
  misc_feature (5)..(386): Homolog of NCBI NO: 28278376 NR Description: Similar to serologically defined breast cancer
  misc_feature (5)..(384): Homolog of NCBI NO: 7706278 NR Description: serologically defined breast cancer antigen 84;
MAGILNKLRNLDAYPKINEDFYSRTLSGGVITLLSSVVMFLLFFSELRLYLHTVTETKLIVDTSRGETLRINFDITFPALACSILSVDAMDISGELHLDVKHDIIKRRLDSNGNTIEARQDGIGATKIENPLQKHGGRLGHNETYCGSCYGAEAEEHDCCNSCEDVREAYRKKGWGVTNPDLIDQCKREGFLQRVKDEEGEGCNIYGFLEVNKVAGNFHFAPGKSFHQSGVHVHDLLAFQKDSFNISHKINRLTYGDYFPGVVNPLDKVEWSQDTPNAMYQYFIKVVPTVYTDIRGHTIQSNQFSVTEHVKSSEAGQLQSLPGVFFFYDLSPIKVTFTEEHISFLHFLTNVCAIVGGVFTVSGIIDAFIYHGQKAIKKKMEIGKFS

SEQ ID NO: 89899 - protein, 348 aa, Arabidopsis thaliana
  peptide (1)..(348): Ceres Seq. ID no. 12721190
  misc_feature (1)..(348): Homolog of NCBI NO: 30693281 NR Description: expressed protein [Arabidopsis thaliana]
  misc_feature (111)..(324): Homolog of NCBI NO: 6598578 NR Description: F5J5.4 [Arabidopsis thaliana]
  misc_feature (1)..(116): Homolog of NCBI NO: 6598578 NR Description: F5J5.4 [Arabidopsis thaliana]
  misc_feature (320)..(348): Homolog of NCBI NO: 6598578 NR Description: F5J5.4 [Arabidopsis thaliana]
  misc_feature (1)..(348): Homolog of NCBI NO: 38347102 NR Description: OSJNBa0006M15.17 [Oryza sativa (japonica
  misc_feature (1)..(348): Homolog of NCBI NO: 18395087 NR Description: expressed protein; protein id: At1g22200.1, by cDNA: 16380., supported by cDNA: gi_13878150, supported by gi_21281041 [Arabidopsis thaliana] >gi|25350066|pir||F86354
  misc_feature (1)..(346): Homolog of NCBI NO: 13384938 NR Description: serologically defined breast cancer antigen 84; segment, Chr 2, University of California at Los Angeles 1 [Mus >gi|12844094|dbj|BAB26233.1| unnamed protein product [Mus
  misc_feature (1)..(346): Homolog of NCBI NO: 34860248 NR Description: similar to serologically defined breast cancer
  misc_feature (1)..(348): Homolog of NCBI NO: 28278376 NR Description: Similar to serologically defined breast cancer
  misc_feature (1)..(346): Homolog of NCBI NO: 7706278 NR Description: serologically defined breast cancer antigen 84;
MFLLFFSELRLYLHTVTETKLIVDTSRGETLRINFDITFPALACSILSVDAMDISGELHLDVKHDIIKRRLDSNGNTIEARQDGIGATKIENPLQKHGGRLGHNETYCGSCYGAEAEEHDCCNSCEDVREAYRKKGWGVTNPDLIDQCKREGFLQRVKDEEGEGCNIYGFLEVNKVAGNFHFAPGKSFHQSGVHVHDLLAFQKDSFNISHKINRLTYGDYFPGVVNPLDKVEWSQDTPNAMYQYFIKVVPTVYTDIRGHTIQSNQFSVTEHVKSSEAGQLQSLPGVFFFYDLSPIKVTFTEEHISFLHFLTNVCAIVGGVFTVSGIIDAFIYHGQKAIKKKMEIGKFS

SEQ ID NO: 89900 - protein, 297 aa, Arabidopsis thaliana
  peptide (1)..(297): Ceres Seq. ID no. 12721191
  misc_feature (1)..(297): Homolog of NCBI NO: 30693281 NR Description: expressed protein [Arabidopsis thaliana]
  misc_feature (60)..(273): Homolog of NCBI NO: 6598578 NR Description: F5J5.4 [Arabidopsis thaliana]
  misc_feature (1)..(65): Homolog of NCBI NO: 6598578 NR Description: F5J5.4 [Arabidopsis thaliana]
  misc_feature (269)..(297): Homolog of NCBI NO: 6598578 NR Description: F5J5.4 [Arabidopsis thaliana]
  misc_feature (1)..(297): Homolog of NCBI NO: 38347102 NR Description: OSJNBa0006M15.17 [Oryza sativa (japonica
  misc_feature (1)..(297): Homolog of NCBI NO: 18395087 NR Description: expressed protein; protein id: At1g22200.1, by cDNA: 16380., supported by cDNA: gi_13878150, supported by gi_21281041 [Arabidopsis thaliana] >gi|25350066|pir||F86354
  misc_feature (1)..(295): Homolog of NCBI NO: 13384938 NR Description: serologically defined breast cancer antigen 84; segment, Chr 2, University of California at Los Angeles 1 [Mus >gi|12844094|dbj|BAB26233.1| unnamed protein product [Mus
  misc_feature (1)..(295): Homolog of NCBI NO: 34860248 NR Description: similar to serologically defined breast cancer
  misc_feature (1)..(297): Homolog of NCBI NO: 28278376 NR Description: Similar to serologically defined breast cancer
  misc_feature (1)..(295): Homolog of NCBI NO: 7706278 NR Description: serologically defined breast cancer antigen 84;
MDISGELHLDVKHDIIKRRLDSNGNTIEARQDGIGATKIENPLQKHGGRLGHNETYCGSCYGAEAEEHDCCNSCEDVREAYRKKGWGVTNPDLIDQCKREGFLQRVKDEEGEGCNIYGFLEVNKVAGNFHFAPGKSFHQSGVHVHDLLAFQKDSFNISHKINRLTYGDYFPGVVNPLDKVEWSQDTPNAMYQYFIKVVPTVYTDIRGHTIQSNQFSVTEHVKSSEAGQLQSLPGVFFFYDLSPIKVTFTEEHISFLHFLTNVCAIVGGVFTVSGIIDAFIYHGQKAIKKKMEIGKFS

SEQ ID NO: 89901 - DNA, 1401 bp, Arabidopsis thaliana
  misc_feature (1)..(1401): Ceres Seq. ID no. 12721292
  misc_feature: MA Experiment ID: 20000327 Result: Up-regulated in Transcription
  misc_feature: MA Experiment 20000327 PARAMETER Experiment Name: At_42deg_Heat_Sub_P Parameter: Age (day) Value: 14
  misc_feature: MA Experiment 20000327 PARAMETER Experiment Name: At_42deg_Heat_Sub_P Parameter: Organism Value: A. thaliana
  misc_feature: MA Experiment 20000327 PARAMETER Experiment Name: At_42deg_Heat_Sub_P Parameter: Plant Line Value: WS
  misc_feature: MA Experiment 20000327 PARAMETER Experiment Name: At_42deg_Heat_Sub_P Parameter: Temperature (deg C) Value: 42 vs. 22
  misc_feature: MA Experiment 20000327 PARAMETER Experiment Name: At_42deg_Heat_Sub_P Parameter: Timepoint (hr) Value: 1
  misc_feature: MA Experiment 20000327 PARAMETER Experiment Name: At_42deg_Heat_Sub_P Parameter: Tissue Value: Aerial
  misc_feature: MA Experiment ID: 20000328 Result: Up-regulated in Transcription
  misc_feature: MA Experiment 20000328 PARAMETER Experiment Name: At_42deg_Heat_Sub_P Parameter: Age (day) Value: 14
  misc_feature: MA Experiment 20000328 PARAMETER Experiment Name: At_42deg_Heat_Sub_P Parameter: Organism Value: A. thaliana
  misc_feature: MA Experiment 20000328 PARAMETER Experiment Name: At_42deg_Heat_Sub_P Parameter: Plant Line Value: WS
  misc_feature: MA Experiment 20000328 PARAMETER Experiment Name: At_42deg_Heat_Sub_P Parameter: Temperature (deg C) Value: 42 vs. 22
  misc_feature: MA Experiment 20000328 PARAMETER Experiment Name: At_42deg_Heat_Sub_P Parameter: Timepoint (hr) Value: 6
  misc_feature: MA Experiment 20000328 PARAMETER Experiment Name: At_42deg_Heat_Sub_P Parameter: Tissue Value: Aerial
atggataaaaaagcagcgcagagaattgcgatggaatacagagctatgatctcgaaagaatctttgttcagtattggtcaaaactcgaacaatatatacgaatggactgcagtgatccggggtccagatggcactccctatgaaggtggcatgtttaatctcagtattaagtttcctacggattatccttttaaaccacccaagtttacgtttaaaactccgatttaccatccaaatatcaatgatgaaggatcgatttgcatgaacattcttaaagacaaatggactcctgctcttatggttgaaaaggtgcttctgtcaatacttttactattggaaaaaccaaacccagatgatcctcttgtacctgaaattggacagctcttcaagaataacagattccaatttgaccagagagctcgagaattcactgctcgacataggtgcgcttgtaaagtaatattcacggcttttgaagattacttggtggaggaaaatgatcaggtggacaaggaatatattaacactaaatgtttagaagtcaaaaagatgatgtggaagtgttgtactaagactaactctgattactatcagccgtttctaatggcgaagaaagctgttgaggaagagaattctaaagagctcgtagctttatctcgcaagtcgcaagcattctctgaagcaagccgaggagtgattgaggtgagcttttacaatgtgaaaggagattacaagtgtaaaagtgtctacgcacgtggtagctccgtccgggatctgcggagattctcctggatattcggtaggtcagtttcgagatatcaggtccgctccgcgaatatcttcctgttagttcctaggttgttattcgcttacctcccttcatcaggtgatcaggcttatcaggcccaaataaccttttgcgtatgtgggctcatcagttgcgcaagtcctctacttggtgggcttggtgggcttagtgggctggcctgttgttgtcgttgttgcttgacggacaaacactttgctgctagcattggttgtcacagtattaaactagctatggaggctataaccctccagatcgacaaactaatgcagtctcaaacacagatagacaagttgttccagtgtcaacaaaagcttgaggccatggtgacagcgttggtttctcaacagagtggcgaacaagtcaaccgagctccagactccaacttggtagcttccggtgagctcacctcatcatcatcgttaacaccgagacccctagatcctcctgatttaaacgaatatggtcagctttatatgggtttcgtggatggctttaccgatgtgagcagttcaaaagcattggagtggcatcataactacatacgtgatcggtttgatatgttcccatcttga

SEQ ID NO: 89902 - protein, 466 aa, Arabidopsis thaliana
  peptide (1)..(466): Ceres Seq. ID no. 12721293
  misc_feature (1)..(147): Homolog of NCBI NO: 18400088 NR Description: E2, ubiquitin-conjugating enzyme, putative; id: At1g36340.1 [Arabidopsis thaliana] >gi|25293671|pir||E86484
  misc_feature (5)..(147): Homolog of NCBI NO: 13811942 NR Description: ubiquitin conjugating enzyme [Guillardia theta] ubiquitin conjugating enzyme [Guillardia theta] ubiquitin conjugating enzyme [Guillardia theta]
  misc_feature (5)..(147): Homolog of NCBI NO: 19112075 NR Description: ubiquitin-conjugating enzyme e2-16 kd
  misc_feature (5)..(147): Homolog of NCBI NO: 4100646 NR Description: putative ubiquitin conjugating enzyme [Pinus
  misc_feature (5)..(147): Homolog of NCBI NO: 18398206 NR Description: E2, ubiquitin-conjugating enzyme 11 (UBC11); id: At3g08690.1, supported by cDNA: 21455., supported by cDNA: supported by cDNA: gi_20259610 [Arabidopsis thaliana] protein 11)
  misc_feature (5)..(147): Homolog of NCBI NO: 6320264 NR Description: ubiquitin-conjugating enzyme; Ubc5p [Saccharomyces
  misc_feature (24)..(147): Homolog of NCBI NO: 477134 NR Description: ubiquitin-conjugating enzyme ubc-2 -
  misc_feature (24)..(147): Homolog of NCBI NO: 17541470 NR Description: Ubiquitin conjugating enzyme UBC-2, LEThal LET-70
  misc_feature (24)..(147): Homolog of NCBI NO: 40744013 NR Description: UBC1_COLGL Ubiquitin-conjugating enzyme E2-16 kDa
  misc_feature (24)..(147): Homolog of NCBI NO: 37590333 NR Description: Unknown (protein for MGC:73096) [Danio rerio]
MDKKAAQRIAMEYRAMISKESLFSIGQNSNNIYEWTAVIRGPDGTPYEGGMFNLSIKFPTDYPFKPPKFTFKTPIYHPNINDEGSICMNILKDKWTPALMVEKVLLSILLLLEKPNPDDPLVPEIGQLFKNNRFQFDQRAREFTARHRCACKVIFTAFEDYLVEENDQVDKEYINTKCLEVKKMMWKCCTKTNSDYYQPFLMAKKAVEEENSKELVALSRKSQAFSEASRGVIEVSFYNVKGDYKCKSVYARGSSVRDLRRFSWIFGRSVSRYQVRSANIFLLVPRLLFAYLPSSGDQAYQAQITFCVCGLISCASPLLGGLGGLSGLACCCRCCLTDKHFAASIGCHSIKLAMEAITLQIDKLMQSQTQIDKLFQCQQKLEAMVTALVSQQSGEQVNRAPDSNLVASGELTSSSSLTPRPLDPPDLNEYGQLYMGFVDGFTDVSSSKALEWHHNYIRDRFDMFPS

SEQ ID NO: 89903 - protein, 456 aa, Arabidopsis thaliana
  peptide (1)..(456): Ceres Seq. ID no. 12721294
  misc_feature (1)..(137): Homolog of NCBI NO: 18400088 NR Description: E2, ubiquitin-conjugating enzyme, putative; id: At1g36340.1 [Arabidopsis thaliana] >gi|25293671|pir||E86484
  misc_feature (1)..(137): Homolog of NCBI NO: 13811942 NR Description: ubiquitin conjugating enzyme [Guillardia theta] ubiquitin conjugating enzyme [Guillardia theta] ubiquitin conjugating enzyme [Guillardia theta]
  misc_feature (1)..(137): Homolog of NCBI NO: 19112075 NR Description: ubiquitin-conjugating enzyme e2-16 kd
  misc_feature (1)..(137): Homolog of NCBI NO: 4100646 NR Description: putative ubiquitin conjugating enzyme [Pinus
  misc_feature (1)..(137): Homolog of NCBI NO: 18398206 NR Description: E2, ubiquitin-conjugating enzyme 11 (UBC11); id: At3g08690.1, supported by cDNA: 21455., supported by cDNA: supported by cDNA: gi_20259610 [Arabidopsis thaliana] protein 11)
  misc_feature (1)..(137): Homolog of NCBI NO: 6320264 NR Description: ubiquitin-conjugating enzyme; Ubc5p [Saccharomyces
  misc_feature (14)..(137): Homolog of NCBI NO: 477134 NR Description: ubiquitin-conjugating enzyme ubc-2 -
  misc_feature (14)..(137): Homolog of NCBI NO: 17541470 NR Description: Ubiquitin conjugating enzyme UBC-2, LEThal LET-70
  misc_feature (14)..(137): Homolog of NCBI NO: 40744013 NR Description: UBC1_COLGL Ubiquitin-conjugating enzyme E2-16 kDa
  misc_feature (14)..(137): Homolog of NCBI NO: 37590333 NR Description: Unknown (protein for MGC:73096) [Danio rerio]
MEYRAMISKESLFSIGQNSNNIYEWTAVIRGPDGTPYEGGMFNLSIKFPTDYPFKPPKFTFKTPIYHPNINDEGSICMNILKDKWTPALMVEKVLLSILLLLEKPNPDDPLVPEIGQLFKNNRFQFDQRAREFTARHRCACKVIFTAFEDYLVEENDQVDKEYINTKCLEVKKMMWKCCTKTNSDYYQPFLMAKKAVEEENSKELVALSRKSQAFSEASRGVIEVSFYNVKGDYKCKSVYARGSSVRDLRRFSWIFGRSVSRYQVRSANIFLLVPRLLFAYLPSSGDQAYQAQITFCVCGLISCASPLLGGLGGLSGLACCCRCCLTDKHFAASIGCHSIKLAMEAITLQIDKLMQSQTQIDKLFQCQQKLEAMVTALVSQQSGEQVNRAPDSNLVASGELTSSSSLTPRPLDPPDLNEYGQLYMGFVDGFTDVSSSKALEWHHNYIRDRFDMFPS

SEQ ID NO: 89904 - protein, 451 aa, Arabidopsis thaliana
  peptide (1)..(451): Ceres Seq. ID no. 12721295
  misc_feature (1)..(132): Homolog of NCBI NO: 18400088 NR Description: E2, ubiquitin-conjugating enzyme, putative; id: At1g36340.1 [Arabidopsis thaliana] >gi|25293671|pir||E86484
  misc_feature (1)..(132): Homolog of NCBI NO: 13811942 NR Description: ubiquitin conjugating enzyme [Guillardia theta] ubiquitin conjugating enzyme [Guillardia theta] ubiquitin conjugating enzyme [Guillardia theta]
  misc_feature (1)..(132): Homolog of NCBI NO: 19112075 NR Description: ubiquitin-conjugating enzyme e2-16 kd
  misc_feature (1)..(132): Homolog of NCBI NO: 4100646 NR Description: putative ubiquitin conjugating enzyme [Pinus
  misc_feature (1)..(132): Homolog of NCBI NO: 18398206 NR Description: E2, ubiquitin-conjugating enzyme 11 (UBC11); id: At3g08690.1, supported by cDNA: 21455., supported by cDNA: supported by cDNA: gi_20259610 [Arabidopsis thaliana] protein 11)
  misc_feature (1)..(132): Homolog of NCBI NO: 6320264 NR Description: ubiquitin-conjugating enzyme; Ubc5p [Saccharomyces
  misc_feature (9)..(132): Homolog of NCBI NO: 477134 NR Description: ubiquitin-conjugating enzyme ubc-2 -
  misc_feature (9)..(132): Homolog of NCBI NO: 17541470 NR Description: Ubiquitin conjugating enzyme UBC-2, LEThal LET-70
  misc_feature (9)..(132): Homolog of NCBI NO: 40744013 NR Description: UBC1_COLGL Ubiquitin-conjugating enzyme E2-16 kDa
  misc_feature (9)..(132): Homolog of NCBI NO: 37590333 NR Description: Unknown (protein for MGC:73096) [Danio rerio]
MISKESLFSIGQNSNNIYEWTAVIRGPDGTPYEGGMFNLSIKFPTDYPFKPPKFTFKTPIYHPNINDEGSICMNILKDKWTPALMVEKVLLSILLLLEKPNPDDPLVPEIGQLFKNNRFQFDQRAREFTARHRCACKVIFTAFEDYLVEENDQVDKEYINTKCLEVKKMMWKCCTKTNSDYYQPFLMAKKAVEEENSKELVALSRKSQAFSEASRGVIEVSFYNVKGDYKCKSVYARGSSVRDLRRFSWIFGRSVSRYQVRSANIFLLVPRLLFAYLPSSGDQAYQAQITFCVCGLISCASPLLGGLGGLSGLACCCRCCLTDKHFAASIGCHSIKLAMEAITLQIDKLMQSQTQIDKLFQCQQKLEAMVTALVSQQSGEQVNRAPDSNLVASGELTSSSSLTPRPLDPPDLNEYGQLYMGFVDGFTDVSSSKALEWHHNYIRDRFDMFPS

SEQ ID NO: 89905 - DNA, 1746 bp, Arabidopsis thaliana
  misc_feature (1)..(1746): Ceres Seq. ID no. 12721362
  misc_feature: MA Experiment ID: 20001451 Result: Up-regulated in Transcription
  misc_feature: MA Experiment 20001451 PARAMETER Experiment Name: At_Far-red-induction_P Parameter: Age (day) Value: 7
  misc_feature: MA Experiment 20001451 PARAMETER Experiment Name: At_Far-red-induction_P Parameter: Light Value: Far-red vs. White
  misc_feature: MA Experiment 20001451 PARAMETER Experiment Name: At_Far-red-induction_P Parameter: Organism Value: A. thaliana
  misc_feature: MA Experiment 20001451 PARAMETER Experiment Name: At_Far-red-induction_P Parameter: Plant Line Value: Columbia
  misc_feature: MA Experiment 20001451 PARAMETER Experiment Name: At_Far-red-induction_P Parameter: Timepoint (hr) Value: 24
  misc_feature: MA Experiment 20001451 PARAMETER Experiment Name: At_Far-red-induction_P Parameter: Tissue Value: Whole Plant
aacttggtggcgtcttctctaaccaaccaaccaatcgtctctagtcaaagagaaaaagagcgagcatggaggcaaagctagaaatccttattccgtagtagggaagagaaacagagagaagaaagacgatgaactgttggagagtgttgaaatccgtacaagcctcggtggctcactgctttctcttctctttcacgctcgctttggtgctcaagctcgatcactccattacttactcctggtgggttgtgtgtctaccactgtgggctttccatgctgttgttgcaaggggaagattctcgcttcctgctccaatcgctcctcgtaaccgtcattgggctccatgtcatgctattgtctcaacaccgttgcttatagctttcgaattactcctctgtgtatacctcgagactgcatatgctgattcgccgccagctgtgagcttgaagattgtatttctccctttattggcgtttgaagtaataatactggtggacaatgcgagaatgtgtcgggcactgatgcctggagatgaagagagcgtgaatgatgaagcagtatgggaagctcttcctcatttctgggttgcgatctccatggtgttctttctcgctgctacagtctttaccctccttaagctgtctggcgatgtagctgctcttggctggtgggatttattcattaatttcggaatcgcagagtgctttgcgtttcttgtttgtacaaaatggtctaatccagtgattcatagaagctcacgtgatagagaaactgggtcatcttctaccaatattagatatcttgactggaacagtggccttggggttttttcagaagacgataggaaccaagatacatgtggcctgcaagacattggtggtcatataatgaaaatccccctcattgtatttcaagtggtactttgcatgcatctagaggggactcctgaagctgctaagtctatatctgtccctgtcctgttttctccacttttccttttgcaaggcgttggtgttctatttgctgcttctaaactaatagagaaggttgttctactgctgcgtggcgaagatgatacaggattatattttagatttctatccagagcacatgattgcttgggtttcttgcaccatggatccaggctactaggttggtggtcaattgatgaaggaagccgggaggaggaagctcgactatactttgatcaagaatctgggtacaataccttctgtggtcatccgcctgaaatagtcaagaaaatgccgaagaaagagcttgcggaggaggtgtggagacttcaagcagcacttggtgaacaaacagaaatcacgaaattcagtcagcaggaatatgagagactgcaaaatgagaaagtgctgtgtagggtatgttttgaaagagaaatcagtgttgtactgcttccatgtagacaccgtgttctctgcagaaactgttcagacaagtgtaaaaaatgccccttctgccgtataactatcgaagagcggctccccgtatatgatgtttaacatctaactagaccgtcttcgtctcttcgacatcaaatatttaagtgtatatatgtgtgtgtatagatgatatgattattcactcctttaagaaactctacattgctgagtcgttttatttgtgtgaatcagcattgagcataggtcgagcagaagtctattgttggataagatcttatgtcttatgtttaggctttttgtagatattatttacctc

SEQ ID NO: 89906 - protein, 466 aa, Arabidopsis thaliana
  peptide (1)..(466): Ceres Seq. ID no. 12721363
  misc_feature (419)..(453): Pfam Name: Zinc finger, C3HC4 type (RING finger) Pfam Description: Zinc finger, C3HC4 type (RING finger)
  misc_feature (1)..(466): Homolog of NCBI NO: 22330616 NR Description: unknown protein; protein id: At1g73950.1,
  misc_feature (1)..(466): Homolog of NCBI NO: 18394611 NR Description: expressed protein; protein id: At1g18470.1, by cDNA: 33310. [Arabidopsis thaliana]
  misc_feature (1)..(466): Homolog of NCBI NO: 13937305 NR Description: unknown protein [Oryza sativa]
  misc_feature (1)..(466): Homolog of NCBI NO: 18409134 NR Description: expressed protein; protein id: At1g68820.1, by cDNA: gi_13878072, supported by cDNA: gi_17104740 [Arabidopsis >gi|13878073|gb|AAK44114.1|AF370299_1 unknown protein
  misc_feature (1)..(232): Homolog of NCBI NO: 25373333 NR Description: unknown protein F2P9.18 [imported] - Arabidopsis
  misc_feature (269)..(339): Homolog of NCBI NO: 25373333 NR Description: unknown protein F2P9.18 [imported] - Arabidopsis
  misc_feature (150)..(466): Homolog of NCBI NO: 6714286 NR Description: F15H18.5 [Arabidopsis thaliana]
  misc_feature (40)..(149): Homolog of NCBI NO: 6714286 NR Description: F15H18.5 [Arabidopsis thaliana]
  misc_feature (350)..(414): Homolog of NCBI NO: 25373333 NR Description: unknown protein F2P9.18 [imported] - Arabidopsis
  misc_feature (222)..(466): Homolog of NCBI NO: 12324138 NR Description: hypothetical protein; 29936-28688 [Arabidopsis
MNCWRVLKSVQASVAHCFLFSFTLALVLKLDHSITYSWWVVCLPLWAFHAVVARGRFSLPAPIAPRNRHWAPCHAIVSTPLLIAFELLLCVYLETAYADSPPAVSLKIVFLPLLAFEVIILVDNARMCRALMPGDEESVNDEAVWEALPHFWVAISMVFFLAATVFTLLKLSGDVAALGWWDLFINFGIAECFAFLVCTKWSNPVIHRSSRDRETGSSSTNIRYLDWNSGLGVFSEDDRNQDTCGLQDIGGHIMKIPLIVFQVVLCMHLEGTPEAAKSISVPVLFSPLFLLQGVGVLFAASKLIEKVVLLLRGEDDTGLYFRFLSRAHDCLGFLHHGSRLLGWWSIDEGSREEEARLYFDQESGYNTFCGHPPEIVKKMPKKELAEEVWRLQAALGEQTEITKFSQQEYERLQNEKVLCRVCFEREISVVLLPCRHRVLCRNCSDKCKKCPFCRITIEERLPVYDV

SEQ ID NO: 89907 - protein, 340 aa, Arabidopsis thaliana
  peptide (1)..(340): Ceres Seq. ID no. 12721364
  misc_feature (293)..(327): Pfam Name: Zinc finger, C3HC4 type (RING finger) Pfam Description: Zinc finger, C3HC4 type (RING finger)
  misc_feature (1)..(340): Homolog of NCBI NO: 22330616 NR Description: unknown protein; protein id: At1g73950.1,
  misc_feature (1)..(340): Homolog of NCBI NO: 18394611 NR Description: expressed protein; protein id: At1g18470.1, by cDNA: 33310. [Arabidopsis thaliana]
  misc_feature (1)..(340): Homolog of NCBI NO: 13937305 NR Description: unknown protein [Oryza sativa]
  misc_feature (1)..(340): Homolog of NCBI NO: 18409134 NR Description: expressed protein; protein id: At1g68820.1, by cDNA: gi_13878072, supported by cDNA: gi_17104740 [Arabidopsis >gi|13878073|gb|AAK44114.1|AF370299_1 unknown protein
  misc_feature (1)..(106): Homolog of NCBI NO: 25373333 NR Description: unknown protein F2P9.18 [imported] - Arabidopsis
  misc_feature (143)..(213): Homolog of NCBI NO: 25373333 NR Description: unknown protein F2P9.18 [imported] - Arabidopsis
  misc_feature (24)..(340): Homolog of NCBI NO: 6714286 NR Description: F15H18.5 [Arabidopsis thaliana]
  misc_feature (1)..(23): Homolog of NCBI NO: 6714286 NR Description: F15H18.5 [Arabidopsis thaliana]
  misc_feature (224)..(288): Homolog of NCBI NO: 25373333 NR Description: unknown protein F2P9.18 [imported] - Arabidopsis
  misc_feature (96)..(340): Homolog of NCBI NO: 12324138 NR Description: hypothetical protein; 29936-28688 [Arabidopsis
MCRALMPGDEESVNDEAVWEALPHFWVAISMVFFLAATVFTLLKLSGDVAALGWWDLFINFGIAECFAFLVCTKWSNPVIHRSSRDRETGSSSTNIRYLDWNSGLGVFSEDDRNQDTCGLQDIGGHIMKIPLIVFQVVLCMHLEGTPEAAKSISVPVLFSPLFLLQGVGVLFAASKLIEKVVLLLRGEDDTGLYFRFLSRAHDCLGFLHHGSRLLGWWSIDEGSREEEARLYFDQESGYNTFCGHPPEIVKKMPKKELAEEVWRLQAALGEQTEITKFSQQEYERLQNEKVLCRVCFEREISVVLLPCRHRVLCRNCSDKCKKCPFCRITIEERLPVYDV

SEQ ID NO: 89908 - protein, 335 aa, Arabidopsis thaliana
  peptide (1)..(335): Ceres Seq. ID no. 12721365
  misc_feature (288)..(322): Pfam Name: Zinc finger, C3HC4 type (RING finger) Pfam Description: Zinc finger, C3HC4 type (RING finger)
  misc_feature (1)..(335): Homolog of NCBI NO: 22330616 NR Description: unknown protein; protein id: At1g73950.1,
  misc_feature (1)..(335): Homolog of NCBI NO: 18394611 NR Description: expressed protein; protein id: At1g18470.1, by cDNA: 33310. [Arabidopsis thaliana]
  misc_feature (1)..(335): Homolog of NCBI NO: 13937305 NR Description: unknown protein [Oryza sativa]
  misc_feature (1)..(335): Homolog of NCBI NO: 18409134 NR Description: expressed protein; protein id: At1g68820.1, by cDNA: gi_13878072, supported by cDNA: gi_17104740 [Arabidopsis >gi|13878073|gb|AAK44114.1|AF370299_1 unknown protein
  misc_feature (1)..(101): Homolog of NCBI NO: 25373333 NR Description: unknown protein F2P9.18 [imported] - Arabidopsis
  misc_feature (138)..(208): Homolog of NCBI NO: 25373333 NR Description: unknown protein F2P9.18 [imported] - Arabidopsis
  misc_feature (19)..(335): Homolog of NCBI NO: 6714286 NR Description: F15H18.5 [Arabidopsis thaliana]
  misc_feature (1)..(18): Homolog of NCBI NO: 6714286 NR Description: F15H18.5 [Arabidopsis thaliana]
  misc_feature (219)..(283): Homolog of NCBI NO: 25373333 NR Description: unknown protein F2P9.18 [imported] - Arabidopsis
  misc_feature (91)..(335): Homolog of NCBI NO: 12324138 NR Description: hypothetical protein; 29936-28688 [Arabidopsis
MPGDEESVNDEAVWEALPHFWVAISMVFFLAATVFTLLKLSGDVAALGWWDLFINFGIAECFAFLVCTKWSNPVIHRSSRDRETGSSSTNIRYLDWNSGLGVFSEDDRNQDTCGLQDIGGHIMKIPLIVFQVVLCMHLEGTPEAAKSISVPVLFSPLFLLQGVGVLFAASKLIEKVVLLLRGEDDTGLYFRFLSRAHDCLGFLHHGSRLLGWWSIDEGSREEEARLYFDQESGYNTFCGHPPEIVKKMPKKELAEEVWRLQAALGEQTEITKFSQQEYERLQNEKVLCRVCFEREISVVLLPCRHRVLCRNCSDKCKKCPFCRITIEERLPVYDV

SEQ ID NO: 89909 - DNA, 1701 bp, Arabidopsis thaliana
  misc_feature (1)..(1701): Ceres Seq. ID no. 12721384
  misc_feature: MA Experiment ID: 20000171 Result: Down-regulated in Transcription
  misc_feature: MA Experiment 20000171 PARAMETER Experiment Name: At_42deg_Heat_P Parameter: Age (day) Value: 14
  misc_feature: MA Experiment 20000171 PARAMETER Experiment Name: At_42deg_Heat_P Parameter: Organism Value: A. thaliana
  misc_feature: MA Experiment 20000171 PARAMETER Experiment Name: At_42deg_Heat_P Parameter: Plant Line Value: WS
  misc_feature: MA Experiment 20000171 PARAMETER Experiment Name: At_42deg_Heat_P Parameter: Temperature (deg C) Value: 42 vs. 22
  misc_feature: MA Experiment 20000171 PARAMETER Experiment Name: At_42deg_Heat_P Parameter: Timepoint (hr) Value: 1
  misc_feature: MA Experiment 20000171 PARAMETER Experiment Name: At_42deg_Heat_P Parameter: Tissue Value: Aerial
  misc_feature: MA Experiment ID: 20000173 Result: Down-regulated in Transcription
  misc_feature: MA Experiment 20000173 PARAMETER Experiment Name: At_42deg_Heat_P Parameter: Age (day) Value: 14
  misc_feature: MA Experiment 20000173 PARAMETER Experiment Name: At_42deg_Heat_P Parameter: Organism Value: A. thaliana
  misc_feature: MA Experiment 20000173 PARAMETER Experiment Name: At_42deg_Heat_P Parameter: Plant Line Value: WS
  misc_feature: MA Experiment 20000173 PARAMETER Experiment Name: At_42deg_Heat_P Parameter: Temperature (deg C) Value: 42 vs. 22
  misc_feature: MA Experiment 20000173 PARAMETER Experiment Name: At_42deg_Heat_P Parameter: Timepoint (hr) Value: 6
  misc_feature: MA Experiment 20000173 PARAMETER Experiment Name: At_42deg_Heat_P Parameter: Tissue Value: Aerial
  misc_feature: MA Experiment ID: 20000179 Result: Up-regulated in Transcription
  misc_feature: MA Experiment 20000179 PARAMETER Experiment Name: At_Germinating_Seeds_P Parameter: Age (hr) Value: 6 vs. 0
  misc_feature: MA Experiment 20000179 PARAMETER Experiment Name: At_Germinating_Seeds_P Parameter: Tissue Value: Germinating Seeds
  misc_feature: MA Experiment ID: 20000180 Result: Up-regulated in Transcription
  misc_feature: MA Experiment 20000180 PARAMETER Experiment Name: At_Germinating_Seeds_P Parameter: Age (hr) Value: 24 vs. 0
  misc_feature: MA Experiment 20000180 PARAMETER Experiment Name: At_Germinating_Seeds_P Parameter: Tissue Value: Germinating Seeds
  misc_feature: MA Experiment ID: 20000185 Result: Up-regulated in Transcription
  misc_feature: MA Experiment 20000185 PARAMETER Experiment Name: At_Roots__P Parameter: Age (day) Value: 7 vs. 21
  misc_feature: MA Experiment 20000185 PARAMETER Experiment Name: At_Roots__P Parameter: Organism Value: A. thaliana
  misc_feature: MA Experiment 20000185 PARAMETER Experiment Name: At_Roots__P Parameter: Tissue Value: Roots vs. Whole Plant
  misc_feature: MA Experiment ID: 20000227 Result: Up-regulated in Transcription
  misc_feature: MA Experiment 20000227 PARAMETER Experiment Name: At_Root-Tips-vs-Tops_P Parameter: Tissue Value: Root Tips vs. Root Tops
  misc_feature: MA Experiment ID: 20000234 Result: Up-regulated in Transcription
  misc_feature: MA Experiment 20000234 PARAMETER Experiment Name: At_Siliques_P Parameter: Age (day) Value: 21
  misc_feature: MA Experiment 20000234 PARAMETER Experiment Name: At_Siliques_P Parameter: Organism Value: A. thaliana
  misc_feature: MA Experiment 20000234 PARAMETER Experiment Name: At_Siliques_P Parameter: Plant Line Value: WS
  misc_feature: MA Experiment 20000234 PARAMETER Experiment Name: At_Siliques_P Parameter: Tissue Value: Less Than 5mm Siliques vs. Whole Plant
  misc_feature: MA Experiment ID: 20000264 Result: Up-regulated in Transcription
  misc_feature: MA Experiment 20000264 PARAMETER Experiment Name: At_Open_Flower_P Parameter: Age (day) Value: 21
  misc_feature: MA Experiment 20000264 PARAMETER Experiment Name: At_Open_Flower_P Parameter: Plant Line Value: WS
  misc_feature: MA Experiment 20000264 PARAMETER Experiment Name: At_Open_Flower_P Parameter: Tissue Value: Open Flower vs. Whole Plant
  misc_feature: MA Experiment ID: 20000265 Result: Up-regulated in Transcription
  misc_feature: MA Experiment 20000265 PARAMETER Experiment Name: At_Open_Flower_P Parameter: Age (day) Value: 21
  misc_feature: MA Experiment 20000265 PARAMETER Experiment Name: At_Open_Flower_P Parameter: Plant Line Value: WS
  misc_feature: MA Experiment 20000265 PARAMETER Experiment Name: At_Open_Flower_P Parameter: Tissue Value: Closed Flower vs. Whole Plant
  misc_feature: MA Experiment ID: 20000286 Result: Up-regulated in Transcription
  misc_feature: MA Experiment 20000286 PARAMETER Experiment Name: At_Open_Flower_P Parameter: Age (day) Value: 21
  misc_feature: MA Experiment 20000286 PARAMETER Experiment Name: At_Open_Flower_P Parameter: Plant Line Value: WS
  misc_feature: MA Experiment 20000286 PARAMETER Experiment Name: At_Open_Flower_P Parameter: Tissue Value: Half Open vs. Whole Plant
  misc_feature: MA Experiment ID: 20000439 Result: Up-regulated in Transcription
  misc_feature: MA Experiment 20000439 PARAMETER Experiment Name: At_Roots__P Parameter: Age (day) Value: 14 vs. 21
  misc_feature: MA Experiment 20000439 PARAMETER Experiment Name: At_Roots__P Parameter: Organism Value: A. thaliana
  misc_feature: MA Experiment 20000439 PARAMETER Experiment Name: At_Roots__P Parameter: Tissue Value: Roots vs. Whole Plant
  misc_feature: MA Experiment ID: 20000443 Result: Down-regulated in Transcription
  misc_feature: MA Experiment 20000443 PARAMETER Experiment Name: At_1uM_BR-BRZ__P Parameter: Tissue Value: Shoot Apices
  misc_feature: MA Experiment 20000443 PARAMETER Experiment Name: At_1uM_BR-BRZ__P Parameter: Treatment Value: 1uM BRZ vs. No Treatment
  misc_feature: MA Experiment ID: 20001451 Result: Down-regulated in Transcription
  misc_feature: MA Experiment 20001451 PARAMETER Experiment Name: At_Far-red-induction_P Parameter: Age (day) Value: 7
  misc_feature: MA Experiment 20001451 PARAMETER Experiment Name: At_Far-red-induction_P Parameter: Light Value: Far-red vs. White
  misc_feature: MA Experiment 20001451 PARAMETER Experiment Name: At_Far-red-induction_P Parameter: Organism Value: A. thaliana
  misc_feature: MA Experiment 20001451 PARAMETER Experiment Name: At_Far-red-induction_P Parameter: Plant Line Value: Columbia
  misc_feature: MA Experiment 20001451 PARAMETER Experiment Name: At_Far-red-induction_P Parameter: Timepoint (hr) Value: 24
  misc_feature: MA Experiment 20001451 PARAMETER Experiment Name: At_Far-red-induction_P Parameter: Tissue Value: Whole Plant
  misc_feature: MA Experiment ID: 20001755 Result: Up-regulated in Transcription
  misc_feature: MA Experiment 20001755 PARAMETER Experiment Name: At_50mM_NH4NO3_L-to-H_P Parameter: Timepoint (hr) Value: 2
  misc_feature: MA Experiment 20001755 PARAMETER Experiment Name: At_50mM_NH4NO3_L-to-H_P Parameter: Tissue Value: Leaf
  misc_feature: MA Experiment 20001755 PARAMETER Experiment Name: At_50mM_NH4NO3_L-to-H_P Parameter: Treatment Value: 50mM NH4NO3 vs 100mM Mannitol
  misc_feature: MA Experiment ID: 20001757 Result: Up-regulated in Transcription
  misc_feature: MA Experiment 20001757 PARAMETER Experiment Name: At_50mM_NH4NO3_L-to-H_P Parameter: Timepoint (hr) Value: 6
  misc_feature: MA Experiment 20001757 PARAMETER Experiment Name: At_50mM_NH4NO3_L-to-H_P Parameter: Tissue Value: Leaf
  misc_feature: MA Experiment 20001757 PARAMETER Experiment Name: At_50mM_NH4NO3_L-to-H_P Parameter: Treatment Value: 50mM NH4NO3 vs 100mM Mannitol
  misc_feature: MA Experiment ID: 20001911 Result: Down-regulated in Transcription
  misc_feature: MA Experiment 20001911 PARAMETER Experiment Name: At_Drought_Reproduction_P Parameter: Age (day) Value: 40
  misc_feature: MA Experiment 20001911 PARAMETER Experiment Name: At_Drought_Reproduction_P Parameter: Organism Value: A. thaliana
  misc_feature: MA Experiment 20001911 PARAMETER Experiment Name: At_Drought_Reproduction_P Parameter: Plant Line Value: WS
  misc_feature: MA Experiment 20001911 PARAMETER Experiment Name: At_Drought_Reproduction_P Parameter: Timepoint (day) Value: 10
  misc_feature: MA Experiment 20001911 PARAMETER Experiment Name: At_Drought_Reproduction_P Parameter: Tissue Value: Flowers
  misc_feature: MA Experiment 20001911 PARAMETER Experiment Name: At_Drought_Reproduction_P Parameter: Treatment Value: Drought vs. No Drought
acagagagtattttttttaggtatcgtgtaatggctttgactacaaaacctcaccatcttcagagatctttcctctctccgtcgcgtgtttccggcgaacgatatttggaatctgcgccatcatgtctgagattccgtcgcagcggtgtccaatgctcggtggtggctaaggagtgcagagtgaaaggagtgaaagcgagacagattattgatagtagagggaatccgacggtggaggttgatctgattaccgatgatctgtatcgttcggctgttccaagtggtgcatctaccgggatctacgaagcgcttgagcttagagatggagacaagagcgtctatggtggtaaaggtgtattacaggctattaaaaacatcaatgaacttgtggctccaaaactcattggagttgacgttaggaaccaagctgatgtcgatgctcttatgctggaactggatgggaccccaaacaagtcgaaactcggggctaatgcgatattaggagtgtcattgagcgtttgcagggcaggtgctggagctaaaggagtgcctttgtacaaacacatccaggaaacatcaggaacaaaggagcttgtcatgccagttcctgcattcaatgtgatcaatggaggcagtcatgctgggaatagtttggctatgcaagagtttatgatactacctgtaggagctacctcattctcggaggccttccagatgggaagtgaagtttatcatacattgaaggggataatcaaaactaagtatggtcaagatgcttgtaatgtcggagatgaaggagggtttgcgccgaatgttcaagataacagagagggactagttctgctcatagatgcaattgaaaaggccggttacactggaaagatcaaaataggaatggatgttgctgcatcagaatttttcatgaaagatggtagatacgatttgaacttcaagaaacagccaaacgatggagctcacgtactgtcagccgagagtcttgctgacctctacagagaattcatcaaggatttcccaattgtctctatcgaagatccttttgaccaggatgattggagctcatgggcttcattgcaatcctctgtggatatccaactcgtgggagatgacttgttagtcactaacccgaagaggatagctgaagctattaagaaacagtcttgcaatgctctactcttgaaggttaaccagattgggacagtcactgagtcaattcaagcagcacttgactcaaaagctgcaggctggggtgtgatggttagtcacaggagtggcgagacagaggataacttcatcgcagatctctctgttggtttagcaagcggacagatcaaaactggtgctccatgccgaagtgaacgattgtcaaaatacaaccagcttctccgtatcgaagaggaactcggcaatgtgcgctacgccggtgaagctttccgatcaccatgagaaattcgagaaaggcactcattggcggcttttgcttacagaattaggtgaaaccaaatgaggtcctcctagtatcagctccgttgtagctgtctctgaaaagtatcagattttctacaaaaacaaataaaagaacagctttttcactgagtcttctgttgtaatgtcattgataccgatataaacatggatcgaccaaagcgtttttcagattaatcagatgctcagagatatgtc

SEQ ID NO: 89910 - protein, 487 aa, Arabidopsis thaliana
  peptide (1)..(487): Ceres Seq. ID no. 12721385
  misc_feature (197)..(487): Pfam Name: Enolase, C-terminal TIM barrel domain Pfam Description: Enolase, C-terminal TIM barrel domain
  misc_feature (11)..(487): Homolog of NCBI NO: 15221107 NR Description: putative enolase; protein id: At1g74030.1, by cDNA: gi_14334609, supported by cDNA: gi_17065639 [Arabidopsis
  misc_feature (24)..(487): Homolog of NCBI NO: 21392248 NR Description: SD23356p [Drosophila melanogaster]
  misc_feature (24)..(487): Homolog of NCBI NO: 24580914 NR Description: Enolase CG17654-PB >gi|24580916|ref|NP_722722.1|
  misc_feature (61)..(487): Homolog of NCBI NO: 119351 NR Description: Enolase (2-phosphoglycerate dehydratase)
  misc_feature (64)..(487): Homolog of NCBI NO: 1169533 NR Description: Enolase (2-phosphoglycerate dehydratase)
  misc_feature (64)..(487): Homolog of NCBI NO: 17536383 NR Description: Enolase (46.6 kD) [Caenorhabditis elegans]
  misc_feature (61)..(487): Homolog of NCBI NO: 8919731 NR Description: enolase [Spinacia oleracea]
  misc_feature (64)..(487): Homolog of NCBI NO: 37589645 NR Description: Unknown (protein for MGC:73056) [Danio rerio]
  misc_feature (61)..(487): Homolog of NCBI NO: 119354 NR Description: Enolase (2-phosphoglycerate dehydratase)
  misc_feature (61)..(487): Homolog of NCBI NO: 7436883 NR Description: phosphopyruvate hydratase (EC 4.2.1.11) - common
TESIFFRYRVMALTTKPHHLQRSFLSPSRVSGERYLESAPSCLRFRRSGVQCSVVAKECRVKGVKARQIIDSRGNPTVEVDLITDDLYRSAVPSGASTGIYEALELRDGDKSVYGGKGVLQAIKNINELVAPKLIGVDVRNQADVDALMLELDGTPNKSKLGANAILGVSLSVCRAGAGAKGVPLYKHIQETSGTKELVMPVPAFNVINGGSHAGNSLAMQEFMILPVGATSFSEAFQMGSEVYHTLKGIIKTKYGQDACNVGDEGGFAPNVQDNREGLVLLIDAIEKAGYTGKIKIGMDVAASEFFMKDGRYDLNFKKQPNDGAHVLSAESLADLYREFIKDFPIVSIEDPFDQDDWSSWASLQSSVDIQLVGDDLLVTNPKRIAEAIKKQSCNALLLKVNQIGTVTESIQAALDSKAAGWGVMVSHRSGETEDNFIADLSVGLASGQIKTGAPCRSERLSKYNQLLRIEEELGNVRYAGEAFRSP

SEQ ID NO: 89911 - protein, 477 aa, Arabidopsis thaliana
  peptide (1)..(477): Ceres Seq. ID no. 12721386
  misc_feature (187)..(477): Pfam Name: Enolase, C-terminal TIM barrel domain Pfam Description: Enolase, C-terminal TIM barrel domain
  misc_feature (1)..(477): Homolog of NCBI NO: 15221107 NR Description: putative enolase; protein id: At1g74030.1, by cDNA: gi_14334609, supported by cDNA: gi_17065639 [Arabidopsis
  misc_feature (14)..(477): Homolog of NCBI NO: 21392248 NR Description: SD23356p [Drosophila melanogaster]
  misc_feature (14)..(477): Homolog of NCBI NO: 24580914 NR Description: Enolase CG17654-PB >gi|24580916|ref|NP_722722.1|
  misc_feature (51)..(477): Homolog of NCBI NO: 119351 NR Description: Enolase (2-phosphoglycerate dehydratase)
  misc_feature (54)..(477): Homolog of NCBI NO: 1169533 NR Description: Enolase (2-phosphoglycerate dehydratase)
  misc_feature (54)..(477): Homolog of NCBI NO: 17536383 NR Description: Enolase (46.6 kD) [Caenorhabditis elegans]
  misc_feature (51)..(477): Homolog of NCBI NO: 8919731 NR Description: enolase [Spinacia oleracea]
  misc_feature (54)..(477): Homolog of NCBI NO: 37589645 NR Description: Unknown (protein for MGC:73056) [Danio rerio]
  misc_feature (51)..(477): Homolog of NCBI NO: 119354 NR Description: Enolase (2-phosphoglycerate dehydratase)
  misc_feature (51)..(477): Homolog of NCBI NO: 7436883 NR Description: phosphopyruvate hydratase (EC 4.2.1.11) - common
MALTTKPHHLQRSFLSPSRVSGERYLESAPSCLRFRRSGVQCSVVAKECRVKGVKARQIIDSRGNPTVEVDLITDDLYRSAVPSGASTGIYEALELRDGDKSVYGGKGVLQAIKNINELVAPKLIGVDVRNQADVDALMLELDGTPNKSKLGANAILGVSLSVCRAGAGAKGVPLYKHIQETSGTKELVMPVPAFNVINGGSHAGNSLAMQEFMILPVGATSFSEAFQMGSEVYHTLKGIIKTKYGQDACNVGDEGGFAPNVQDNREGLVLLIDAIEKAGYTGKIKIGMDVAASEFFMKDGRYDLNFKKQPNDGAHVLSAESLADLYREFIKDFPIVSIEDPFDQDDWSSWASLQSSVDIQLVGDDLLVTNPKRIAEAIKKQSCNALLLKVNQIGTVTESIQAALDSKAAGWGVMVSHRSGETEDNFIADLSVGLASGQIKTGAPCRSERLSKYNQLLRIEEELGNVRYAGEAFRSP

SEQ ID NO: 89912 - protein, 339 aa, Arabidopsis thaliana
  peptide (1)..(339): Ceres Seq. ID no. 12721387
  misc_feature (49)..(339): Pfam Name: Enolase, C-terminal TIM barrel domain Pfam Description: Enolase, C-terminal TIM barrel domain
  misc_feature (1)..(339): Homolog of NCBI NO: 15221107 NR Description: putative enolase; protein id: At1g74030.1, by cDNA: gi_14334609, supported by cDNA: gi_17065639 [Arabidopsis
  misc_feature (1)..(339): Homolog of NCBI NO: 21392248 NR Description: SD23356p [Drosophila melanogaster]
  misc_feature (1)..(339): Homolog of NCBI NO: 24580914 NR Description: Enolase CG17654-PB >gi|24580916|ref|NP_722722.1|
  misc_feature (1)..(339): Homolog of NCBI NO: 119351 NR Description: Enolase (2-phosphoglycerate dehydratase)
  misc_feature (1)..(339): Homolog of NCBI NO: 1169533 NR Description: Enolase (2-phosphoglycerate dehydratase)
  misc_feature (1)..(339): Homolog of NCBI NO: 17536383 NR Description: Enolase (46.6 kD) [Caenorhabditis elegans]
  misc_feature (1)..(339): Homolog of NCBI NO: 8919731 NR Description: enolase [Spinacia oleracea]
  misc_feature (1)..(339): Homolog of NCBI NO: 37589645 NR Description: Unknown (protein for MGC:73056) [Danio rerio]
  misc_feature (1)..(339): Homolog of NCBI NO: 119354 NR Description: Enolase (2-phosphoglycerate dehydratase)
  misc_feature (1)..(339): Homolog of NCBI NO: 7436883 NR Description: phosphopyruvate hydratase (EC 4.2.1.11) - common
MLELDGTPNKSKLGANAILGVSLSVCRAGAGAKGVPLYKHIQETSGTKELVMPVPAFNVINGGSHAGNSLAMQEFMILPVGATSFSEAFQMGSEVYHTLKGIIKTKYGQDACNVGDEGGFAPNVQDNREGLVLLIDAIEKAGYTGKIKIGMDVAASEFFMKDGRYDLNFKKQPNDGAHVLSAESLADLYREFIKDFPIVSIEDPFDQDDWSSWASLQSSVDIQLVGDDLLVTNPKRIAEAIKKQSCNALLLKVNQIGTVTESIQAALDSKAAGWGVMVSHRSGETEDNFIADLSVGLASGQIKTGAPCRSERLSKYNQLLRIEEELGNVRYAGEAFRSP

SEQ ID NO: 89913 - DNA, 1116 bp, Arabidopsis thaliana
  misc_feature (1)..(1116): Ceres Seq. ID no. 12721407
  misc_feature: MA Experiment ID: 20000328 Result: Down-regulated in Transcription
  misc_feature: MA Experiment 20000328 PARAMETER Experiment Name: At_42deg_Heat_Sub_P Parameter: Age (day) Value: 14
  misc_feature: MA Experiment 20000328 PARAMETER Experiment Name: At_42deg_Heat_Sub_P Parameter: Organism Value: A. thaliana
  misc_feature: MA Experiment 20000328 PARAMETER Experiment Name: At_42deg_Heat_Sub_P Parameter: Plant Line Value: WS
  misc_feature: MA Experiment 20000328 PARAMETER Experiment Name: At_42deg_Heat_Sub_P Parameter: Temperature (deg C) Value: 42 vs. 22
  misc_feature: MA Experiment 20000328 PARAMETER Experiment Name: At_42deg_Heat_Sub_P Parameter: Timepoint (hr) Value: 6
  misc_feature: MA Experiment 20000328 PARAMETER Experiment Name: At_42deg_Heat_Sub_P Parameter: Tissue Value: Aerial
atggcaagtgattcatcaaggaagagctcactaaagccatcttctcgaaagagttttctttttccttctgttgtgattgtcattgttgggataatcgtggcgttgacttatcagtcgaagttgaaacctcctcagccgaagctatgtggctcctcaagtggtccaccgattacagcaccgcggataaagcttcaagatgggaggtatttggcttacaaagagcatggacttccaagagagaaagctaaccgcaaaatcgtcttcatccatggatccgattgttgtagacacgatgccgtcttcgccacgctgctttctccggatttagtagaggaactaggtgtatatatggtttcattcgacagaccaggctattgtgagagtgatccgcatccaagtcgtacaccgcgaagcttggtttcggatattgaagagctcgatgatcaactgagtctaggatcaaagttctacgtgattgggaaatcaatgggaggacaagcggcgtggggatgccttaaccttaagtacatccctcatcgattagccggagtaacactagttgctcctgtggttaactactattggaggaacttacctttgaacgtttccactgaaggttttaactttcaacaaaagagagatcaatgggcggttcgtgttgctcactatgctccttggcttatttattggtggaacacacaaaaatggttccctggttcgagtattgcgaaccgagacagtctcttgtcacaatcggatagagatatcatttcgaagcgtggttatacgaggaaaccacattgggcagaggtaaggcagcaaggaatacatgagagtattaaccgtgacatgatcgttggttttgggaactgggaatttgatcctttagacctagacaatccgtttttgaacaatgaaggctttgtgcatttgtggcagggagatgaggacatgttagtgcctgtgaagctgcagcgttaccttgctcatcagcttccatgggttcactatcatgaggttccgagaagtggccacttcttccacttcactaaaggtgtggttgataacattgtaacgacgctcttaaccaccgatactgatacgattcgtcagtaa

SEQ ID NO: 89914 - protein, 371 aa, Arabidopsis thaliana
  peptide (1)..(371): Ceres Seq. ID no. 12721408
  misc_feature (115)..(360): Pfam Name: alpha/beta hydrolase fold Pfam Description: alpha/beta hydrolase fold
  misc_feature (1)..(371): Homolog of NCBI NO: 15221193 NR Description: unknown protein; protein id: At1g74290.1
  misc_feature (1)..(364): Homolog of NCBI NO: 21537089 NR Description: unknown [Arabidopsis thaliana]
  misc_feature (1)..(370): Homolog of NCBI NO: 18410575 NR Description: expressed protein; protein id: At1g74280.1, by cDNA: 119889. [Arabidopsis thaliana] >gi|25406331|pir||C96771
  misc_feature (22)..(362): Homolog of NCBI NO: 21592662 NR Description: unknown [Arabidopsis thaliana]
  misc_feature (22)..(362): Homolog of NCBI NO: 18410582 NR Description: expressed protein; protein id: At1g74300.1, by cDNA: 31039. [Arabidopsis thaliana] >gi|25406334|pir||E96771
  misc_feature (1)..(365): Homolog of NCBI NO: 18404095 NR Description: expressed protein; protein id: At2g36290.1, by cDNA: 5167. [Arabidopsis thaliana] >gi|25408458|pir||H84778
  misc_feature (1)..(365): Homolog of NCBI NO: 28416665 NR Description: At2g36290 [Arabidopsis thaliana]
  misc_feature (8)..(367): Homolog of NCBI NO: 15228377 NR Description: putative protein; protein id: At3g48410.1, by cDNA: gi_17529095 [Arabidopsis thaliana]
  misc_feature (24)..(365): Homolog of NCBI NO: 38346334 NR Description: OSJNBa0073L04.5 [Oryza sativa (japonica
  misc_feature (28)..(361): Homolog of NCBI NO: 37536162 NR Description: putative alpha/beta hydrolase [Oryza sativa
MASDSSRKSSLKPSSRKSFLFPSVVIVIVGIIVALTYQSKLKPPQPKLCGSSSGPPITAPRIKLQDGRYLAYKEHGLPREKANRKIVFIHGSDCCRHDAVFATLLSPDLVEELGVYMVSFDRPGYCESDPHPSRTPRSLVSDIEELDDQLSLGSKFYVIGKSMGGQAAWGCLNLKYIPHRLAGVTLVAPVVNYYWRNLPLNVSTEGFNFQQKRDQWAVRVAHYAPWLIYWWNTQKWFPGSSIANRDSLLSQSDRDIISKRGYTRKPHWAEVRQQGIHESINRDMIVGFGNWEFDPLDLDNPFLNNEGFVHLWQGDEDMLVPVKLQRYLAHQLPWVHYHEVPRSGHFFHFTKGVVDNIVTTLLTTDTDTIRQ

SEQ ID NO: 89915 - protein, 255 aa, Arabidopsis thaliana
  peptide (1)..(255): Ceres Seq. ID no. 12721409
  misc_feature (1)..(244): Pfam Name: alpha/beta hydrolase fold Pfam Description: alpha/beta hydrolase fold
  misc_feature (1)..(255): Homolog of NCBI NO: 15221193 NR Description: unknown protein; protein id: At1g74290.1
  misc_feature (1)..(248): Homolog of NCBI NO: 21537089 NR Description: unknown [Arabidopsis thaliana]
  misc_feature (1)..(254): Homolog of NCBI NO: 18410575 NR Description: expressed protein; protein id: At1g74280.1, by cDNA: 119889. [Arabidopsis thaliana] >gi|25406331|pir||C96771
  misc_feature (1)..(246): Homolog of NCBI NO: 21592662 NR Description: unknown [Arabidopsis thaliana]
  misc_feature (1)..(246): Homolog of NCBI NO: 18410582 NR Description: expressed protein; protein id: At1g74300.1, by cDNA: 31039. [Arabidopsis thaliana] >gi|25406334|pir||E96771
  misc_feature (1)..(249): Homolog of NCBI NO: 18404095 NR Description: expressed protein; protein id: At2g36290.1, by cDNA: 5167. [Arabidopsis thaliana] >gi|25408458|pir||H84778
  misc_feature (1)..(249): Homolog of NCBI NO: 28416665 NR Description: At2g36290 [Arabidopsis thaliana]
  misc_feature (1)..(251): Homolog of NCBI NO: 15228377 NR Description: putative protein; protein id: At3g48410.1, by cDNA: gi_17529095 [Arabidopsis thaliana]
  misc_feature (1)..(249): Homolog of NCBI NO: 38346334 NR Description: OSJNBa0073L04.5 [Oryza sativa (japonica
  misc_feature (1)..(245): Homolog of NCBI NO: 37536162 NR Description: putative alpha/beta hydrolase [Oryza sativa
MVSFDRPGYCESDPHPSRTPRSLVSDIEELDDQLSLGSKFYVIGKSMGGQAAWGCLNLKYIPHRLAGVTLVAPVVNYYWRNLPLNVSTEGFNFQQKRDQWAVRVAHYAPWLIYWWNTQKWFPGSSIANRDSLLSQSDRDIISKRGYTRKPHWAEVRQQGIHESINRDMIVGFGNWEFDPLDLDNPFLNNEGFVHLWQGDEDMLVPVKLQRYLAHQLPWVHYHEVPRSGHFFHFTKGVVDNIVTTLLTTDTDTIRQ

SEQ ID NO: 89916 - protein, 209 aa, Arabidopsis thaliana
  peptide (1)..(209): Ceres Seq. ID no. 12721410
  misc_feature (1)..(198): Pfam Name: alpha/beta hydrolase fold Pfam Description: alpha/beta hydrolase fold
  misc_feature (1)..(209): Homolog of NCBI NO: 15221193 NR Description: unknown protein; protein id: At1g74290.1
  misc_feature (1)..(202): Homolog of NCBI NO: 21537089 NR Description: unknown [Arabidopsis thaliana]
  misc_feature (1)..(208): Homolog of NCBI NO: 18410575 NR Description: expressed protein; protein id: At1g74280.1, by cDNA: 119889. [Arabidopsis thaliana] >gi|25406331|pir||C96771
  misc_feature (1)..(200): Homolog of NCBI NO: 21592662 NR Description: unknown [Arabidopsis thaliana]
  misc_feature (1)..(200): Homolog of NCBI NO: 18410582 NR Description: expressed protein; protein id: At1g74300.1, by cDNA: 31039. [Arabidopsis thaliana] >gi|25406334|pir||E96771
  misc_feature (1)..(203): Homolog of NCBI NO: 18404095 NR Description: expressed protein; protein id: At2g36290.1, by cDNA: 5167. [Arabidopsis thaliana] >gi|25408458|pir||H84778
  misc_feature (1)..(203): Homolog of NCBI NO: 28416665 NR Description: At2g36290 [Arabidopsis thaliana]
  misc_feature (1)..(205): Homolog of NCBI NO: 15228377 NR Description: putative protein; protein id: At3g48410.1, by cDNA: gi_17529095 [Arabidopsis thaliana]
  misc_feature (1)..(203): Homolog of NCBI NO: 38346334 NR Description: OSJNBa0073L04.5 [Oryza sativa (japonica
  misc_feature (1)..(199): Homolog of NCBI NO: 37536162 NR Description: putative alpha/beta hydrolase [Oryza sativa
MGGQAAWGCLNLKYIPHRLAGVTLVAPVVNYYWRNLPLNVSTEGFNFQQKRDQWAVRVAHYAPWLIYWWNTQKWFPGSSIANRDSLLSQSDRDIISKRGYTRKPHWAEVRQQGIHESINRDMIVGFGNWEFDPLDLDNPFLNNEGFVHLWQGDEDMLVPVKLQRYLAHQLPWVHYHEVPRSGHFFHFTKGVVDNIVTTLLTTDTDTIRQ

SEQ ID NO: 89917 - DNA, 1558 bp, Arabidopsis thaliana
  misc_feature (1)..(1558): Ceres Seq. ID no. 12721415
  misc_feature: MA Experiment ID: 20000171 Result: Up-regulated in Transcription
  misc_feature: MA Experiment 20000171 PARAMETER Experiment Name: At_42deg_Heat_P Parameter: Age (day) Value: 14
  misc_feature: MA Experiment 20000171 PARAMETER Experiment Name: At_42deg_Heat_P Parameter: Organism Value: A. thaliana
  misc_feature: MA Experiment 20000171 PARAMETER Experiment Name: At_42deg_Heat_P Parameter: Plant Line Value: WS
  misc_feature: MA Experiment 20000171 PARAMETER Experiment Name: At_42deg_Heat_P Parameter: Temperature (deg C) Value: 42 vs. 22
  misc_feature: MA Experiment 20000171 PARAMETER Experiment Name: At_42deg_Heat_P Parameter: Timepoint (hr) Value: 1
  misc_feature: MA Experiment 20000171 PARAMETER Experiment Name: At_42deg_Heat_P Parameter: Tissue Value: Aerial
  misc_feature: MA Experiment ID: 20000173 Result: Up-regulated in Transcription
  misc_feature: MA Experiment 20000173 PARAMETER Experiment Name: At_42deg_Heat_P Parameter: Age (day) Value: 14
  misc_feature: MA Experiment 20000173 PARAMETER Experiment Name: At_42deg_Heat_P Parameter: Organism Value: A. thaliana
  misc_feature: MA Experiment 20000173 PARAMETER Experiment Name: At_42deg_Heat_P Parameter: Plant Line Value: WS
  misc_feature: MA Experiment 20000173 PARAMETER Experiment Name: At_42deg_Heat_P Parameter: Temperature (deg C) Value: 42 vs. 22
  misc_feature: MA Experiment 20000173 PARAMETER Experiment Name: At_42deg_Heat_P Parameter: Timepoint (hr) Value: 6
  misc_feature: MA Experiment 20000173 PARAMETER Experiment Name: At_42deg_Heat_P Parameter: Tissue Value: Aerial
  misc_feature: MA Experiment ID: 20000794 Result: Up-regulated in Transcription
  misc_feature: MA Experiment 20000794 PARAMETER Experiment Name: At_Petals_P Parameter: Age (day) Value: 23-25 days
  misc_feature: MA Experiment 20000794 PARAMETER Experiment Name: At_Petals_P Parameter: Plant Line Value: WS
  misc_feature: MA Experiment 20000794 PARAMETER Experiment Name: At_Petals_P Parameter: Tissue Value: Petals vs. Whole plant
  misc_feature: MA Experiment ID: 20001451 Result: Down-regulated in Transcription
  misc_feature: MA Experiment 20001451 PARAMETER Experiment Name: At_Far-red-induction_P Parameter: Age (day) Value: 7
  misc_feature: MA Experiment 20001451 PARAMETER Experiment Name: At_Far-red-induction_P Parameter: Light Value: Far-red vs. White
  misc_feature: MA Experiment 20001451 PARAMETER Experiment Name: At_Far-red-induction_P Parameter: Organism Value: A. thaliana
  misc_feature: MA Experiment 20001451 PARAMETER Experiment Name: At_Far-red-induction_P Parameter: Plant Line Value: Columbia
  misc_feature: MA Experiment 20001451 PARAMETER Experiment Name: At_Far-red-induction_P Parameter: Timepoint (hr) Value: 24
  misc_feature: MA Experiment 20001451 PARAMETER Experiment Name: At_Far-red-induction_P Parameter: Tissue Value: Whole Plant
attttcattttcacaagatccttgtgttgatcctatcctctgttcttcctcgatctgcgcaacgttctctctattacttcaaactccattttcatctcgattaacccctcttcctcaattttcctctcagaccaatcttgcttccgcgtccctcctgtgattttccttcaaaaacagagatttatctttgtgtgtggcattcaaatgacgatgggtggtactgaaaagaatgtagagaataaacaatatcgtttgcctcgagaagtcaaggaagctttacaagcaatagcatcagagtgggaagatgtgattgattcaaaggctctgcaagttattcctttaaaaggtgcaatgacaaatgaggtgtttcagatcaaatggccaactagggaaaaaggtccttctcgtaaggttttggttaggatttatggtgaaggtgttgagattttctttgatcgtgaggatgagatcaggacatttgagttcatgtcgaagcatggtcatggacctttgttgttaggtcggtttggtaatggtcgtatcgaagagttcctccatgcacggaccctatctgcttgtgacttgcgtgatcctgaaatatctggtcgaatagcaactaggatgaaggagtttcatggtcttgaaatgcctggtgcgaaaaaggctttgctttgggacagattacgaaattggctcactgcatgcaagagactggcttcaccagaagaagctaagtcctttcgtctcgatgttatggagatggaaattaatatgcttgagaaatctctctttgacaatgatgaaaatattggattttgccacaatgatttacagtatgggaacatcatgatggatgaagagaccaaagcaataaccatcattgattatgaatattcatgctataatcctgtggcttatgacattgccaatcacttctgtgagatggctgccgattaccacactgaaacacctcacatcatggattatagtaaataccctggtgtggaggagcgacaaagatttctgaaaacatatatgagttattcagatgaaaagcccagcgatactatggtcaaaaaactcctagaagacgttgagaaatatacacttgctagtcatctaatttggggtttatggggaattatatcggaacatgtgaatgaaatcgactttgactacatggagtatgcaagacaaaggttcgagcagtattggttaacaaagccgaggctccttgcagcttccgaacacaagtaaatttctatggacccaacccaagaagagtattttgacggtgttaaagaggtatatacacacaaaaaggtgcctgattacaatggtatttcccagcttcaaaaaataagaaaatgtaacgttttctgttttaccctttttacgaggcaaaatgtaatggtcagtagtttataatcaacagttgaagttgtttcagataaaatgtagttctcacaaattaaatcgtttttatttgtcgattatgatttgaaaatgaaagaactttaaagttaaccctcttgggatcattttagttggttcactt

SEQ ID NO: 89918 - protein, 350 aa, Arabidopsis thaliana
  peptide (1)..(350): Ceres Seq. ID no. 12721416
  misc_feature (66)..(338): Pfam Name: Choline/ethanolamine kinase Pfam Description: Choline/ethanolamine kinase
  misc_feature (1)..(350): Homolog of NCBI NO: 22330627 NR Description: putative choline kinase; protein id: At1g74320.1, by cDNA: gi_20453121 [Arabidopsis thaliana] At1g74320/F1O17_1 [Arabidopsis thaliana]
  misc_feature (3)..(350): Homolog of NCBI NO: 25348157 NR Description: protein choline kinase F1O17.1 [imported] -
  misc_feature (5)..(348): Homolog of NCBI NO: 7488654 NR Description: choline kinase (EC 2.7.1.32) CK3 - soybean
  misc_feature (20)..(350): Homolog of NCBI NO: 7488653 NR Description: choline kinase (EC 2.7.1.32) CK2 - soybean
  misc_feature (20)..(344): Homolog of NCBI NO: 7488652 NR Description: choline kinase (EC 2.7.1.32) CK1 - soybean
  misc_feature (20)..(344): Homolog of NCBI NO: 12311795 NR Description: choline kinase [Pisum sativum]
  misc_feature (16)..(346): Homolog of NCBI NO: 33149685 NR Description: choline kinase [Oryza sativa (indica
  misc_feature (18)..(345): Homolog of NCBI NO: 15234032 NR Description: choline kinase GmCK2p -like protein; protein id: supported by cDNA: 126037., supported by cDNA: 7395. [Arabidopsis >gi|7484868|pir||T04023 choline kinase 2 homolog [Arabidopsis
  misc_feature (18)..(345): Homolog of NCBI NO: 21537276 NR Description: choline kinase GmCK2p-like protein [Arabidopsis
  misc_feature (18)..(344): Homolog of NCBI NO: 15217543 NR Description: choline kinase, putative; protein id: At1g71697.1
MTMGGTEKNVENKQYRLPREVKEALQAIASEWEDVIDSKALQVIPLKGAMTNEVFQIKWPTREKGPSRKVLVRIYGEGVEIFFDREDEIRTFEFMSKHGHGPLLLGRFGNGRIEEFLHARTLSACDLRDPEISGRIATRMKEFHGLEMPGAKKALLWDRLRNWLTACKRLASPEEAKSFRLDVMEMEINMLEKSLFDNDENIGFCHNDLQYGNIMMDEETKAITIIDYEYSCYNPVAYDIANHFCEMAADYHTETPHIMDYSKYPGVEERQRFLKTYMSYSDEKPSDTMVKKLLEDVEKYTLASHLIWGLWGIISEHVNEIDFDYMEYARQRFEQYWLTKPRLLAASEHK

SEQ ID NO: 89919 - protein, 348 aa, Arabidopsis thaliana
  peptide (1)..(348): Ceres Seq. ID no. 12721417
  misc_feature (64)..(336): Pfam Name: Choline/ethanolamine kinase Pfam Description: Choline/ethanolamine kinase
  misc_feature (1)..(348): Homolog of NCBI NO: 22330627 NR Description: putative choline kinase; protein id: At1g74320.1, by cDNA: gi_20453121 [Arabidopsis thaliana] At1g74320/F1O17_1 [Arabidopsis thaliana]
  misc_feature (1)..(348): Homolog of NCBI NO: 25348157 NR Description: protein choline kinase F1O17.1 [imported] -
  misc_feature (3)..(346): Homolog of NCBI NO: 7488654 NR Description: choline kinase (EC 2.7.1.32) CK3 - soybean
  misc_feature (18)..(348): Homolog of NCBI NO: 7488653 NR Description: choline kinase (EC 2.7.1.32) CK2 - soybean
  misc_feature (18)..(342): Homolog of NCBI NO: 7488652 NR Description: choline kinase (EC 2.7.1.32) CK1 - soybean
  misc_feature (18)..(342): Homolog of NCBI NO: 12311795 NR Description: choline kinase [Pisum sativum]
  misc_feature (14)..(344): Homolog of NCBI NO: 33149685 NR Description: choline kinase [Oryza sativa (indica
  misc_feature (16)..(343): Homolog of NCBI NO: 15234032 NR Description: choline kinase GmCK2p -like protein; protein id: supported by cDNA: 126037., supported by cDNA: 7395. [Arabidopsis >gi|7484868|pir||T04023 choline kinase 2 homolog [Arabidopsis
  misc_feature (16)..(343): Homolog of NCBI NO: 21537276 NR Description: choline kinase GmCK2p-like protein [Arabidopsis
  misc_feature (16)..(342): Homolog of NCBI NO: 15217543 NR Description: choline kinase, putative; protein id: At1g71697.1
MGGTEKNVENKQYRLPREVKEALQAIASEWEDVIDSKALQVIPLKGAMTNEVFQIKWPTREKGPSRKVLVRIYGEGVEIFFDREDEIRTFEFMSKHGHGPLLLGRFGNGRIEEFLHARTLSACDLRDPEISGRIATRMKEFHGLEMPGAKKALLWDRLRNWLTACKRLASPEEAKSFRLDVMEMEINMLEKSLFDNDENIGFCHNDLQYGNIMMDEETKAITIIDYEYSCYNPVAYDIANHFCEMAADYHTETPHIMDYSKYPGVEERQRFLKTYMSYSDEKPSDTMVKKLLEDVEKYTLASHLIWGLWGIISEHVNEIDFDYMEYARQRFEQYWLTKPRLLAASEHK

SEQ ID NO: 89920 - protein, 301 aa, Arabidopsis thaliana
  peptide (1)..(301): Ceres Seq. ID no. 12721418
  misc_feature (17)..(289): Pfam Name: Choline/ethanolamine kinase Pfam Description: Choline/ethanolamine kinase
  misc_feature (1)..(301): Homolog of NCBI NO: 22330627 NR Description: putative choline kinase; protein id: At1g74320.1, by cDNA: gi_20453121 [Arabidopsis thaliana] At1g74320/F1O17_1 [Arabidopsis thaliana]
  misc_feature (1)..(301): Homolog of NCBI NO: 25348157 NR Description: protein choline kinase F1O17.1 [imported] -
  misc_feature (1)..(299): Homolog of NCBI NO: 7488654 NR Description: choline kinase (EC 2.7.1.32) CK3 - soybean
  misc_feature (1)..(301): Homolog of NCBI NO: 7488653 NR Description: choline kinase (EC 2.7.1.32) CK2 - soybean
  misc_feature (1)..(295): Homolog of NCBI NO: 7488652 NR Description: choline kinase (EC 2.7.1.32) CK1 - soybean
  misc_feature (1)..(295): Homolog of NCBI NO: 12311795 NR Description: choline kinase [Pisum sativum]
  misc_feature (1)..(297): Homolog of NCBI NO: 33149685 NR Description: choline kinase [Oryza sativa (indica
  misc_feature (1)..(296): Homolog of NCBI NO: 15234032 NR Description: choline kinase GmCK2p -like protein; protein id: supported by cDNA: 126037., supported by cDNA: 7395. [Arabidopsis >gi|7484868|pir||T04023 choline kinase 2 homolog [Arabidopsis
  misc_feature (1)..(296): Homolog of NCBI NO: 21537276 NR Description: choline kinase GmCK2p-like protein [Arabidopsis
  misc_feature (1)..(295): Homolog of NCBI NO: 15217543 NR Description: choline kinase, putative; protein id: At1g71697.1
MTNEVFQIKWPTREKGPSRKVLVRIYGEGVEIFFDREDEIRTFEFMSKHGHGPLLLGRFGNGRIEEFLHARTLSACDLRDPEISGRIATRMKEFHGLEMPGAKKALLWDRLRNWLTACKRLASPEEAKSFRLDVMEMEINMLEKSLFDNDENIGFCHNDLQYGNIMMDEETKAITIIDYEYSCYNPVAYDIANHFCEMAADYHTETPHIMDYSKYPGVEERQRFLKTYMSYSDEKPSDTMVKKLLEDVEKYTLASHLIWGLWGIISEHVNEIDFDYMEYARQRFEQYWLTKPRLLAASEHK

SEQ ID NO: 89921 - DNA, 2688 bp, Arabidopsis thaliana
  misc_feature (1)..(2688): Ceres Seq. ID no. 12721444
  misc_feature: MA Experiment ID: 20000173 Result: Down-regulated in Transcription
  misc_feature: MA Experiment 20000173 PARAMETER Experiment Name: At_42deg_Heat_P Parameter: Age (day) Value: 14
  misc_feature: MA Experiment 20000173 PARAMETER Experiment Name: At_42deg_Heat_P Parameter: Organism Value: A. thaliana
  misc_feature: MA Experiment 20000173 PARAMETER Experiment Name: At_42deg_Heat_P Parameter: Plant Line Value: WS
  misc_feature: MA Experiment 20000173 PARAMETER Experiment Name: At_42deg_Heat_P Parameter: Temperature (deg C) Value: 42 vs. 22
  misc_feature: MA Experiment 20000173 PARAMETER Experiment Name: At_42deg_Heat_P Parameter: Timepoint (hr) Value: 6
  misc_feature: MA Experiment 20000173 PARAMETER Experiment Name: At_42deg_Heat_P Parameter: Tissue Value: Aerial
atgaattgtctagcgaacgagagcttaaactccttgaagatctctcctttctctacctccagactactatcttccgttaccaatttccgaaaccagttatcattttccagcaaagattccagttcttcttcagctccttttaacccttttcgattcttcaatgatcaatcaaattcaaggctttgtaatctcagaacaacaaaaattctacaagcccatttgcttagacgatatcttctgccatttgatgttttccttactaaatcattgcttagctggtactcaaactcgggttccatggctgatgcagctaagttgttcgatacaattcctcaaccagatgttgtttcttgtaacattatgatctctggttataaacaacatcggttgtttgaagaatcgttgagatttttttctaagatgcatttcttgggttttgaggctaatgagataagttatgggtctgtgatttcggcttgtagtgctttacaagctcctctgtttagtgagctggtgtgttgtcatactataaagatgggttatttcttctatgaagttgttgaatcggctttgatagacgtattctctaagaatctaagatttgaggatgcttataaagtgttccgtgactctttatctgctaatgtgtattgttggaacactatcatagcaggggcacttagaaaccaaaattatggtgctgtttttgatcttttccatgaaatgtgtgttgggtttcagaaacctgatagttatacatattccagtgttttggctgcttgtgcttcccttgagaagcttaggtttggaaaagtggttcaagctcgggtgatcaaatgcggagcagaagatgtatttgtttgtactgcaattgttgacttatacgccaaatgtgggcatatggctgaagctatggaagtattctcccgtatccctaaccctagtgttgtatcttggacagtaatgctgtctggttacacaaagagtaatgatgctttctctgctcttgaaattttcaaggaaatgagacactcaggtgttgagatcaacaactgtaccgtaactagtgtaatctctgcttgtggtagaccttctatggtctgtgaagcaagccaggtccatgcttgggtctttaagagtggtttctatcttgattcctcagtggctgccgctttgattagtatgtactcaaagagtggagatattgatctttctgaacaggtttttgaggatctggacgatattcagagacaaaatatagttaatgtgatgatcacttcgttttcgcaaagtaagaagcctggtaaagcaataagactgtttactagaatgcttcaggagggtttgagaaccgatgagtttagtgtatgcagtttgttaagtgtattggattgtttgaatttaggtaagcaggttcacggttacacccttaaaagtgggttggttcttgatctcactgttggaagttctctttttacattgtactctaaatgtggtagtttggaagaatcatataaattattccaggggataccttttaaagacaatgcttgctgggcttccatgatttctggtttcaatgagtacggttatctaagagaagctattggactattcagcgagatgctggatgatgggactagccctgatgagagtactctagctgctgttctaactgtgtgttcttctcatccttctctgccaagaggtaaagaaatacatgggtatacgctaagagcgggaattgacaagggaatggatcttggttctgcactagtaaacatgtattcaaagtgtggctcactaaagttggctagacaggtctacgataggctccctgaactggatccagtgtcatgttcatctttaatttcgggatattcacaacacgggttaatccaggatggcttccttctatttcgtgatatggtcatgtctggttttactatggactcctttgcaatttcatccattcttaaagccgctgctctctctgacgaatcatcgctgggagctcaagttcacgcctacatcacaaaaattggattgtgcacagagccttctgtaggaagctcactactgacaatgtattcgaaatttggaagcattgacgactgctgtaaagcattcagccagatcaatggcccagatttaatagcgtggacagcgctgattgcaagttatgctcaacatggaaaggccaatgaagcgttacaagtgtacaatcttatgaaggaaaaaggattcaagcctgataaagtgacttttgtgggagtcttgtctgcttgtagtcatggtggtttggtcgaagaaagctatttccatctcaactcgatggtaaaagactatggtatcgaaccagagaaccgacattatgtctgcatggtcgatgctttagggaggtcaggaagacttagagaagctgagagttttatcaacaatatgcatattaaaccagacgccttggtctggggaacattgcttgctgcttgcaaaattcacggggaagttgaactcgggaaggtagctgcaaaaaaggctatagaattagagccatcagacgctggagcatatatttcactctcgaacatccttgcagaggttggtgagtgggacgaagtggaggaaactcgtaagctgatgaaaggaacaggtgtacagaaagaaccagggtggagttctgtctga

SEQ ID NO: 89922 - protein, 895 aa, Arabidopsis thaliana
  peptide (1)..(895): Ceres Seq. ID no. 12721445
  misc_feature (217)..(251): Pfam Name: PPR repeat Pfam Description: PPR repeat
  misc_feature (86)..(893): Homolog of NCBI NO: 15236324 NR Description: putative protein; protein id: At4g13650.1
  misc_feature (83)..(893): Homolog of NCBI NO: 34903762 NR Description: unnamed protein product [Oryza sativa (japonica group)] >gi|7340873|dbj|BAA92963.1| unnamed protein product
  misc_feature (323)..(893): Homolog of NCBI NO: 15234095 NR Description: putative protein; protein id: At4g33170.1
  misc_feature (13)..(227): Homolog of NCBI NO: 15234095 NR Description: putative protein; protein id: At4g33170.1
  misc_feature (187)..(893): Homolog of NCBI NO: 15235115 NR Description: putative protein; protein id: At4g39530.1
  misc_feature (198)..(893): Homolog of NCBI NO: 38423978 NR Description: PPR-repeat protein-like [Oryza sativa (japonica
  misc_feature (153)..(893): Homolog of NCBI NO: 38606535 NR Description: OSJNBa0016O02.23 [Oryza sativa (japonica
  misc_feature (189)..(893): Homolog of NCBI NO: 37536800 NR Description: putative PPR-repeat protein [Oryza sativa
  misc_feature (187)..(895): Homolog of NCBI NO: 34897084 NR Description: hypothetical protein [Oryza sativa (japonica group)] >gi|12957718|gb|AAK09236.1| hypothetical protein [Oryza
  misc_feature (191)..(893): Homolog of NCBI NO: 15232006 NR Description: hypothetical protein; protein id: At3g09040.1 thaliana] >gi|5923669|gb|AAD56320.1|AC009326_7 hypothetical
MNCLANESLNSLKISPFSTSRLLSSVTNFRNQLSFSSKDSSSSSAPFNPFRFFNDQSNSRLCNLRTTKILQAHLLRRYLLPFDVFLTKSLLSWYSNSGSMADAAKLFDTIPQPDVVSCNIMISGYKQHRLFEESLRFFSKMHFLGFEANEISYGSVISACSALQAPLFSELVCCHTIKMGYFFYEVVESALIDVFSKNLRFEDAYKVFRDSLSANVYCWNTIIAGALRNQNYGAVFDLFHEMCVGFQKPDSYTYSSVLAACASLEKLRFGKVVQARVIKCGAEDVFVCTAIVDLYAKCGHMAEAMEVFSRIPNPSVVSWTVMLSGYTKSNDAFSALEIFKEMRHSGVEINNCTVTSVISACGRPSMVCEASQVHAWVFKSGFYLDSSVAAALISMYSKSGDIDLSEQVFEDLDDIQRQNIVNVMITSFSQSKKPGKAIRLFTRMLQEGLRTDEFSVCSLLSVLDCLNLGKQVHGYTLKSGLVLDLTVGSSLFTLYSKCGSLEESYKLFQGIPFKDNACWASMISGFNEYGYLREAIGLFSEMLDDGTSPDESTLAAVLTVCSSHPSLPRGKEIHGYTLRAGIDKGMDLGSALVNMYSKCGSLKLARQVYDRLPELDPVSCSSLISGYSQHGLIQDGFLLFRDMVMSGFTMDSFAISSILKAAALSDESSLGAQVHAYITKIGLCTEPSVGSSLLTMYSKFGSIDDCCKAFSQINGPDLIAWTALIASYAQHGKANEALQVYNLMKEKGFKPDKVTFVGVLSACSHGGLVEESYFHLNSMVKDYGIEPENRHYVCMVDALGRSGRLREAESFINNMHIKPDALVWGTLLAACKIHGEVELGKVAAKKAIELEPSDAGAYISLSNILAEVGEWDEVEETRKLMKGTGVQKEPGWSSV

SEQ ID NO: 89923 - protein, 796 aa, Arabidopsis thaliana
  peptide (1)..(796): Ceres Seq. ID no. 12721446
  misc_feature (118)..(152): Pfam Name: PPR repeat Pfam Description: PPR repeat
  misc_feature (1)..(794): Homolog of NCBI NO: 15236324 NR Description: putative protein; protein id: At4g13650.1
  misc_feature (1)..(794): Homolog of NCBI NO: 34903762 NR Description: unnamed protein product [Oryza sativa (japonica group)] >gi|7340873|dbj|BAA92963.1| unnamed protein product
  misc_feature (224)..(794): Homolog of NCBI NO: 15234095 NR Description: putative protein; protein id: At4g33170.1
  misc_feature (1)..(128): Homolog of NCBI NO: 15234095 NR Description: putative protein; protein id: At4g33170.1
  misc_feature (88)..(794): Homolog of NCBI NO: 15235115 NR Description: putative protein; protein id: At4g39530.1
  misc_feature (99)..(794): Homolog of NCBI NO: 38423978 NR Description: PPR-repeat protein-like [Oryza sativa (japonica
  misc_feature (54)..(794): Homolog of NCBI NO: 38606535 NR Description: OSJNBa0016O02.23 [Oryza sativa (japonica
  misc_feature (90)..(794): Homolog of NCBI NO: 37536800 NR Description: putative PPR-repeat protein [Oryza sativa
  misc_feature (88)..(796): Homolog of NCBI NO: 34897084 NR Description: hypothetical protein [Oryza sativa (japonica group)] >gi|12957718|gb|AAK09236.1| hypothetical protein [Oryza
  misc_feature (92)..(794): Homolog of NCBI NO: 15232006 NR Description: hypothetical protein; protein id: At3g09040.1 thaliana] >gi|5923669|gb|AAD56320.1|AC009326_7 hypothetical
MADAAKLFDTIPQPDVVSCNIMISGYKQHRLFEESLRFFSKMHFLGFEANEISYGSVISACSALQAPLFSELVCCHTIKMGYFFYEVVESALIDVFSKNLRFEDAYKVFRDSLSANVYCWNTIIAGALRNQNYGAVFDLFHEMCVGFQKPDSYTYSSVLAACASLEKLRFGKVVQARVIKCGAEDVFVCTAIVDLYAKCGHMAEAMEVFSRIPNPSVVSWTVMLSGYTKSNDAFSALEIFKEMRHSGVEINNCTVTSVISACGRPSMVCEASQVHAWVFKSGFYLDSSVAAALISMYSKSGDIDLSEQVFEDLDDIQRQNIVNVMITSFSQSKKPGKAIRLFTRMLQEGLRTDEFSVCSLLSVLDCLNLGKQVHGYTLKSGLVLDLTVGSSLFTLYSKCGSLEESYKLFQGIPFKDNACWASMISGFNEYGYLREAIGLFSEMLDDGTSPDESTLAAVLTVCSSHPSLPRGKEIHGYTLRAGIDKGMDLGSALVNMYSKCGSLKLARQVYDRLPELDPVSCSSLISGYSQHGLIQDGFLLFRDMVMSGFTMDSFAISSILKAAALSDESSLGAQVHAYITKIGLCTEPSVGSSLLTMYSKFGSIDDCCKAFSQINGPDLIAWTALIASYAQHGKANEALQVYNLMKEKGFKPDKVTFVGVLSACSHGGLVEESYFHLNSMVKDYGIEPENRHYVCMVDALGRSGRLREAESFINNMHIKPDALVWGTLLAACKIHGEVELGKVAAKKAIELEPSDAGAYISLSNILAEVGEWDEVEETRKLMKGTGVQKEPGWSSV

SEQ ID NO: 89924 - protein, 775 aa, Arabidopsis thaliana
  peptide (1)..(775): Ceres Seq. ID no. 12721447
  misc_feature (97)..(131): Pfam Name: PPR repeat Pfam Description: PPR repeat
  misc_feature (1)..(773): Homolog of NCBI NO: 15236324 NR Description: putative protein; protein id: At4g13650.1
  misc_feature (1)..(773): Homolog of NCBI NO: 34903762 NR Description: unnamed protein product [Oryza sativa (japonica group)] >gi|7340873|dbj|BAA92963.1| unnamed protein product
  misc_feature (203)..(773): Homolog of NCBI NO: 15234095 NR Description: putative protein; protein id: At4g33170.1
  misc_feature (1)..(107): Homolog of NCBI NO: 15234095 NR Description: putative protein; protein id: At4g33170.1
  misc_feature (67)..(773): Homolog of NCBI NO: 15235115 NR Description: putative protein; protein id: At4g39530.1
  misc_feature (78)..(773): Homolog of NCBI NO: 38423978 NR Description: PPR-repeat protein-like [Oryza sativa (japonica
  misc_feature (33)..(773): Homolog of NCBI NO: 38606535 NR Description: OSJNBa0016O02.23 [Oryza sativa (japonica
  misc_feature (69)..(773): Homolog of NCBI NO: 37536800 NR Description: putative PPR-repeat protein [Oryza sativa
  misc_feature (67)..(775): Homolog of NCBI NO: 34897084 NR Description: hypothetical protein [Oryza sativa (japonica group)] >gi|12957718|gb|AAK09236.1| hypothetical protein [Oryza
  misc_feature (71)..(773): Homolog of NCBI NO: 15232006 NR Description: hypothetical protein; protein id: At3g09040.1 thaliana] >gi|5923669|gb|AAD56320.1|AC009326_7 hypothetical
MISGYKQHRLFEESLRFFSKMHFLGFEANEISYGSVISACSALQAPLFSELVCCHTIKMGYFFYEVVESALIDVFSKNLRFEDAYKVFRDSLSANVYCWNTIIAGALRNQNYGAVFDLFHEMCVGFQKPDSYTYSSVLAACASLEKLRFGKVVQARVIKCGAEDVFVCTAIVDLYAKCGHMAEAMEVFSRIPNPSVVSWTVMLSGYTKSNDAFSALEIFKEMRHSGVEINNCTVTSVISACGRPSMVCEASQVHAWVFKSGFYLDSSVAAALISMYSKSGDIDLSEQVFEDLDDIQRQNIVNVMITSFSQSKKPGKAIRLFTRMLQEGLRTDEFSVCSLLSVLDCLNLGKQVHGYTLKSGLVLDLTVGSSLFTLYSKCGSLEESYKLFQGIPFKDNACWASMISGFNEYGYLREAIGLFSEMLDDGTSPDESTLAAVLTVCSSHPSLPRGKEIHGYTLRAGIDKGMDLGSALVNMYSKCGSLKLARQVYDRLPELDPVSCSSLISGYSQHGLIQDGFLLFRDMVMSGFTMDSFAISSILKAAALSDESSLGAQVHAYITKIGLCTEPSVGSSLLTMYSKFGSIDDCCKAFSQINGPDLIAWTALIASYAQHGKANEALQVYNLMKEKGFKPDKVTFVGVLSACSHGGLVEESYFHLNSMVKDYGIEPENRHYVCMVDALGRSGRLREAESFINNMHIKPDALVWGTLLAACKIHGEVELGKVAAKKAIELEPSDAGAYISLSNILAEVGEWDEVEETRKLMKGTGVQKEPGWSSV

SEQ ID NO: 89925 - DNA, 1932 bp, Arabidopsis thaliana
  misc_feature (1)..(1932): Ceres Seq. ID no. 12721448
  misc_feature: MA Experiment ID: 20000307 Result: Up-regulated in Transcription
  misc_feature: MA Experiment 20000307 PARAMETER Experiment Name: At_Germinating_Seeds_Sub_P Parameter: Age (hr) Value: 24 vs. 0
  misc_feature: MA Experiment 20000307 PARAMETER Experiment Name: At_Germinating_Seeds_Sub_P Parameter: Organism Value: A. thaliana
  misc_feature: MA Experiment 20000307 PARAMETER Experiment Name: At_Germinating_Seeds_Sub_P Parameter: Plant Line Value: WS
  misc_feature: MA Experiment 20000307 PARAMETER Experiment Name: At_Germinating_Seeds_Sub_P Parameter: Tissue Value: Germinating Seeds
  misc_feature: MA Experiment ID: 20000315 Result: Up-regulated in Transcription
  misc_feature: MA Experiment 20000315 PARAMETER Experiment Name: At_14day_Shoots-Roots_Sub_P Parameter: Age (day) Value: 14
  misc_feature: MA Experiment 20000315 PARAMETER Experiment Name: At_14day_Shoots-Roots_Sub_P Parameter: Organism Value: A. thaliana
  misc_feature: MA Experiment 20000315 PARAMETER Experiment Name: At_14day_Shoots-Roots_Sub_P Parameter: Plant Line Value: WS
  misc_feature: MA Experiment 20000315 PARAMETER Experiment Name: At_14day_Shoots-Roots_Sub_P Parameter: Tissue Value: Shoots vs. Whole Plant
  misc_feature: MA Experiment ID: 20000327 Result: Up-regulated in Transcription
  misc_feature: MA Experiment 20000327 PARAMETER Experiment Name: At_42deg_Heat_Sub_P Parameter: Age (day) Value: 14
  misc_feature: MA Experiment 20000327 PARAMETER Experiment Name: At_42deg_Heat_Sub_P Parameter: Organism Value: A. thaliana
  misc_feature: MA Experiment 20000327 PARAMETER Experiment Name: At_42deg_Heat_Sub_P Parameter: Plant Line Value: WS
  misc_feature: MA Experiment 20000327 PARAMETER Experiment Name: At_42deg_Heat_Sub_P Parameter: Temperature (deg C) Value: 42 vs. 22
  misc_feature: MA Experiment 20000327 PARAMETER Experiment Name: At_42deg_Heat_Sub_P Parameter: Timepoint (hr) Value: 1
  misc_feature: MA Experiment 20000327 PARAMETER Experiment Name: At_42deg_Heat_Sub_P Parameter: Tissue Value: Aerial
  misc_feature: MA Experiment ID: 20000328 Result: Up-regulated in Transcription
  misc_feature: MA Experiment 20000328 PARAMETER Experiment Name: At_42deg_Heat_Sub_P Parameter: Age (day) Value: 14
  misc_feature: MA Experiment 20000328 PARAMETER Experiment Name: At_42deg_Heat_Sub_P Parameter: Organism Value: A. thaliana
  misc_feature: MA Experiment 20000328 PARAMETER Experiment Name: At_42deg_Heat_Sub_P Parameter: Plant Line Value: WS
  misc_feature: MA Experiment 20000328 PARAMETER Experiment Name: At_42deg_Heat_Sub_P Parameter: Temperature (deg C) Value: 42 vs. 22
  misc_feature: MA Experiment 20000328 PARAMETER Experiment Name: At_42deg_Heat_Sub_P Parameter: Timepoint (hr) Value: 6
  misc_feature: MA Experiment 20000328 PARAMETER Experiment Name: At_42deg_Heat_Sub_P Parameter: Tissue Value: Aerial
atgactatagcaattcaccattgtctctctctccttaatagctgcaagaacttaagagctttaacacaaatacatggcttgtttattaaatacggcgtcgacactgattcttacttcactggaaaacttatcctacattgtgcgatttctatatccgacgctttaccttacgctcgtcgtctcttgctctgttttcctgaacctgatgcgtttatgttcaacactctcgtccgaggctactctgaatccgatgagccgcacaattccgttgcggtgtttgttgaaatgatgaggaaaggtttcgtctttccggatagtttctccttcgcgtttgtcatcaaggcggtggagaatttccggtctttaagaactgggtttcagatgcattgtcaagctttaaagcatgggcttgagtcgcatttgtttgttggcactaccttgattggtatgtatgggggatgtgggtgtgttgagtttgctcgcaaggtgttcgatgaaatgcatcaaccgaatttggttgcttggaatgctgtgatcaccgcctgttttagggggaatgatgttgcgggagcgagggaaatcttcgataagatgctggtaaggaatcacacgtcgtggaacgtgatgcttgctgggtacattaaagctggggagcttgagagtgctaaacggatcttctcggaaatgcctcacagagatgatgtctcctggagtactatgattgttggtattgctcataatggaagtttcaatgagtctttcttgtacttcagggagttacaacgagcgggaatgagtccaaatgaggtaagtctgaccggagttctctctgcctgttcacaatctgggtcatttgagtttgggaagatattacacgggtttgtagagaaagcagggtatagttggatagtttcggtgaacaatgcgcttattgatatgtattctaggtgtggtaatgtcccaatggctaggttagtctttgaaggtatgcaagagaagaggtgtattgtatcttggacatcaatgatagcaggcttagctatgcatggtcaaggagaagaagctgttagactattcaatgaaatgaccgcgtatggtgttacaccagacgggatatctttcatttcacttttgcatgcttgcagtcatgctggactgattgaagaaggtgaagattacttttctgagatgaagagagtttaccacatcgaaccagaaattgaacactatggttgcatggttgatttatatggccgatctggaaaactgcaaaaggcttatgatttcatatgccaaatgccaattccgccaactgccatagtatggcggactcttctcggggcttgcagtagtcatgggaatatcgaattggcagagcaagtgaaacaaaggcttaatgagcttgacccaaataactcaggggatcttgtacttctgtcgaatgcttatgcaactgcaggtaaatggaaggatgttgcttctatcagaaagtcaatgattgtccagagaatcaagaagacaactgcttggagcttggttgaagttggcaaaaccatgtacaagttcactgcaggcgagaaaaagaagggaatcgatatagaggctcacgagaagctaaaagaaataatcttgaggcttaaagatgaagctggatataccccagaagtagcaagtgctttatatgatgtagaagaggaagaaaaggaggatcaagtgagtaaacacagtgagaagcttgcacttgcatttgctctagctagattgtccaaaggagcaaatatcaggatagtaaagaatctgagaatttgcagagattgtcacgctgttatgaagctaacgtcgaaggtttatggggtagaaatattggtccgagacagaaatcgctttcattcatttaaggacggttcttgctcatgccgtgactactggtaa

SEQ ID NO: 89926 - protein, 643 aa, Arabidopsis thaliana
  peptide (1)..(643): Ceres Seq. ID no. 12721449
  misc_feature (408)..(442): Pfam Name: PPR repeat Pfam Description: PPR repeat
  misc_feature (206)..(643): Homolog of NCBI NO: 15239745 NR Description: selenium-binding protein-like; protein id:
  misc_feature (12)..(233): Homolog of NCBI NO: 15239745 NR Description: selenium-binding protein-like; protein id:
  misc_feature (176)..(643): Homolog of NCBI NO: 9279687 NR Description: gb|AAC35225.1~gene_id:MWI23.6~strong similarity
  misc_feature (10)..(227): Homolog of NCBI NO: 9279687 NR Description: gb|AAC35225.1~gene_id:MWI23.6~strong similarity
  misc_feature (176)..(642): Homolog of NCBI NO: 15228829 NR Description: hypothetical protein; protein id: At3g22690.1
  misc_feature (10)..(227): Homolog of NCBI NO: 15228829 NR Description: hypothetical protein; protein id: At3g22690.1
  misc_feature (207)..(643): Homolog of NCBI NO: 8778758 NR Description: T30E16.32 [Arabidopsis thaliana]
  misc_feature (207)..(643): Homolog of NCBI NO: 15218900 NR Description: hypothetical protein; protein id: At1g59720.1
  misc_feature (2)..(198): Homolog of NCBI NO: 8778758 NR Description: T30E16.32 [Arabidopsis thaliana]
  misc_feature (2)..(198): Homolog of NCBI NO: 15218900 NR Description: hypothetical protein; protein id: At1g59720.1
MTIAIHHCLSLLNSCKNLRALTQIHGLFIKYGVDTDSYFTGKLILHCAISISDALPYARRLLLCFPEPDAFMFNTLVRGYSESDEPHNSVAVFVEMMRKGFVFPDSFSFAFVIKAVENFRSLRTGFQMHCQALKHGLESHLFVGTTLIGMYGGCGCVEFARKVFDEMHQPNLVAWNAVITACFRGNDVAGAREIFDKMLVRNHTSWNVMLAGYIKAGELESAKRIFSEMPHRDDVSWSTMIVGIAHNGSFNESFLYFRELQRAGMSPNEVSLTGVLSACSQSGSFEFGKILHGFVEKAGYSWIVSVNNALIDMYSRCGNVPMARLVFEGMQEKRCIVSWTSMIAGLAMHGQGEEAVRLFNEMTAYGVTPDGISFISLLHACSHAGLIEEGEDYFSEMKRVYHIEPEIEHYGCMVDLYGRSGKLQKAYDFICQMPIPPTAIVWRTLLGACSSHGNIELAEQVKQRLNELDPNNSGDLVLLSNAYATAGKWKDVASIRKSMIVQRIKKTTAWSLVEVGKTMYKFTAGEKKKGIDIEAHEKLKEIILRLKDEAGYTPEVASALYDVEEEEKEDQVSKHSEKLALAFALARLSKGANIRIVKNLRICRDCHAVMKLTSKVYGVEILVRDRNRFHSFKDGSCSCRDYW

SEQ ID NO: 89927 - protein, 572 aa, Arabidopsis thaliana
  peptide (1)..(572): Ceres Seq. ID no. 12721450
  misc_feature (337)..(371): Pfam Name: PPR repeat Pfam Description: PPR repeat
  misc_feature (135)..(572): Homolog of NCBI NO: 15239745 NR Description: selenium-binding protein-like; protein id:
  misc_feature (1)..(162): Homolog of NCBI NO: 15239745 NR Description: selenium-binding protein-like; protein id:
  misc_feature (105)..(572): Homolog of NCBI NO: 9279687 NR Description: gb|AAC35225.1~gene_id:MWI23.6~strong similarity
  misc_feature (1)..(156): Homolog of NCBI NO: 9279687 NR Description: gb|AAC35225.1~gene_id:MWI23.6~strong similarity
  misc_feature (105)..(571): Homolog of NCBI NO: 15228829 NR Description: hypothetical protein; protein id: At3g22690.1
  misc_feature (1)..(156): Homolog of NCBI NO: 15228829 NR Description: hypothetical protein; protein id: At3g22690.1
  misc_feature (136)..(572): Homolog of NCBI NO: 8778758 NR Description: T30E16.32 [Arabidopsis thaliana]
  misc_feature (136)..(572): Homolog of NCBI NO: 15218900 NR Description: hypothetical protein; protein id: At1g59720.1
  misc_feature (1)..(127): Homolog of NCBI NO: 8778758 NR Description: T30E16.32 [Arabidopsis thaliana]
  misc_feature (1)..(127): Homolog of NCBI NO: 15218900 NR Description: hypothetical protein; protein id: At1g59720.1
MFNTLVRGYSESDEPHNSVAVFVEMMRKGFVFPDSFSFAFVIKAVENFRSLRTGFQMHCQALKHGLESHLFVGTTLIGMYGGCGCVEFARKVFDEMHQPNLVAWNAVITACFRGNDVAGAREIFDKMLVRNHTSWNVMLAGYIKAGELESAKRIFSEMPHRDDVSWSTMIVGIAHNGSFNESFLYFRELQRAGMSPNEVSLTGVLSACSQSGSFEFGKILHGFVEKAGYSWIVSVNNALIDMYSRCGNVPMARLVFEGMQEKRCIVSWTSMIAGLAMHGQGEEAVRLFNEMTAYGVTPDGISFISLLHACSHAGLIEEGEDYFSEMKRVYHIEPEIEHYGCMVDLYGRSGKLQKAYDFICQMPIPPTAIVWRTLLGACSSHGNIELAEQVKQRLNELDPNNSGDLVLLSNAYATAGKWKDVASIRKSMIVQRIKKTTAWSLVEVGKTMYKFTAGEKKKGIDIEAHEKLKEIILRLKDEAGYTPEVASALYDVEEEEKEDQVSKHSEKLALAFALARLSKGANIRIVKNLRICRDCHAVMKLTSKVYGVEILVRDRNRFHSFKDGSCSCRDYW

SEQ ID NO: 89928 - protein, 548 aa, Arabidopsis thaliana
  peptide (1)..(548): Ceres Seq. ID no. 12721451
  misc_feature (313)..(347): Pfam Name: PPR repeat Pfam Description: PPR repeat
  misc_feature (111)..(548): Homolog of NCBI NO: 15239745 NR Description: selenium-binding protein-like; protein id:
  misc_feature (1)..(138): Homolog of NCBI NO: 15239745 NR Description: selenium-binding protein-like; protein id:
  misc_feature (81)..(548): Homolog of NCBI NO: 9279687 NR Description: gb|AAC35225.1~gene_id:MWI23.6~strong similarity
  misc_feature (1)..(132): Homolog of NCBI NO: 9279687 NR Description: gb|AAC35225.1~gene_id:MWI23.6~strong similarity
  misc_feature (81)..(547): Homolog of NCBI NO: 15228829 NR Description: hypothetical protein; protein id: At3g22690.1
  misc_feature (1)..(132): Homolog of NCBI NO: 15228829 NR Description: hypothetical protein; protein id: At3g22690.1
  misc_feature (112)..(548): Homolog of NCBI NO: 8778758 NR Description: T30E16.32 [Arabidopsis thaliana]
  misc_feature (112)..(548): Homolog of NCBI NO: 15218900 NR Description: hypothetical protein; protein id: At1g59720.1
  misc_feature (1)..(103): Homolog of NCBI NO: 8778758 NR Description: T30E16.32 [Arabidopsis thaliana]
  misc_feature (1)..(103): Homolog of NCBI NO: 15218900 NR Description: hypothetical protein; protein id: At1g59720.1
MMRKGFVFPDSFSFAFVIKAVENFRSLRTGFQMHCQALKHGLESHLFVGTTLIGMYGGCGCVEFARKVFDEMHQPNLVAWNAVITACFRGNDVAGAREIFDKMLVRNHTSWNVMLAGYIKAGELESAKRIFSEMPHRDDVSWSTMIVGIAHNGSFNESFLYFRELQRAGMSPNEVSLTGVLSACSQSGSFEFGKILHGFVEKAGYSWIVSVNNALIDMYSRCGNVPMARLVFEGMQEKRCIVSWTSMIAGLAMHGQGEEAVRLFNEMTAYGVTPDGISFISLLHACSHAGLIEEGEDYFSEMKRVYHIEPEIEHYGCMVDLYGRSGKLQKAYDFICQMPIPPTAIVWRTLLGACSSHGNIELAEQVKQRLNELDPNNSGDLVLLSNAYATAGKWKDVASIRKSMIVQRIKKTTAWSLVEVGKTMYKFTAGEKKKGIDIEAHEKLKEIILRLKDEAGYTPEVASALYDVEEEEKEDQVSKHSEKLALAFALARLSKGANIRIVKNLRICRDCHAVMKLTSKVYGVEILVRDRNRFHSFKDGSCSCRDYW

SEQ ID NO: 89929 - DNA, 768 bp, Arabidopsis thaliana
  misc_feature (1)..(768): Ceres Seq. ID no. 12721472
  misc_feature: MA Experiment ID: 20000314 Result: Up-regulated in Transcription
  misc_feature: MA Experiment 20000314 PARAMETER Experiment Name: At_14day_Shoots-Roots_Sub_P Parameter: Age (day) Value: 14
  misc_feature: MA Experiment 20000314 PARAMETER Experiment Name: At_14day_Shoots-Roots_Sub_P Parameter: Organism Value: A. thaliana
  misc_feature: MA Experiment 20000314 PARAMETER Experiment Name: At_14day_Shoots-Roots_Sub_P Parameter: Plant Line Value: WS
  misc_feature: MA Experiment 20000314 PARAMETER Experiment Name: At_14day_Shoots-Roots_Sub_P Parameter: Tissue Value: Roots vs. Whole Plant
  misc_feature: MA Experiment ID: 20000347 Result: Up-regulated in Transcription
  misc_feature: MA Experiment 20000347 PARAMETER Experiment Name: At_2mM_SA_Sub_P Parameter: Age (day) Value: 14
  misc_feature: MA Experiment 20000347 PARAMETER Experiment Name: At_2mM_SA_Sub_P Parameter: Organism Value: A. thaliana
  misc_feature: MA Experiment 20000347 PARAMETER Experiment Name: At_2mM_SA_Sub_P Parameter: Plant Line Value: WS
  misc_feature: MA Experiment 20000347 PARAMETER Experiment Name: At_2mM_SA_Sub_P Parameter: Timepoint (hr) Value: 6
  misc_feature: MA Experiment 20000347 PARAMETER Experiment Name: At_2mM_SA_Sub_P Parameter: Tissue Value: Aerial
  misc_feature: MA Experiment 20000347 PARAMETER Experiment Name: At_2mM_SA_Sub_P Parameter: Treatment Value: 2mM SA vs. No Treatment
atggaaacagttcatggtcaacatccatcatatcgagatcctcacagtttgatctttggttgcaatcactacaagagaaattgtaaacttcttgctccttgttgtgacaagctcttcacatgtatacgatgccatgatgaagaagctgatcactcggtggataggaaacagattacaaagatgatgtgcatgaaatgcctcttgattcaaccgattggtgcaaattgctcaaatacttcgtgcaagtcgtcaatgggaaaatacttctgcaaaatatgcaaattatatgacgatgaaaggaaaatttatcactgtccttactgcaacctctgtcgagtagggaaaggattgggtattgactacttccactgcatgaaatgcaatgcttgtatgtcacgtaccttagtagagcatgtttgcagggaaaagtgcttagaagataattgtccgatttgccatgagtatatcttcacctccagctccccagtgaaggctcttccttgtggtcacttgatgcactccacatgctttcaggagtacacatgttcacattacacatgccctgtctgcagcaagtcgcttggagatatgcaggtctactttaagatgttagacgcattgcttgcagaagagaagatgcctgatgaatactccaacaaaactcaggtgatcttgtgtaatgattgtggaagaaaaggaaatgctccttaccattggctttaccacaaatgcacaacctgtggctcctacaactcaaggctcctttag

SEQ ID NO: 89930 - protein, 255 aa, Arabidopsis thaliana
  peptide (1)..(255): Ceres Seq. ID no. 12721473
  misc_feature (21)..(97): Pfam Name: CHY zinc finger Pfam Description: CHY zinc finger
  misc_feature (1)..(255): Homolog of NCBI NO: 15221379 NR Description: hypothetical protein; protein id: At1g74760.1
  misc_feature (2)..(254): Homolog of NCBI NO: 25402866 NR Description: protein F14D16.3 [imported] - Arabidopsis >gi|8778297|gb|AAF79306.1|AC068602_29 F14D16.3 [Arabidopsis
  misc_feature (61)..(254): Homolog of NCBI NO: 15221895 NR Description: hypothetical protein; protein id: At1g18910.1
  misc_feature (4)..(255): Homolog of NCBI NO: 34911328 NR Description: putative zinc finger protein [Oryza sativa
  misc_feature (6)..(255): Homolog of NCBI NO: 9279663 NR Description: gb|AAD55299.1~gene_id:MIE15.8~similar to unknown
  misc_feature (6)..(255): Homolog of NCBI NO: 15229615 NR Description: zinc finger protein, putative; protein id: supported by cDNA: gi_20453198 [Arabidopsis thaliana] AT3g18290/MIE15_8 [Arabidopsis thaliana]
  misc_feature (3)..(255): Homolog of NCBI NO: 22347790 NR Description: putative zinc finger protein [Zea mays]
  misc_feature (9)..(197): Homolog of NCBI NO: 29367543 NR Description: putative zinc finger protein [Oryza sativa
  misc_feature (17)..(252): Homolog of NCBI NO: 32413120 NR Description: hypothetical protein [Neurospora crassa] conserved hypothetical protein [Neurospora crassa]
  misc_feature (19)..(253): Homolog of NCBI NO: 15237169 NR Description: PGPD14 protein; protein id: At5g22920.1, by cDNA: 41666., supported by cDNA: gi_15450520 [Arabidopsis >gi|10177239|dbj|BAB10613.1| PGPD14 protein [Arabidopsis
METVHGQHPSYRDPHSLIFGCNHYKRNCKLLAPCCDKLFTCIRCHDEEADHSVDRKQITKMMCMKCLLIQPIGANCSNTSCKSSMGKYFCKICKLYDDERKIYHCPYCNLCRVGKGLGIDYFHCMKCNACMSRTLVEHVCREKCLEDNCPICHEYIFTSSSPVKALPCGHLMHSTCFQEYTCSHYTCPVCSKSLGDMQVYFKMLDALLAEEKMPDEYSNKTQVILCNDCGRKGNAPYHWLYHKCTTCGSYNSRLL

SEQ ID NO: 89931 - protein, 195 aa, Arabidopsis thaliana
  peptide (1)..(195): Ceres Seq. ID no. 12721474
  misc_feature (89)..(130): Pfam Name: Zinc finger, C3HC4 type (RING finger) Pfam Description: Zinc finger, C3HC4 type (RING finger)
  misc_feature (1)..(195): Homolog of NCBI NO: 15221379 NR Description: hypothetical protein; protein id: At1g74760.1
  misc_feature (1)..(194): Homolog of NCBI NO: 25402866 NR Description: protein F14D16.3 [imported] - Arabidopsis >gi|8778297|gb|AAF79306.1|AC068602_29 F14D16.3 [Arabidopsis
  misc_feature (1)..(194): Homolog of NCBI NO: 15221895 NR Description: hypothetical protein; protein id: At1g18910.1
  misc_feature (1)..(195): Homolog of NCBI NO: 34911328 NR Description: putative zinc finger protein [Oryza sativa
  misc_feature (1)..(195): Homolog of NCBI NO: 9279663 NR Description: gb|AAD55299.1~gene_id:MIE15.8~similar to unknown
  misc_feature (1)..(195): Homolog of NCBI NO: 15229615 NR Description: zinc finger protein, putative; protein id: supported by cDNA: gi_20453198 [Arabidopsis thaliana] AT3g18290/MIE15_8 [Arabidopsis thaliana]
  misc_feature (1)..(195): Homolog of NCBI NO: 22347790 NR Description: putative zinc finger protein [Zea mays]
  misc_feature (1)..(137): Homolog of NCBI NO: 29367543 NR Description: putative zinc finger protein [Oryza sativa
  misc_feature (1)..(192): Homolog of NCBI NO: 32413120 NR Description: hypothetical protein [Neurospora crassa] conserved hypothetical protein [Neurospora crassa]
  misc_feature (1)..(193): Homolog of NCBI NO: 15237169 NR Description: PGPD14 protein; protein id: At5g22920.1, by cDNA: 41666., supported by cDNA: gi_15450520 [Arabidopsis >gi|10177239|dbj|BAB10613.1| PGPD14 protein [Arabidopsis
MMCMKCLLIQPIGANCSNTSCKSSMGKYFCKICKLYDDERKIYHCPYCNLCRVGKGLGIDYFHCMKCNACMSRTLVEHVCREKCLEDNCPICHEYIFTSSSPVKALPCGHLMHSTCFQEYTCSHYTCPVCSKSLGDMQVYFKMLDALLAEEKMPDEYSNKTQVILCNDCGRKGNAPYHWLYHKCTTCGSYNSRLL

SEQ ID NO: 89932 - protein, 194 aa, Arabidopsis thaliana
  peptide (1)..(194): Ceres Seq. ID no. 12721475
  misc_feature (88)..(129): Pfam Name: Zinc finger, C3HC4 type (RING finger) Pfam Description: Zinc finger, C3HC4 type (RING finger)
  misc_feature (1)..(194): Homolog of NCBI NO: 15221379 NR Description: hypothetical protein; protein id: At1g74760.1
  misc_feature (1)..(193): Homolog of NCBI NO: 25402866 NR Description: protein F14D16.3 [imported] - Arabidopsis >gi|8778297|gb|AAF79306.1|AC068602_29 F14D16.3 [Arabidopsis
  misc_feature (1)..(193): Homolog of NCBI NO: 15221895 NR Description: hypothetical protein; protein id: At1g18910.1
  misc_feature (1)..(194): Homolog of NCBI NO: 34911328 NR Description: putative zinc finger protein [Oryza sativa
  misc_feature (1)..(194): Homolog of NCBI NO: 9279663 NR Description: gb|AAD55299.1~gene_id:MIE15.8~similar to unknown
  misc_feature (1)..(194): Homolog of NCBI NO: 15229615 NR Description: zinc finger protein, putative; protein id: supported by cDNA: gi_20453198 [Arabidopsis thaliana] AT3g18290/MIE15_8 [Arabidopsis thaliana]
  misc_feature (1)..(194): Homolog of NCBI NO: 22347790 NR Description: putative zinc finger protein [Zea mays]
  misc_feature (1)..(136): Homolog of NCBI NO: 29367543 NR Description: putative zinc finger protein [Oryza sativa
  misc_feature (1)..(191): Homolog of NCBI NO: 32413120 NR Description: hypothetical protein [Neurospora crassa] conserved hypothetical protein [Neurospora crassa]
  misc_feature (1)..(192): Homolog of NCBI NO: 15237169 NR Description: PGPD14 protein; protein id: At5g22920.1, by cDNA: 41666., supported by cDNA: gi_15450520 [Arabidopsis >gi|10177239|dbj|BAB10613.1| PGPD14 protein [Arabidopsis
MCMKCLLIQPIGANCSNTSCKSSMGKYFCKICKLYDDERKIYHCPYCNLCRVGKGLGIDYFHCMKCNACMSRTLVEHVCREKCLEDNCPICHEYIFTSSSPVKALPCGHLMHSTCFQEYTCSHYTCPVCSKSLGDMQVYFKMLDALLAEEKMPDEYSNKTQVILCNDCGRKGNAPYHWLYHKCTTCGSYNSRLL

SEQ ID NO: 89933 - DNA, 684 bp, Arabidopsis thaliana
  misc_feature (1)..(684): Ceres Seq. ID no. 12721488
  misc_feature: MA Experiment ID: 20001909 Result: Up-regulated in Transcription
  misc_feature: MA Experiment 20001909 PARAMETER Experiment Name: At_Drought_Reproduction_P Parameter: Age (day) Value: 35
  misc_feature: MA Experiment 20001909 PARAMETER Experiment Name: At_Drought_Reproduction_P Parameter: Organism Value: A. thaliana
  misc_feature: MA Experiment 20001909 PARAMETER Experiment Name: At_Drought_Reproduction_P Parameter: Plant Line Value: WS
  misc_feature: MA Experiment 20001909 PARAMETER Experiment Name: At_Drought_Reproduction_P Parameter: Timepoint (day) Value: 5
  misc_feature: MA Experiment 20001909 PARAMETER Experiment Name: At_Drought_Reproduction_P Parameter: Tissue Value: Flowers
  misc_feature: MA Experiment 20001909 PARAMETER Experiment Name: At_Drought_Reproduction_P Parameter: Treatment Value: Drought vs. No Drought
atggctcatatttcacaaatctcttcttttctctcaatagttttaatcttcctcgcattatgcatcactctcttcacgaaccctactctctcactcccagccctaaaacttaaccctttccaagacttttgtgtagctgatctccaagctaccccaactaacagtggttacccttgcaagtcacaagtcacctctgaagacttcttttattccggcttgaacactcctttaaacacctcgaacccaaaaggtattgccgctaatccagccaatctcttgacctttccaggcctaaacactttgggaatatccatgtataacgttgcaattgcacctggaggatacaaccaacctcactctcaccccggtgtaaccgaggcaggggtcgtgatcgaaggctcggtcttggttgggttcttaacgactaactacacgttgtactcgaaggttattggacccggtgatatgtttgtgattcctccgggactcattcattacgaggggaacgttgggaaaacgcaatgccgtcttttgacggtggttgctgacgacttgcctagcgaggttggtgtgcctcacactctgttggctacgaaacccgcgattccaaacgaggtattgatatcggcgtttaaggcggatagtaaaacaatcaacatgctcaggtcaaagtttactgcttaa

SEQ ID NO: 89934 - protein, 227 aa, Arabidopsis thaliana
  peptide (1)..(227): Ceres Seq. ID no. 12721489
  misc_feature (71)..(219): Pfam Name: Cupin Pfam Description: Cupin
  misc_feature (1)..(227): Homolog of NCBI NO: 15221388 NR Description: germin subunit, putative; protein id: At1g74820.1
  misc_feature (6)..(225): Homolog of NCBI NO: 15221902 NR Description: germin, putative; protein id: At1g18980.1,
  misc_feature (12)..(225): Homolog of NCBI NO: 18202452 NR Description: Germin-like protein subfamily T member 1 >gi|8778295|gb|AAF79304.1|AC068602_27 F14D16.12 [Arabidopsis
  misc_feature (24)..(225): Homolog of NCBI NO: 18394676 NR Description: germin, putative; protein id: At1g18970.1,
  misc_feature (38)..(225): Homolog of NCBI NO: 25044823 NR Description: germin-like protein [Ananas comosus]
  misc_feature (30)..(225): Homolog of NCBI NO: 34902528 NR Description: probable germin protein 4 [Oryza sativa (japonica
  misc_feature (39)..(225): Homolog of NCBI NO: 7447330 NR Description: probable oxalate oxidase (EC 1.2.3.4) - rice
  misc_feature (33)..(226): Homolog of NCBI NO: 28273400 NR Description: putative oxalate oxidase [Oryza sativa (japonica
  misc_feature (9)..(226): Homolog of NCBI NO: 28273416 NR Description: putative oxalate oxidase [Oryza sativa (japonica
  misc_feature (10)..(226): Homolog of NCBI NO: 28273419 NR Description: putative oxalate oxidase [Oryza sativa (japonica
MAHISQISSFLSIVLIFLALCITLFTNPTLSLPALKLNPFQDFCVADLQATPTNSGYPCKSQVTSEDFFYSGLNTPLNTSNPKGIAANPANLLTFPGLNTLGISMYNVAIAPGGYNQPHSHPGVTEAGVVIEGSVLVGFLTTNYTLYSKVIGPGDMFVIPPGLIHYEGNVGKTQCRLLTVVADDLPSEVGVPHTLLATKPAIPNEVLISAFKADSKTINMLRSKFTA

SEQ ID NO: 89935 - protein, 123 aa, Arabidopsis thaliana
  peptide (1)..(123): Ceres Seq. ID no. 12721490
  misc_feature (1)..(115): Pfam Name: Cupin Pfam Description: Cupin
  misc_feature (1)..(123): Homolog of NCBI NO: 15221388 NR Description: germin subunit, putative; protein id: At1g74820.1
  misc_feature (1)..(121): Homolog of NCBI NO: 15221902 NR Description: germin, putative; protein id: At1g18980.1,
  misc_feature (1)..(121): Homolog of NCBI NO: 18202452 NR Description: Germin-like protein subfamily T member 1 >gi|8778295|gb|AAF79304.1|AC068602_27 F14D16.12 [Arabidopsis
  misc_feature (1)..(121): Homolog of NCBI NO: 18394676 NR Description: germin, putative; protein id: At1g18970.1,
  misc_feature (1)..(121): Homolog of NCBI NO: 25044823 NR Description: germin-like protein [Ananas comosus]
  misc_feature (1)..(121): Homolog of NCBI NO: 34902528 NR Description: probable germin protein 4 [Oryza sativa (japonica
  misc_feature (1)..(121): Homolog of NCBI NO: 7447330 NR Description: probable oxalate oxidase (EC 1.2.3.4) - rice
  misc_feature (1)..(122): Homolog of NCBI NO: 28273400 NR Description: putative oxalate oxidase [Oryza sativa (japonica
  misc_feature (1)..(122): Homolog of NCBI NO: 28273416 NR Description: putative oxalate oxidase [Oryza sativa (japonica
  misc_feature (1)..(122): Homolog of NCBI NO: 28273419 NR Description: putative oxalate oxidase [Oryza sativa (japonica
MYNVAIAPGGYNQPHSHPGVTEAGVVIEGSVLVGFLTTNYTLYSKVIGPGDMFVIPPGLIHYEGNVGKTQCRLLTVVADDLPSEVGVPHTLLATKPAIPNEVLISAFKADSKTINMLRSKFTA

SEQ ID NO: 89936 - DNA, 2589 bp, Arabidopsis thaliana
  misc_feature (1)..(2589): Ceres Seq. ID no. 12721495
  misc_feature: MA Experiment ID: 20000171 Result: Down-regulated in Transcription
  misc_feature: MA Experiment 20000171 PARAMETER Experiment Name: At_42deg_Heat_P Parameter: Age (day) Value: 14
  misc_feature: MA Experiment 20000171 PARAMETER Experiment Name: At_42deg_Heat_P Parameter: Organism Value: A. thaliana
  misc_feature: MA Experiment 20000171 PARAMETER Experiment Name: At_42deg_Heat_P Parameter: Plant Line Value: WS
  misc_feature: MA Experiment 20000171 PARAMETER Experiment Name: At_42deg_Heat_P Parameter: Temperature (deg C) Value: 42 vs. 22
  misc_feature: MA Experiment 20000171 PARAMETER Experiment Name: At_42deg_Heat_P Parameter: Timepoint (hr) Value: 1
  misc_feature: MA Experiment 20000171 PARAMETER Experiment Name: At_42deg_Heat_P Parameter: Tissue Value: Aerial
  misc_feature: MA Experiment ID: 20000173 Result: Down-regulated in Transcription
  misc_feature: MA Experiment 20000173 PARAMETER Experiment Name: At_42deg_Heat_P Parameter: Age (day) Value: 14
  misc_feature: MA Experiment 20000173 PARAMETER Experiment Name: At_42deg_Heat_P Parameter: Organism Value: A. thaliana
  misc_feature: MA Experiment 20000173 PARAMETER Experiment Name: At_42deg_Heat_P Parameter: Plant Line Value: WS
  misc_feature: MA Experiment 20000173 PARAMETER Experiment Name: At_42deg_Heat_P Parameter: Temperature (deg C) Value: 42 vs. 22
  misc_feature: MA Experiment 20000173 PARAMETER Experiment Name: At_42deg_Heat_P Parameter: Timepoint (hr) Value: 6
  misc_feature: MA Experiment 20000173 PARAMETER Experiment Name: At_42deg_Heat_P Parameter: Tissue Value: Aerial
  misc_feature: MA Experiment ID: 20000495 Result: Down-regulated in Transcription
  misc_feature: MA Experiment 20000495 PARAMETER Experiment Name: At_Guard_Cells_P Parameter: Harvest Date Value: 8/2/2002
  misc_feature: MA Experiment 20000495 PARAMETER Experiment Name: At_Guard_Cells_P Parameter: Organism Value: A. thaliana
  misc_feature: MA Experiment 20000495 PARAMETER Experiment Name: At_Guard_Cells_P Parameter: Tissue Value: Guard Cells vs. Leaves
  misc_feature: MA Experiment ID: 20001451 Result: Down-regulated in Transcription
  misc_feature: MA Experiment 20001451 PARAMETER Experiment Name: At_Far-red-induction_P Parameter: Age (day) Value: 7
  misc_feature: MA Experiment 20001451 PARAMETER Experiment Name: At_Far-red-induction_P Parameter: Light Value: Far-red vs. White
  misc_feature: MA Experiment 20001451 PARAMETER Experiment Name: At_Far-red-induction_P Parameter: Organism Value: A. thaliana
  misc_feature: MA Experiment 20001451 PARAMETER Experiment Name: At_Far-red-induction_P Parameter: Plant Line Value: Columbia
  misc_feature: MA Experiment 20001451 PARAMETER Experiment Name: At_Far-red-induction_P Parameter: Timepoint (hr) Value: 24
  misc_feature: MA Experiment 20001451 PARAMETER Experiment Name: At_Far-red-induction_P Parameter: Tissue Value: Whole Plant
  misc_feature: MA Experiment ID: 20001757 Result: Up-regulated in Transcription
  misc_feature: MA Experiment 20001757 PARAMETER Experiment Name: At_50mM_NH4NO3_L-to-H_P Parameter: Timepoint (hr) Value: 6
  misc_feature: MA Experiment 20001757 PARAMETER Experiment Name: At_50mM_NH4NO3_L-to-H_P Parameter: Tissue Value: Leaf
  misc_feature: MA Experiment 20001757 PARAMETER Experiment Name: At_50mM_NH4NO3_L-to-H_P Parameter: Treatment Value: 50mM NH4NO3 vs 100mM Mannitol
atgaacctagcaattccaaatcccaactcacaccacctctccttcctcatccagaattcaagcttcatcggaaaccggagattcgccgacggcaaccgtctccgtttcctctcaggaggaaatcgtaaaccatgctccttctccggtaaaatcaaagcaaagactaaagatctcgttctcgggaacccctccgtctccgtggagaaaggaaagtacagctacgacgtcgaatcgctgattaacaagctgagcagtctcccaccacgcgggagcatcgccaggtgcttagacatattcaaaaacaagctttcgttgaacgatttcgcactcgtgttcaaagagttcgctggtcgcggcgattggcaaaggtcgcttcgtctcttcaagtatatgcaacggcagatatggtgcaaacctaacgagcatatctacactattatgatctctttgcttggtagagaaggtctactagataaatgtcttgaggtattcgacgaaatgcctagccaaggtgtgtcccgcagcgttttctcttacactgctttgatcaatgcttatggtcgaaatggacggtatgagacttctcttgagcttcttgataggatgaagaatgaaaagatatcacctagtattttgacttacaacactgtgattaatgcttgtgctagaggtggtttagattgggagggtttattgggtttgtttgcagagatgagacatgaggggatacaacctgatatcgtgacttataatacactgcttagtgcttgtgctattagaggtttaggtgatgaggctgaaatggtttttaggactatgaatgatggtgggattgttccggatttaaccacatatagtcatctagttgagacatttgggaagttacgccggctggagaaagtatgtgatcttttaggcgagatggcctccggcggtagtttgccggatatcacttcttataatgtgttgttagaggcatatgcgaaatccgggtctattaaggaggcaatgggggtcttccatcagatgcaagctgcagggtgtacgccgaacgcaaatacatacagtgttttgctgaatttgtttggacagagtgggaggtatgatgatgtgaggcagctttttcttgagatgaaatcaagcaatacggatcctgatgctgctacatataacattttgattgaggtttttggggaaggggggtattttaaggaggtggtaactttgttccatgatatggtggaggagaatattgaaccggacatggagacatatgagggtataatatttgcttgtgggaaggggggacttcacgaagatgctaggaagatcttacaatatatgacagctaacgatatcgtgccaagttccaaggcgtacactggggttattgaagcgtttgggcaggctgctttatatgaagaagcgcttgttgctttcaacaccatgcatgaagtaggaagcaatccaagtattgaaacattccactcactgttatattcgtttgcaaggggaggactggtcaaggagtctgaggcgattttgtccaggttggtggattctggtattcccaggaacagagatacgttcaatgcacagatagaagcgtacaagcaaggaggcaaatttgaagaggctgtgaagacatatgtagatatggagaagtcaagatgcgatcctgatgaaaggacgcttgaggctgttttaagtgtgtattcttttgcgcggcttgttgatgagtgcagagagcagtttgaggagatgaaagcttctgatatactgcccagtatcatgtgctactgtatgatgctagctgtttatgggaagacggagaggtgggacgatgtcaatgagttattggaggagatgctttcaaatagagtatcaaatattcatcaagttattgggcaaatgatcaagggagattatgatgatgactcaaattggcagatagtggaatacgtgttggacaaactcaattcagaaggatgtggtttgggaataaggttttacaatgcacttctggatgctttgtggtggctgggccagaaagagcgagctgcaagagtactcaatgaggcaacaaagcgtggacttttccctgagttattccggaaaaacaaacttgtgtggtctgtcgatgtacataggatgtcagagggtggcatgtatacagcactatcggtttggctaaatgatataaatgatatgcttttaaagggagatcttcctcaactagctgttgttgtttcagtacggggacagttggagaaaagctctgctgcaagagaatctcctatcgcgaaagctgctttctccttcttgcaggatcatgtctcgtcctcattttccttcacgggatggaatggaggtcgcattatgtgccagcgatctcagctcaagcagttactgtcaacgaaagagccaacttcagaagaatccgaaaataaaaacctagtggcattagcaaactcgccaatatttgcggctggaacaagagcttcaacaagcagtgacacgaaccacagcggtaaccctacacaacgaagaaccaggacgaaaaaagaactagcagggagcacagcttaa

SEQ ID NO: 89937 - protein, 862 aa, Arabidopsis thaliana
  peptide (1)..(862): Ceres Seq. ID no. 12721496
  misc_feature (212)..(247): Pfam Name: PPR repeat Pfam Description: PPR repeat
  misc_feature (64)..(856): Homolog of NCBI NO: 34897386 NR Description: putative chloroplast RNA processing protein
  misc_feature (92)..(720): Homolog of NCBI NO: 15242557 NR Description: putative protein; protein id: At5g02860.1
  misc_feature (79)..(710): Homolog of NCBI NO: 15224262 NR Description: putative salt-inducible protein; protein id: supported by cDNA: gi_15983784 [Arabidopsis thaliana]
  misc_feature (99)..(637): Homolog of NCBI NO: 15224671 NR Description: unknown protein; protein id: At2g31400.1
  misc_feature (583)..(792): Homolog of NCBI NO: 15224671 NR Description: unknown protein; protein id: At2g31400.1
  misc_feature (148)..(720): Homolog of NCBI NO: 34393454 NR Description: putative pentatricopeptide (PPR)
  misc_feature (142)..(280): Homolog of NCBI NO: 15724390 NR Description: putative salt-inducible protein [Brassica nigra]
  misc_feature (79)..(628): Homolog of NCBI NO: 30688770 NR Description: pentatricopeptide (PPR) repeat-containing protein
  misc_feature (79)..(628): Homolog of NCBI NO: 30688764 NR Description: pentatricopeptide (PPR) repeat-containing protein
  misc_feature (121)..(641): Homolog of NCBI NO: 34393454 NR Description: putative pentatricopeptide (PPR)
MNLAIPNPNSHHLSFLIQNSSFIGNRRFADGNRLRFLSGGNRKPCSFSGKIKAKTKDLVLGNPSVSVEKGKYSYDVESLINKLSSLPPRGSIARCLDIFKNKLSLNDFALVFKEFAGRGDWQRSLRLFKYMQRQIWCKPNEHIYTIMISLLGREGLLDKCLEVFDEMPSQGVSRSVFSYTALINAYGRNGRYETSLELLDRMKNEKISPSILTYNTVINACARGGLDWEGLLGLFAEMRHEGIQPDIVTYNTLLSACAIRGLGDEAEMVFRTMNDGGIVPDLTTYSHLVETFGKLRRLEKVCDLLGEMASGGSLPDITSYNVLLEAYAKSGSIKEAMGVFHQMQAAGCTPNANTYSVLLNLFGQSGRYDDVRQLFLEMKSSNTDPDAATYNILIEVFGEGGYFKEVVTLFHDMVEENIEPDMETYEGIIFACGKGGLHEDARKILQYMTANDIVPSSKAYTGVIEAFGQAALYEEALVAFNTMHEVGSNPSIETFHSLLYSFARGGLVKESEAILSRLVDSGIPRNRDTFNAQIEAYKQGGKFEEAVKTYVDMEKSRCDPDERTLEAVLSVYSFARLVDECREQFEEMKASDILPSIMCYCMMLAVYGKTERWDDVNELLEEMLSNRVSNIHQVIGQMIKGDYDDDSNWQIVEYVLDKLNSEGCGLGIRFYNALLDALWWLGQKERAARVLNEATKRGLFPELFRKNKLVWSVDVHRMSEGGMYTALSVWLNDINDMLLKGDLPQLAVVVSVRGQLEKSSAARESPIAKAAFSFLQDHVSSSFSFTGWNGGRIMCQRSQLKQLLSTKEPTSEESENKNLVALANSPIFAAGTRASTSSDTNHSGNPTQRRTRTKKELAGSTA

SEQ ID NO: 89938 - protein, 732 aa, Arabidopsis thaliana
  peptide (1)..(732): Ceres Seq. ID no. 12721497
  misc_feature (82)..(117): Pfam Name: PPR repeat Pfam Description: PPR repeat
  misc_feature (1)..(726): Homolog of NCBI NO: 34897386 NR Description: putative chloroplast RNA processing protein
  misc_feature (1)..(590): Homolog of NCBI NO: 15242557 NR Description: putative protein; protein id: At5g02860.1
  misc_feature (1)..(580): Homolog of NCBI NO: 15224262 NR Description: putative salt-inducible protein; protein id: supported by cDNA: gi_15983784 [Arabidopsis thaliana]
  misc_feature (1)..(507): Homolog of NCBI NO: 15224671 NR Description: unknown protein; protein id: At2g31400.1
  misc_feature (453)..(662): Homolog of NCBI NO: 15224671 NR Description: unknown protein; protein id: At2g31400.1
  misc_feature (18)..(590): Homolog of NCBI NO: 34393454 NR Description: putative pentatricopeptide (PPR)
  misc_feature (12)..(150): Homolog of NCBI NO: 15724390 NR Description: putative salt-inducible protein [Brassica nigra]
  misc_feature (1)..(498): Homolog of NCBI NO: 30688770 NR Description: pentatricopeptide (PPR) repeat-containing protein
  misc_feature (1)..(498): Homolog of NCBI NO: 30688764 NR Description: pentatricopeptide (PPR) repeat-containing protein
  misc_feature (1)..(511): Homolog of NCBI NO: 34393454 NR Description: putative pentatricopeptide (PPR)
MQRQIWCKPNEHIYTIMISLLGREGLLDKCLEVFDEMPSQGVSRSVFSYTALINAYGRNGRYETSLELLDRMKNEKISPSILTYNTVINACARGGLDWEGLLGLFAEMRHEGIQPDIVTYNTLLSACAIRGLGDEAEMVFRTMNDGGIVPDLTTYSHLVETFGKLRRLEKVCDLLGEMASGGSLPDITSYNVLLEAYAKSGSIKEAMGVFHQMQAAGCTPNANTYSVLLNLFGQSGRYDDVRQLFLEMKSSNTDPDAATYNILIEVFGEGGYFKEVVTLFHDMVEENIEPDMETYEGIIFACGKGGLHEDARKILQYMTANDIVPSSKAYTGVIEAFGQAALYEEALVAFNTMHEVGSNPSIETFHSLLYSFARGGLVKESEAILSRLVDSGIPRNRDTFNAQIEAYKQGGKFEEAVKTYVDMEKSRCDPDERTLEAVLSVYSFARLVDECREQFEEMKASDILPSIMCYCMMLAVYGKTERWDDVNELLEEMLSNRVSNIHQVIGQMIKGDYDDDSNWQIVEYVLDKLNSEGCGLGIRFYNALLDALWWLGQKERAARVLNEATKRGLFPELFRKNKLVWSVDVHRMSEGGMYTALSVWLNDINDMLLKGDLPQLAVVVSVRGQLEKSSAARESPIAKAAFSFLQDHVSSSFSFTGWNGGRIMCQRSQLKQLLSTKEPTSEESENKNLVALANSPIFAAGTRASTSSDTNHSGNPTQRRTRTKKELAGSTA

SEQ ID NO: 89939 - protein, 716 aa, Arabidopsis thaliana
  peptide (1)..(716): Ceres Seq. ID no. 12721498
  misc_feature (66)..(101): Pfam Name: PPR repeat Pfam Description: PPR repeat
  misc_feature (1)..(710): Homolog of NCBI NO: 34897386 NR Description: putative chloroplast RNA processing protein
  misc_feature (1)..(574): Homolog of NCBI NO: 15242557 NR Description: putative protein; protein id: At5g02860.1
  misc_feature (1)..(564): Homolog of NCBI NO: 15224262 NR Description: putative salt-inducible protein; protein id: supported by cDNA: gi_15983784 [Arabidopsis thaliana]
  misc_feature (1)..(491): Homolog of NCBI NO: 15224671 NR Description: unknown protein; protein id: At2g31400.1
  misc_feature (437)..(646): Homolog of NCBI NO: 15224671 NR Description: unknown protein; protein id: At2g31400.1
  misc_feature (2)..(574): Homolog of NCBI NO: 34393454 NR Description: putative pentatricopeptide (PPR)
  misc_feature (1)..(134): Homolog of NCBI NO: 15724390 NR Description: putative salt-inducible protein [Brassica nigra]
  misc_feature (1)..(482): Homolog of NCBI NO: 30688770 NR Description: pentatricopeptide (PPR) repeat-containing protein
  misc_feature (1)..(482): Homolog of NCBI NO: 30688764 NR Description: pentatricopeptide (PPR) repeat-containing protein
  misc_feature (1)..(495): Homolog of NCBI NO: 34393454 NR Description: putative pentatricopeptide (PPR)
MISLLGREGLLDKCLEVFDEMPSQGVSRSVFSYTALINAYGRNGRYETSLELLDRMKNEKISPSILTYNTVINACARGGLDWEGLLGLFAEMRHEGIQPDIVTYNTLLSACAIRGLGDEAEMVFRTMNDGGIVPDLTTYSHLVETFGKLRRLEKVCDLLGEMASGGSLPDITSYNVLLEAYAKSGSIKEAMGVFHQMQAAGCTPNANTYSVLLNLFGQSGRYDDVRQLFLEMKSSNTDPDAATYNILIEVFGEGGYFKEVVTLFHDMVEENIEPDMETYEGIIFACGKGGLHEDARKILQYMTANDIVPSSKAYTGVIEAFGQAALYEEALVAFNTMHEVGSNPSIETFHSLLYSFARGGLVKESEAILSRLVDSGIPRNRDTFNAQIEAYKQGGKFEEAVKTYVDMEKSRCDPDERTLEAVLSVYSFARLVDECREQFEEMKASDILPSIMCYCMMLAVYGKTERWDDVNELLEEMLSNRVSNIHQVIGQMIKGDYDDDSNWQIVEYVLDKLNSEGCGLGIRFYNALLDALWWLGQKERAARVLNEATKRGLFPELFRKNKLVWSVDVHRMSEGGMYTALSVWLNDINDMLLKGDLPQLAVVVSVRGQLEKSSAARESPIAKAAFSFLQDHVSSSFSFTGWNGGRIMCQRSQLKQLLSTKEPTSEESENKNLVALANSPIFAAGTRASTSSDTNHSGNPTQRRTRTKKELAGSTA

SEQ ID NO: 89940 - DNA, 1449 bp, Arabidopsis thaliana
  misc_feature (1)..(1449): Ceres Seq. ID no. 12721502
  misc_feature: MA Experiment ID: 20000794 Result: Up-regulated in Transcription
  misc_feature: MA Experiment 20000794 PARAMETER Experiment Name: At_Petals_P Parameter: Age (day) Value: 23-25 days
  misc_feature: MA Experiment 20000794 PARAMETER Experiment Name: At_Petals_P Parameter: Plant Line Value: WS
  misc_feature: MA Experiment 20000794 PARAMETER Experiment Name: At_Petals_P Parameter: Tissue Value: Petals vs. Whole plant
atgaaacgtctttttagcaaatcgctatgtacttcggccgccggagccaatctcaaaccaccgccggcagattccgccgccatagctaagcttatcctctcttctccgaacacaactcaccaagacgatcaatttctactctccaccaaaacaaccccatggaccccaaatctcgtgaactctgttctcaagcgactctggaaccacggccctaaagctctccaattcttccacttcctcgacaatcaccaccgcgaatatgtccacgacgcttcctccttcgatctcgcaatcgacattgccgcccgtcttcacctccaccccaccgtctggtcactcattcaccgtatgcgctctctccgcatcggtccttctcccaaaaccttcgcaatcgtcgccgagaggtacgcatccgctgggaagcccgataaagcggttaagctgtttctgaatatgcacgaacatggttgttttcaagatttagcttctttcaatacgattctcgatgtgttgtgtaaatctaaacgcgtagagaaagcttatgagttgtttagagctcttaggggaagatttagtgttgatacagttacttacaatgtgattcttaacggttggtgtttgattaaaaggacgcctaaggctttagaagttttgaaagagatggttgagagagggataaaccctaatttgactacttataacacaatgctcaaaggttttttcagagctgggcagattagacatgcttgggaattcttcttggagatgaagaaacgggattgtgaaatagatgttgtcacttatactactgtggttcacgggtttggtgttgcgggggagataaagcgggcgaggaatgttttcgatgagatgattagagaaggtgtgcttccttctgttgcgacgtacaatgctatgattcaagttttgtgtaagaaagataatgtggagaatgcggttgtgatgtttgaggaaatggtgaggagaggttatgagccgaatgtgacgacttataatgtgttgataagagggttgtttcacgctggagagtttagtcgtggagaggagttgatgcagagaatggagaatgaaggctgtgaaccaaacttccagacatataacatgatgatccgttattattcggaatgcagcgaggtcgagaaagcgttgggtttgtttgagaaaatggggagtggtgattgcttgccaaatctagatacttacaacatactgataagtggaatgtttgtgagaaaaagatcagaagatatggtggtcgctggtaaactattgcttgagatggttgagagagggtttataccccggaaatttacttttaatcgagttctgaacgggcttcttttgacagggaatcaagcttttgcaaaggagatcttgagattgcagagtaaatctggtagccggcttctccggaagttcaggctatga

SEQ ID NO: 89941 - protein, 482 aa, Arabidopsis thaliana
  peptide (1)..(482): Ceres Seq. ID no. 12721503
  misc_feature (231)..(265): Pfam Name: PPR repeat Pfam Description: PPR repeat
  misc_feature (1)..(482): Homolog of NCBI NO: 15222036 NR Description: hypothetical protein; protein id: At1g74900.1
  misc_feature (2)..(459): Homolog of NCBI NO: 14488357 NR Description: unknown protein [Oryza sativa (japonica
  misc_feature (23)..(455): Homolog of NCBI NO: 15223926 NR Description: hypothetical protein; protein id: At1g77360.1
  misc_feature (58)..(469): Homolog of NCBI NO: 21686921 NR Description: putative reverse transcriptase [Oryza sativa
  misc_feature (90)..(473): Homolog of NCBI NO: 15231863 NR Description: putative protein; protein id: At3g53700.1, by cDNA: gi_15982930 [Arabidopsis thaliana]
  misc_feature (32)..(473): Homolog of NCBI NO: 18394846 NR Description: expressed protein; protein id: At1g20300.1, by cDNA: gi_15450346, supported by cDNA: gi_17386103 [Arabidopsis
  misc_feature (89)..(457): Homolog of NCBI NO: 15221550 NR Description: PPR-repeat protein; protein id: At1g62680.1
  misc_feature (54)..(474): Homolog of NCBI NO: 15221549 NR Description: PPR-repeat protein; protein id: At1g62670.1
  misc_feature (112)..(474): Homolog of NCBI NO: 5454208 NR Description: T3P18.22 [Arabidopsis thaliana]
  misc_feature (15)..(477): Homolog of NCBI NO: 15228825 NR Description: hypothetical protein; protein id: At3g22670.1 thaliana] >gi|9279685|dbj|BAB01242.1|
MKRLFSKSLCTSAAGANLKPPPADSAAIAKLILSSPNTTHQDDQFLLSTKTTPWTPNLVNSVLKRLWNHGPKALQFFHFLDNHHREYVHDASSFDLAIDIAARLHLHPTVWSLIHRMRSLRIGPSPKTFAIVAERYASAGKPDKAVKLFLNMHEHGCFQDLASFNTILDVLCKSKRVEKAYELFRALRGRFSVDTVTYNVILNGWCLIKRTPKALEVLKEMVERGINPNLTTYNTMLKGFFRAGQIRHAWEFFLEMKKRDCEIDVVTYTTVVHGFGVAGEIKRARNVFDEMIREGVLPSVATYNAMIQVLCKKDNVENAVVMFEEMVRRGYEPNVTTYNVLIRGLFHAGEFSRGEELMQRMENEGCEPNFQTYNMMIRYYSECSEVEKALGLFEKMGSGDCLPNLDTYNILISGMFVRKRSEDMVVAGKLLLEMVERGFIPRKFTFNRVLNGLLLTGNQAFAKEILRLQSKSGSRLLRKFRL

SEQ ID NO: 89942 - protein, 366 aa, Arabidopsis thaliana
  peptide (1)..(366): Ceres Seq. ID no. 12721504
  misc_feature (115)..(149): Pfam Name: PPR repeat Pfam Description: PPR repeat
  misc_feature (1)..(366): Homolog of NCBI NO: 15222036 NR Description: hypothetical protein; protein id: At1g74900.1
  misc_feature (1)..(343): Homolog of NCBI NO: 14488357 NR Description: unknown protein [Oryza sativa (japonica
  misc_feature (1)..(339): Homolog of NCBI NO: 15223926 NR Description: hypothetical protein; protein id: At1g77360.1
  misc_feature (1)..(353): Homolog of NCBI NO: 21686921 NR Description: putative reverse transcriptase [Oryza sativa
  misc_feature (1)..(357): Homolog of NCBI NO: 15231863 NR Description: putative protein; protein id: At3g53700.1, by cDNA: gi_15982930 [Arabidopsis thaliana]
  misc_feature (1)..(357): Homolog of NCBI NO: 18394846 NR Description: expressed protein; protein id: At1g20300.1, by cDNA: gi_15450346, supported by cDNA: gi_17386103 [Arabidopsis
  misc_feature (1)..(341): Homolog of NCBI NO: 15221550 NR Description: PPR-repeat protein; protein id: At1g62680.1
  misc_feature (1)..(358): Homolog of NCBI NO: 15221549 NR Description: PPR-repeat protein; protein id: At1g62670.1
  misc_feature (1)..(358): Homolog of NCBI NO: 5454208 NR Description: T3P18.22 [Arabidopsis thaliana]
  misc_feature (1)..(361): Homolog of NCBI NO: 15228825 NR Description: hypothetical protein; protein id: At3g22670.1 thaliana] >gi|9279685|dbj|BAB01242.1|
MRSLRIGPSPKTFAIVAERYASAGKPDKAVKLFLNMHEHGCFQDLASFNTILDVLCKSKRVEKAYELFRALRGRFSVDTVTYNVILNGWCLIKRTPKALEVLKEMVERGINPNLTTYNTMLKGFFRAGQIRHAWEFFLEMKKRDCEIDVVTYTTVVHGFGVAGEIKRARNVFDEMIREGVLPSVATYNAMIQVLCKKDNVENAVVMFEEMVRRGYEPNVTTYNVLIRGLFHAGEFSRGEELMQRMENEGCEPNFQTYNMMIRYYSECSEVEKALGLFEKMGSGDCLPNLDTYNILISGMFVRKRSEDMVVAGKLLLEMVERGFIPRKFTFNRVLNGLLLTGNQAFAKEILRLQSKSGSRLLRKFRL

SEQ ID NO: 89943 - protein, 331 aa, Arabidopsis thaliana
  peptide (1)..(331): Ceres Seq. ID no. 12721505
  misc_feature (80)..(114): Pfam Name: PPR repeat Pfam Description: PPR repeat
  misc_feature (1)..(331): Homolog of NCBI NO: 15222036 NR Description: hypothetical protein; protein id: At1g74900.1
  misc_feature (1)..(308): Homolog of NCBI NO: 14488357 NR Description: unknown protein [Oryza sativa (japonica
  misc_feature (1)..(304): Homolog of NCBI NO: 15223926 NR Description: hypothetical protein; protein id: At1g77360.1
  misc_feature (1)..(318): Homolog of NCBI NO: 21686921 NR Description: putative reverse transcriptase [Oryza sativa
  misc_feature (1)..(322): Homolog of NCBI NO: 15231863 NR Description: putative protein; protein id: At3g53700.1, by cDNA: gi_15982930 [Arabidopsis thaliana]
  misc_feature (1)..(322): Homolog of NCBI NO: 18394846 NR Description: expressed protein; protein id: At1g20300.1, by cDNA: gi_15450346, supported by cDNA: gi_17386103 [Arabidopsis
  misc_feature (1)..(306): Homolog of NCBI NO: 15221550 NR Description: PPR-repeat protein; protein id: At1g62680.1
  misc_feature (1)..(323): Homolog of NCBI NO: 15221549 NR Description: PPR-repeat protein; protein id: At1g62670.1
  misc_feature (1)..(323): Homolog of NCBI NO: 5454208 NR Description: T3P18.22 [Arabidopsis thaliana]
  misc_feature (1)..(326): Homolog of NCBI NO: 15228825 NR Description: hypothetical protein; protein id: At3g22670.1 thaliana] >gi|9279685|dbj|BAB01242.1|
MHEHGCFQDLASFNTILDVLCKSKRVEKAYELFRALRGRFSVDTVTYNVILNGWCLIKRTPKALEVLKEMVERGINPNLTTYNTMLKGFFRAGQIRHAWEFFLEMKKRDCEIDVVTYTTVVHGFGVAGEIKRARNVFDEMIREGVLPSVATYNAMIQVLCKKDNVENAVVMFEEMVRRGYEPNVTTYNVLIRGLFHAGEFSRGEELMQRMENEGCEPNFQTYNMMIRYYSECSEVEKALGLFEKMGSGDCLPNLDTYNILISGMFVRKRSEDMVVAGKLLLEMVERGFIPRKFTFNRVLNGLLLTGNQAFAKEILRLQSKSGSRLLRKFRL

SEQ ID NO: 89944 - DNA, 1623 bp, Arabidopsis thaliana
  misc_feature (1)..(1623): Ceres Seq. ID no. 12721545
  misc_feature: MA Experiment ID: 20001247 Result: Up-regulated in Transcription
  misc_feature: MA Experiment 20001247 PARAMETER Experiment Name: At_Far-red-induction_P Parameter: Age (day) Value: 7
  misc_feature: MA Experiment 20001247 PARAMETER Experiment Name: At_Far-red-induction_P Parameter: Light Value: Far-red vs. White
  misc_feature: MA Experiment 20001247 PARAMETER Experiment Name: At_Far-red-induction_P Parameter: Organism Value: A. thaliana
  misc_feature: MA Experiment 20001247 PARAMETER Experiment Name: At_Far-red-induction_P Parameter: Plant Line Value: Columbia
  misc_feature: MA Experiment 20001247 PARAMETER Experiment Name: At_Far-red-induction_P Parameter: Timepoint (hr) Value: 1
  misc_feature: MA Experiment 20001247 PARAMETER Experiment Name: At_Far-red-induction_P Parameter: Tissue Value: Whole Plant
  misc_feature: MA Experiment ID: 20001248 Result: Up-regulated in Transcription
  misc_feature: MA Experiment 20001248 PARAMETER Experiment Name: At_Far-red-induction_P Parameter: Age (day) Value: 7
  misc_feature: MA Experiment 20001248 PARAMETER Experiment Name: At_Far-red-induction_P Parameter: Light Value: Far-red vs. White
  misc_feature: MA Experiment 20001248 PARAMETER Experiment Name: At_Far-red-induction_P Parameter: Organism Value: A. thaliana
  misc_feature: MA Experiment 20001248 PARAMETER Experiment Name: At_Far-red-induction_P Parameter: Plant Line Value: Columbia
  misc_feature: MA Experiment 20001248 PARAMETER Experiment Name: At_Far-red-induction_P Parameter: Timepoint (hr) Value: 4
  misc_feature: MA Experiment 20001248 PARAMETER Experiment Name: At_Far-red-induction_P Parameter: Tissue Value: Whole Plant
  misc_feature: MA Experiment ID: 20001450 Result: Up-regulated in Transcription
  misc_feature: MA Experiment 20001450 PARAMETER Experiment Name: At_Far-red-induction_P Parameter: Age (day) Value: 7
  misc_feature: MA Experiment 20001450 PARAMETER Experiment Name: At_Far-red-induction_P Parameter: Light Value: Far-red vs. White
  misc_feature: MA Experiment 20001450 PARAMETER Experiment Name: At_Far-red-induction_P Parameter: Organism Value: A. thaliana
  misc_feature: MA Experiment 20001450 PARAMETER Experiment Name: At_Far-red-induction_P Parameter: Plant Line Value: Columbia
  misc_feature: MA Experiment 20001450 PARAMETER Experiment Name: At_Far-red-induction_P Parameter: Timepoint (hr) Value: 8
  misc_feature: MA Experiment 20001450 PARAMETER Experiment Name: At_Far-red-induction_P Parameter: Tissue Value: Whole Plant
  misc_feature: MA Experiment ID: 20001504 Result: Up-regulated in Transcription
  misc_feature: MA Experiment 20001504 PARAMETER Experiment Name: At_Far-red-enriched_P Parameter: Age (day) Value: 10
  misc_feature: MA Experiment 20001504 PARAMETER Experiment Name: At_Far-red-enriched_P Parameter: Light Value: Far-red enriched vs. White
  misc_feature: MA Experiment 20001504 PARAMETER Experiment Name: At_Far-red-enriched_P Parameter: Organism Value: A. thaliana
  misc_feature: MA Experiment 20001504 PARAMETER Experiment Name: At_Far-red-enriched_P Parameter: Plant Line Value: Columbia
  misc_feature: MA Experiment 20001504 PARAMETER Experiment Name: At_Far-red-enriched_P Parameter: Timepoint (day) Value: 6
  misc_feature: MA Experiment 20001504 PARAMETER Experiment Name: At_Far-red-enriched_P Parameter: Tissue Value: Whole Plant
  misc_feature: MA Experiment ID: 20001768 Result: Up-regulated in Transcription
  misc_feature: MA Experiment 20001768 PARAMETER Experiment Name: At_Far-red-enriched-adult_P Parameter: Age (day) Value: 28
  misc_feature: MA Experiment 20001768 PARAMETER Experiment Name: At_Far-red-enriched-adult_P Parameter: Light Value: Far-red enriched vs. White
  misc_feature: MA Experiment 20001768 PARAMETER Experiment Name: At_Far-red-enriched-adult_P Parameter: Organism Value: A. thaliana
  misc_feature: MA Experiment 20001768 PARAMETER Experiment Name: At_Far-red-enriched-adult_P Parameter: Plant Line Value: Columbia
  misc_feature: MA Experiment 20001768 PARAMETER Experiment Name: At_Far-red-enriched-adult_P Parameter: Timepoint (hr) Value: 1
  misc_feature: MA Experiment 20001768 PARAMETER Experiment Name: At_Far-red-enriched-adult_P Parameter: Tissue Value: Aerial
  misc_feature: MA Experiment ID: 20001769 Result: Up-regulated in Transcription
  misc_feature: MA Experiment 20001769 PARAMETER Experiment Name: At_Far-red-enriched-adult_P Parameter: Age (day) Value: 28
  misc_feature: MA Experiment 20001769 PARAMETER Experiment Name: At_Far-red-enriched-adult_P Parameter: Light Value: Far-red enriched vs. White
  misc_feature: MA Experiment 20001769 PARAMETER Experiment Name: At_Far-red-enriched-adult_P Parameter: Organism Value: A. thaliana
  misc_feature: MA Experiment 20001769 PARAMETER Experiment Name: At_Far-red-enriched-adult_P Parameter: Plant Line Value: Columbia
  misc_feature: MA Experiment 20001769 PARAMETER Experiment Name: At_Far-red-enriched-adult_P Parameter: Timepoint (hr) Value: 4
  misc_feature: MA Experiment 20001769 PARAMETER Experiment Name: At_Far-red-enriched-adult_P Parameter: Tissue Value: Aerial
  misc_feature: MA Experiment ID: 20001770 Result: Up-regulated in Transcription
  misc_feature: MA Experiment 20001770 PARAMETER Experiment Name: At_Far-red-enriched-adult_P Parameter: Age (day) Value: 28
  misc_feature: MA Experiment 20001770 PARAMETER Experiment Name: At_Far-red-enriched-adult_P Parameter: Light Value: Far-red enriched vs. White
  misc_feature: MA Experiment 20001770 PARAMETER Experiment Name: At_Far-red-enriched-adult_P Parameter: Organism Value: A. thaliana
  misc_feature: MA Experiment 20001770 PARAMETER Experiment Name: At_Far-red-enriched-adult_P Parameter: Plant Line Value: Columbia
  misc_feature: MA Experiment 20001770 PARAMETER Experiment Name: At_Far-red-enriched-adult_P Parameter: Timepoint (hr) Value: 8
  misc_feature: MA Experiment 20001770 PARAMETER Experiment Name: At_Far-red-enriched-adult_P Parameter: Tissue Value: Aerial
  misc_feature: MA Experiment ID: 20001904 Result: Up-regulated in Transcription
  misc_feature: MA Experiment 20001904 PARAMETER Experiment Name: At_Drought_Reproduction_P Parameter: Age (day) Value: 37
  misc_feature: MA Experiment 20001904 PARAMETER Experiment Name: At_Drought_Reproduction_P Parameter: Organism Value: A. thaliana
  misc_feature: MA Experiment 20001904 PARAMETER Experiment Name: At_Drought_Reproduction_P Parameter: Plant Line Value: WS
  misc_feature: MA Experiment 20001904 PARAMETER Experiment Name: At_Drought_Reproduction_P Parameter: Timepoint (day) Value: 7
  misc_feature: MA Experiment 20001904 PARAMETER Experiment Name: At_Drought_Reproduction_P Parameter: Tissue Value: Rosettes
  misc_feature: MA Experiment 20001904 PARAMETER Experiment Name: At_Drought_Reproduction_P Parameter: Treatment Value: Drought vs. No Drought
  misc_feature: MA Experiment ID: 20001905 Result: Up-regulated in Transcription
  misc_feature: MA Experiment 20001905 PARAMETER Experiment Name: At_Drought_Reproduction_P Parameter: Age (day) Value: 40
  misc_feature: MA Experiment 20001905 PARAMETER Experiment Name: At_Drought_Reproduction_P Parameter: Organism Value: A. thaliana
  misc_feature: MA Experiment 20001905 PARAMETER Experiment Name: At_Drought_Reproduction_P Parameter: Plant Line Value: WS
  misc_feature: MA Experiment 20001905 PARAMETER Experiment Name: At_Drought_Reproduction_P Parameter: Timepoint (day) Value: 10
  misc_feature: MA Experiment 20001905 PARAMETER Experiment Name: At_Drought_Reproduction_P Parameter: Tissue Value: Rosettes
  misc_feature: MA Experiment 20001905 PARAMETER Experiment Name: At_Drought_Reproduction_P Parameter: Treatment Value: Drought vs. No Drought
atgaatcgtgaaatgacgtcaagctttcttctcctgacgttcgccatatgtaaactgatcatagccgtgggtctaaacgtgggccccagtgagctcctccgcatcggagccatagatgtcgacggccacttcaccgtccacccttccgacttagcctccgtctcctcagacttcggtatgctgaagtcacctgaagagccattggccgtgcttcatccatcatcggccgaagacgtggcacgactcgtcagaacagcttacggttcagccacggcgtttccggtctcagcccgaggccacggccattccataaacggacaagccgcggcggggaggaacggtgtggtggttgaaatgaaccacggcgtaaccgggacgcccaagccactcgtccgaccggatgaaatgtatgtggatgtatggggtggagagttatgggtcgatgtgttgaagaaaacgttggagcatggcttagcaccaaaatcatggacggattacttgtatctaaccgttggaggtacactctccaatgcaggaatcagtggtcaagcttttcaccatggtcctcaaattagtaacgtccttgagctcgacgttgtaactgggaaaggagaggtgatgagatgctcagaagaagagaacacaaggctattccatggagttcttggtggattaggtcaatttgggatcatcactcgagcacgaatctctctcgaaccagctccccaaagggtgagatggatacgggtattgtattcgagcttcaaagtgtttacggaggaccaagagtacttaatctcaatgcatggtcaattaaagtttgattacgtggaaggttttgtgattgtggacgaaggactcgtcaacaattggagatcttctttcttctctccacgtaaccccgtcaagatctcctctgttagttccaacggctctgttttgtattgccttgagatcaccaagaactaccacgactccgactccgaaatcgttgatcaggaagttgagattctgatgaagaaattgaatttcataccgacatcggtctttacaacggatttacaatatgtggactttctcgaccgggtacacaaggccgaattgaagctccggtccaagaatttatgggaggttccacacccatggctcaacctcttcgtgccaaaatcaagaatctctgacttcgataaaggcgttttcaagggcattttgggaaataaaacaagtggccctattcttatctaccccatgaacaaagacaaatgggacgagaggagctcagccgtgacgccggatgaggaagttttctatctggtggctctattgagatcagctttaacggacggtgaagagacacagaagctagagtatctgaaagatcagaaccgtcggatcttggagttctgtgaacaagccaagatcaatgtgaagcagtatcttcctcaccacgcaacacaggaagagtgggtggctcattttggggacaagtgggatcggttcagaagcttaaaggctgagtttgatccgcgacacatactcgctactggtcagagaatctttcaaaacccatctttgtctttgtttcctccgtcgtcgtcttcttcgtcagcggcttcatggtga

SEQ ID NO: 89945 - protein, 540 aa, Arabidopsis thaliana
  peptide (1)..(540): Ceres Seq. ID no. 12721546
  misc_feature (67)..(227): Pfam Name: FAD binding domain Pfam Description: FAD binding domain
  misc_feature (1)..(540): Homolog of NCBI NO: 22330649 NR Description: cytokinin oxidase, putative; protein id:
  misc_feature (1)..(540): Homolog of NCBI NO: 11120516 NR Description: cytokinin oxidase [Arabidopsis thaliana]
  misc_feature (226)..(540): Homolog of NCBI NO: 25406436 NR Description: hypothetical protein F1B16.2 [imported] - thaliana >gi|10120443|gb|AAG13068.1|AC023754_6 Similar to
  misc_feature (5)..(208): Homolog of NCBI NO: 25406436 NR Description: hypothetical protein F1B16.2 [imported] - thaliana >gi|10120443|gb|AAG13068.1|AC023754_6 Similar to
  misc_feature (5)..(525): Homolog of NCBI NO: 34910002 NR Description: putative cytokinin oxidase [Oryza sativa cultivar- group)] >gi|22202687|dbj|BAC07345.1| putative cytokinin
  misc_feature (10)..(532): Homolog of NCBI NO: 23267157 NR Description: cytokinin dehydrogenase 2 [Hordeum vulgare]
  misc_feature (29)..(537): Homolog of NCBI NO: 15227374 NR Description: putative cytokinin oxidase; protein id: [Arabidopsis thaliana] >gi|7487602|pir||T00807 probable cytokinin
  misc_feature (10)..(532): Homolog of NCBI NO: 27312007 NR Description: cytokinin dehydrogenase 2 [Hordeum vulgare]
  misc_feature (10)..(532): Homolog of NCBI NO: 28883584 NR Description: cytokinin dehydrogenase 3 [Hordeum vulgare]
  misc_feature (35)..(527): Homolog of NCBI NO: 20161335 NR Description: putative cytokinin oxidase [Oryza sativa
MNREMTSSFLLLTFAICKLIIAVGLNVGPSELLRIGAIDVDGHFTVHPSDLASVSSDFGMLKSPEEPLAVLHPSSAEDVARLVRTAYGSATAFPVSARGHGHSINGQAAAGRNGVVVEMNHGVTGTPKPLVRPDEMYVDVWGGELWVDVLKKTLEHGLAPKSWTDYLYLTVGGTLSNAGISGQAFHHGPQISNVLELDVVTGKGEVMRCSEEENTRLFHGVLGGLGQFGIITRARISLEPAPQRVRWIRVLYSSFKVFTEDQEYLISMHGQLKFDYVEGFVIVDEGLVNNWRSSFFSPRNPVKISSVSSNGSVLYCLEITKNYHDSDSEIVDQEVEILMKKLNFIPTSVFTTDLQYVDFLDRVHKAELKLRSKNLWEVPHPWLNLFVPKSRISDFDKGVFKGILGNKTSGPILIYPMNKDKWDERSSAVTPDEEVFYLVALLRSALTDGEETQKLEYLKDQNRRILEFCEQAKINVKQYLPHHATQEEWVAHFGDKWDRFRSLKAEFDPRHILATGQRIFQNPSLSLFPPSSSSSSAASW

SEQ ID NO: 89946 - protein, 536 aa, Arabidopsis thaliana
  peptide (1)..(536): Ceres Seq. ID no. 12721547
  misc_feature (63)..(223): Pfam Name: FAD binding domain Pfam Description: FAD binding domain
  misc_feature (1)..(536): Homolog of NCBI NO: 22330649 NR Description: cytokinin oxidase, putative; protein id:
  misc_feature (1)..(536): Homolog of NCBI NO: 11120516 NR Description: cytokinin oxidase [Arabidopsis thaliana]
  misc_feature (222)..(536): Homolog of NCBI NO: 25406436 NR Description: hypothetical protein F1B16.2 [imported] - thaliana >gi|10120443|gb|AAG13068.1|AC023754_6 Similar to
  misc_feature (1)..(204): Homolog of NCBI NO: 25406436 NR Description: hypothetical protein F1B16.2 [imported] - thaliana >gi|10120443|gb|AAG13068.1|AC023754_6 Similar to
  misc_feature (1)..(521): Homolog of NCBI NO: 34910002 NR Description: putative cytokinin oxidase [Oryza sativa cultivar- group)] >gi|22202687|dbj|BAC07345.1| putative cytokinin
  misc_feature (6)..(528): Homolog of NCBI NO: 23267157 NR Description: cytokinin dehydrogenase 2 [Hordeum vulgare]
  misc_feature (25)..(533): Homolog of NCBI NO: 15227374 NR Description: putative cytokinin oxidase; protein id: [Arabidopsis thaliana] >gi|7487602|pir||T00807 probable cytokinin
  misc_feature (6)..(528): Homolog of NCBI NO: 27312007 NR Description: cytokinin dehydrogenase 2 [Hordeum vulgare]
  misc_feature (6)..(528): Homolog of NCBI NO: 28883584 NR Description: cytokinin dehydrogenase 3 [Hordeum vulgare]
  misc_feature (31)..(523): Homolog of NCBI NO: 20161335 NR Description: putative cytokinin oxidase [Oryza sativa
MTSSFLLLTFAICKLIIAVGLNVGPSELLRIGAIDVDGHFTVHPSDLASVSSDFGMLKSPEEPLAVLHPSSAEDVARLVRTAYGSATAFPVSARGHGHSINGQAAAGRNGVVVEMNHGVTGTPKPLVRPDEMYVDVWGGELWVDVLKKTLEHGLAPKSWTDYLYLTVGGTLSNAGISGQAFHHGPQISNVLELDVVTGKGEVMRCSEEENTRLFHGVLGGLGQFGIITRARISLEPAPQRVRWIRVLYSSFKVFTEDQEYLISMHGQLKFDYVEGFVIVDEGLVNNWRSSFFSPRNPVKISSVSSNGSVLYCLEITKNYHDSDSEIVDQEVEILMKKLNFIPTSVFTTDLQYVDFLDRVHKAELKLRSKNLWEVPHPWLNLFVPKSRISDFDKGVFKGILGNKTSGPILIYPMNKDKWDERSSAVTPDEEVFYLVALLRSALTDGEETQKLEYLKDQNRRILEFCEQAKINVKQYLPHHATQEEWVAHFGDKWDRFRSLKAEFDPRHILATGQRIFQNPSLSLFPPSSSSSSAASW

SEQ ID NO: 89947 - protein, 481 aa, Arabidopsis thaliana
  peptide (1)..(481): Ceres Seq. ID no. 12721548
  misc_feature (8)..(168): Pfam Name: FAD binding domain Pfam Description: FAD binding domain
  misc_feature (1)..(481): Homolog of NCBI NO: 22330649 NR Description: cytokinin oxidase, putative; protein id:
  misc_feature (1)..(481): Homolog of NCBI NO: 11120516 NR Description: cytokinin oxidase [Arabidopsis thaliana]
  misc_feature (167)..(481): Homolog of NCBI NO: 25406436 NR Description: hypothetical protein F1B16.2 [imported] - thaliana >gi|10120443|gb|AAG13068.1|AC023754_6 Similar to
  misc_feature (1)..(149): Homolog of NCBI NO: 25406436 NR Description: hypothetical protein F1B16.2 [imported] - thaliana >gi|10120443|gb|AAG13068.1|AC023754_6 Similar to
  misc_feature (1)..(466): Homolog of NCBI NO: 34910002 NR Description: putative cytokinin oxidase [Oryza sativa cultivar- group)] >gi|22202687|dbj|BAC07345.1| putative cytokinin
  misc_feature (1)..(473): Homolog of NCBI NO: 23267157 NR Description: cytokinin dehydrogenase 2 [Hordeum vulgare]
  misc_feature (1)..(478): Homolog of NCBI NO: 15227374 NR Description: putative cytokinin oxidase; protein id: [Arabidopsis thaliana] >gi|7487602|pir||T00807 probable cytokinin
  misc_feature (1)..(473): Homolog of NCBI NO: 27312007 NR Description: cytokinin dehydrogenase 2 [Hordeum vulgare]
  misc_feature (1)..(473): Homolog of NCBI NO: 28883584 NR Description: cytokinin dehydrogenase 3 [Hordeum vulgare]
  misc_feature (1)..(468): Homolog of NCBI NO: 20161335 NR Description: putative cytokinin oxidase [Oryza sativa
MLKSPEEPLAVLHPSSAEDVARLVRTAYGSATAFPVSARGHGHSINGQAAAGRNGVVVEMNHGVTGTPKPLVRPDEMYVDVWGGELWVDVLKKTLEHGLAPKSWTDYLYLTVGGTLSNAGISGQAFHHGPQISNVLELDVVTGKGEVMRCSEEENTRLFHGVLGGLGQFGIITRARISLEPAPQRVRWIRVLYSSFKVFTEDQEYLISMHGQLKFDYVEGFVIVDEGLVNNWRSSFFSPRNPVKISSVSSNGSVLYCLEITKNYHDSDSEIVDQEVEILMKKLNFIPTSVFTTDLQYVDFLDRVHKAELKLRSKNLWEVPHPWLNLFVPKSRISDFDKGVFKGILGNKTSGPILIYPMNKDKWDERSSAVTPDEEVFYLVALLRSALTDGEETQKLEYLKDQNRRILEFCEQAKINVKQYLPHHATQEEWVAHFGDKWDRFRSLKAEFDPRHILATGQRIFQNPSLSLFPPSSSSSSAASW

SEQ ID NO: 89948 - DNA, 594 bp, Arabidopsis thaliana
  misc_feature (1)..(594): Ceres Seq. ID no. 12721549
  misc_feature: MA Experiment ID: 20000184 Result: Up-regulated in Transcription
  misc_feature: MA Experiment 20000184 PARAMETER Experiment Name: At_Shoots__P Parameter: Age (day) Value: 7
  misc_feature: MA Experiment 20000184 PARAMETER Experiment Name: At_Shoots__P Parameter: Tissue Value: Shoots vs. Whole Plant
  misc_feature: MA Experiment ID: 20000264 Result: Down-regulated in Transcription
  misc_feature: MA Experiment 20000264 PARAMETER Experiment Name: At_Open_Flower_P Parameter: Age (day) Value: 21
  misc_feature: MA Experiment 20000264 PARAMETER Experiment Name: At_Open_Flower_P Parameter: Plant Line Value: WS
  misc_feature: MA Experiment 20000264 PARAMETER Experiment Name: At_Open_Flower_P Parameter: Tissue Value: Open Flower vs. Whole Plant
  misc_feature: MA Experiment ID: 20000265 Result: Down-regulated in Transcription
  misc_feature: MA Experiment 20000265 PARAMETER Experiment Name: At_Open_Flower_P Parameter: Age (day) Value: 21
  misc_feature: MA Experiment 20000265 PARAMETER Experiment Name: At_Open_Flower_P Parameter: Plant Line Value: WS
  misc_feature: MA Experiment 20000265 PARAMETER Experiment Name: At_Open_Flower_P Parameter: Tissue Value: Closed Flower vs. Whole Plant
  misc_feature: MA Experiment ID: 20000438 Result: Up-regulated in Transcription
  misc_feature: MA Experiment 20000438 PARAMETER Experiment Name: At_Shoots__P Parameter: Age (day) Value: 14
  misc_feature: MA Experiment 20000438 PARAMETER Experiment Name: At_Shoots__P Parameter: Tissue Value: Shoots vs. Whole Plant
  misc_feature: MA Experiment ID: 20000444 Result: Up-regulated in Transcription
  misc_feature: MA Experiment 20000444 PARAMETER Experiment Name: At_100uM_NAA__P Parameter: Age (day) Value: 14
  misc_feature: MA Experiment 20000444 PARAMETER Experiment Name: At_100uM_NAA__P Parameter: Organism Value: A. thaliana
  misc_feature: MA Experiment 20000444 PARAMETER Experiment Name: At_100uM_NAA__P Parameter: Plant Line Value: WS
  misc_feature: MA Experiment 20000444 PARAMETER Experiment Name: At_100uM_NAA__P Parameter: Timepoint (hr) Value: 1
  misc_feature: MA Experiment 20000444 PARAMETER Experiment Name: At_100uM_NAA__P Parameter: Tissue Value: Aerial
  misc_feature: MA Experiment 20000444 PARAMETER Experiment Name: At_100uM_NAA__P Parameter: Treatment Value: 100uM NAA vs. No Treatment
  misc_feature: MA Experiment ID: 20000527 Result: Up-regulated in Transcription
  misc_feature: MA Experiment 20000527 PARAMETER Experiment Name: At_10percent_PEG_P Parameter: Age (day) Value: 20
  misc_feature: MA Experiment 20000527 PARAMETER Experiment Name: At_10percent_PEG_P Parameter: Organism Value: A. thaliana
  misc_feature: MA Experiment 20000527 PARAMETER Experiment Name: At_10percent_PEG_P Parameter: Plant Line Value: WS
  misc_feature: MA Experiment 20000527 PARAMETER Experiment Name: At_10percent_PEG_P Parameter: Timepoint (day) Value: 20
  misc_feature: MA Experiment 20000527 PARAMETER Experiment Name: At_10percent_PEG_P Parameter: Tissue Value: Whole Plant
  misc_feature: MA Experiment 20000527 PARAMETER Experiment Name: At_10percent_PEG_P Parameter: Treatment Value: 10percent PEG vs. No Treatment
  misc_feature: MA Experiment ID: 20001248 Result: Up-regulated in Transcription
  misc_feature: MA Experiment 20001248 PARAMETER Experiment Name: At_Far-red-induction_P Parameter: Age (day) Value: 7
  misc_feature: MA Experiment 20001248 PARAMETER Experiment Name: At_Far-red-induction_P Parameter: Light Value: Far-red vs. White
  misc_feature: MA Experiment 20001248 PARAMETER Experiment Name: At_Far-red-induction_P Parameter: Organism Value: A. thaliana
  misc_feature: MA Experiment 20001248 PARAMETER Experiment Name: At_Far-red-induction_P Parameter: Plant Line Value: Columbia
  misc_feature: MA Experiment 20001248 PARAMETER Experiment Name: At_Far-red-induction_P Parameter: Timepoint (hr) Value: 4
  misc_feature: MA Experiment 20001248 PARAMETER Experiment Name: At_Far-red-induction_P Parameter: Tissue Value: Whole Plant
  misc_feature: MA Experiment ID: 20001450 Result: Up-regulated in Transcription
  misc_feature: MA Experiment 20001450 PARAMETER Experiment Name: At_Far-red-induction_P Parameter: Age (day) Value: 7
  misc_feature: MA Experiment 20001450 PARAMETER Experiment Name: At_Far-red-induction_P Parameter: Light Value: Far-red vs. White
  misc_feature: MA Experiment 20001450 PARAMETER Experiment Name: At_Far-red-induction_P Parameter: Organism Value: A. thaliana
  misc_feature: MA Experiment 20001450 PARAMETER Experiment Name: At_Far-red-induction_P Parameter: Plant Line Value: Columbia
  misc_feature: MA Experiment 20001450 PARAMETER Experiment Name: At_Far-red-induction_P Parameter: Timepoint (hr) Value: 8
  misc_feature: MA Experiment 20001450 PARAMETER Experiment Name: At_Far-red-induction_P Parameter: Tissue Value: Whole Plant
  misc_feature: MA Experiment ID: 20001451 Result: Up-regulated in Transcription
  misc_feature: MA Experiment 20001451 PARAMETER Experiment Name: At_Far-red-induction_P Parameter: Age (day) Value: 7
  misc_feature: MA Experiment 20001451 PARAMETER Experiment Name: At_Far-red-induction_P Parameter: Light Value: Far-red vs. White
  misc_feature: MA Experiment 20001451 PARAMETER Experiment Name: At_Far-red-induction_P Parameter: Organism Value: A. thaliana
  misc_feature: MA Experiment 20001451 PARAMETER Experiment Name: At_Far-red-induction_P Parameter: Plant Line Value: Columbia
  misc_feature: MA Experiment 20001451 PARAMETER Experiment Name: At_Far-red-induction_P Parameter: Timepoint (hr) Value: 24
  misc_feature: MA Experiment 20001451 PARAMETER Experiment Name: At_Far-red-induction_P Parameter: Tissue Value: Whole Plant
  misc_feature: MA Experiment ID: 20001905 Result: Up-regulated in Transcription
  misc_feature: MA Experiment 20001905 PARAMETER Experiment Name: At_Drought_Reproduction_P Parameter: Age (day) Value: 40
  misc_feature: MA Experiment 20001905 PARAMETER Experiment Name: At_Drought_Reproduction_P Parameter: Organism Value: A. thaliana
  misc_feature: MA Experiment 20001905 PARAMETER Experiment Name: At_Drought_Reproduction_P Parameter: Plant Line Value: WS
  misc_feature: MA Experiment 20001905 PARAMETER Experiment Name: At_Drought_Reproduction_P Parameter: Timepoint (day) Value: 10
  misc_feature: MA Experiment 20001905 PARAMETER Experiment Name: At_Drought_Reproduction_P Parameter: Tissue Value: Rosettes
  misc_feature: MA Experiment 20001905 PARAMETER Experiment Name: At_Drought_Reproduction_P Parameter: Treatment Value: Drought vs. No Drought
  misc_feature: MA Experiment ID: 20001910 Result: Up-regulated in Transcription
  misc_feature: MA Experiment 20001910 PARAMETER Experiment Name: At_Drought_Reproduction_P Parameter: Age (day) Value: 37
  misc_feature: MA Experiment 20001910 PARAMETER Experiment Name: At_Drought_Reproduction_P Parameter: Organism Value: A. thaliana
  misc_feature: MA Experiment 20001910 PARAMETER Experiment Name: At_Drought_Reproduction_P Parameter: Plant Line Value: WS
  misc_feature: MA Experiment 20001910 PARAMETER Experiment Name: At_Drought_Reproduction_P Parameter: Timepoint (day) Value: 7
  misc_feature: MA Experiment 20001910 PARAMETER Experiment Name: At_Drought_Reproduction_P Parameter: Tissue Value: Flowers
  misc_feature: MA Experiment 20001910 PARAMETER Experiment Name: At_Drought_Reproduction_P Parameter: Treatment Value: Drought vs. No Drought
  misc_feature: MA Experiment ID: 20001911 Result: Up-regulated in Transcription
  misc_feature: MA Experiment 20001911 PARAMETER Experiment Name: At_Drought_Reproduction_P Parameter: Age (day) Value: 40
  misc_feature: MA Experiment 20001911 PARAMETER Experiment Name: At_Drought_Reproduction_P Parameter: Organism Value: A. thaliana
  misc_feature: MA Experiment 20001911 PARAMETER Experiment Name: At_Drought_Reproduction_P Parameter: Plant Line Value: WS
  misc_feature: MA Experiment 20001911 PARAMETER Experiment Name: At_Drought_Reproduction_P Parameter: Timepoint (day) Value: 10
  misc_feature: MA Experiment 20001911 PARAMETER Experiment Name: At_Drought_Reproduction_P Parameter: Tissue Value: Flowers
  misc_feature: MA Experiment 20001911 PARAMETER Experiment Name: At_Drought_Reproduction_P Parameter: Treatment Value: Drought vs. No Drought
atggttggtgctaataagaaacaacgaaccgtccaagctagttcgaggaaaggttgtatgagaggaaaaggtggacccgataacgcgtcttgcacttacaaaggtgttagacaacgcacttggggcaaatgggtcgctgagatccgcgagcctaaccgaggagctcgtctttggctcggtaccttcgacacctcccgtgaagctgccttggcttatgactccgcagctcgtaagctctatgggcctgaggctcatctcaacctccctgagtccttaagaagttaccctaaaacggcgtcgtctccggcgtcccagactacaccaagcagcaacaccggtggaaaaagcagcagcgactctgagtcgccgtgttcatccaacgagatgtcatcatgtggaagagtgacagaggagatatcatgggagcatataaacgtggatttgccggtaatggatgattcttcaatatgggaagaagctacaatgtcgttaggatttccatgggttcatgaaggagataatgatatttctcggtttgatacttgtatttccggtggctattctaattgggattcctttcattccccactttga

SEQ ID NO: 89949 - protein, 197 aa, Arabidopsis thaliana
  peptide (1)..(197): Ceres Seq. ID no. 12721550
  misc_feature (30)..(94): Pfam Name: AP2 domain Pfam Description: AP2 domain
  misc_feature (1)..(197): Homolog of NCBI NO: 9369375 NR Description: F10A5.29 [Arabidopsis thaliana]
  misc_feature (1)..(197): Homolog of NCBI NO: 15222261 NR Description: transcription factor, putative; protein id:
  misc_feature (15)..(191): Homolog of NCBI NO: 28071316 NR Description: P0705A05.24 [Oryza sativa (japonica
  misc_feature (6)..(116): Homolog of NCBI NO: 8346773 NR Description: AP2-domain DNA-binding protein [Catharanthus
  misc_feature (15)..(166): Homolog of NCBI NO: 18405354 NR Description: AP2 domain transcription factor; protein id: supported by cDNA: 115358. [Arabidopsis thaliana]
  misc_feature (7)..(88): Homolog of NCBI NO: 15238816 NR Description: AP2-domain DNA-binding protein -like; protein id:
  misc_feature (4)..(130): Homolog of NCBI NO: 15239107 NR Description: DRE binding protein (DREB2A); protein id: supported by cDNA: gi_17381031, supported by cDNA: gi_3738229 thaliana] >gi|11358883|pir||T51833 transcription
  misc_feature (3)..(113): Homolog of NCBI NO: 25992100 NR Description: dehydration responsive element binding protein
  misc_feature (15)..(166): Homolog of NCBI NO: 21536924 NR Description: AP2 domain transcription factor [Arabidopsis
  misc_feature (3)..(138): Homolog of NCBI NO: 15228427 NR Description: DRE binding protein (DREB2B); protein id: supported by cDNA: gi_3738231 [Arabidopsis thaliana]
MVGANKKQRTVQASSRKGCMRGKGGPDNASCTYKGVRQRTWGKWVAEIREPNRGARLWLGTFDTSREAALAYDSAARKLYGPEAHLNLPESLRSYPKTASSPASQTTPSSNTGGKSSSDSESPCSSNEMSSCGRVTEEISWEHINVDLPVMDDSSIWEEATMSLGFPWVHEGDNDISRFDTCISGGYSNWDSFHSPL

SEQ ID NO: 89950 - protein, 178 aa, Arabidopsis thaliana
  peptide (1)..(178): Ceres Seq. ID no. 12721551
  misc_feature (11)..(75): Pfam Name: AP2 domain Pfam Description: AP2 domain
  misc_feature (1)..(178): Homolog of NCBI NO: 9369375 NR Description: F10A5.29 [Arabidopsis thaliana]
  misc_feature (1)..(178): Homolog of NCBI NO: 15222261 NR Description: transcription factor, putative; protein id:
  misc_feature (1)..(172): Homolog of NCBI NO: 28071316 NR Description: P0705A05.24 [Oryza sativa (japonica
  misc_feature (1)..(97): Homolog of NCBI NO: 8346773 NR Description: AP2-domain DNA-binding protein [Catharanthus
  misc_feature (1)..(147): Homolog of NCBI NO: 18405354 NR Description: AP2 domain transcription factor; protein id: supported by cDNA: 115358. [Arabidopsis thaliana]
  misc_feature (1)..(69): Homolog of NCBI NO: 15238816 NR Description: AP2-domain DNA-binding protein -like; protein id:
  misc_feature (1)..(111): Homolog of NCBI NO: 15239107 NR Description: DRE binding protein (DREB2A); protein id: supported by cDNA: gi_17381031, supported by cDNA: gi_3738229 thaliana] >gi|11358883|pir||T51833 transcription
  misc_feature (1)..(94): Homolog of NCBI NO: 25992100 NR Description: dehydration responsive element binding protein
  misc_feature (1)..(147): Homolog of NCBI NO: 21536924 NR Description: AP2 domain transcription factor [Arabidopsis
  misc_feature (1)..(119): Homolog of NCBI NO: 15228427 NR Description: DRE binding protein (DREB2B); protein id: supported by cDNA: gi_3738231 [Arabidopsis thaliana]
MRGKGGPDNASCTYKGVRQRTWGKWVAEIREPNRGARLWLGTFDTSREAALAYDSAARKLYGPEAHLNLPESLRSYPKTASSPASQTTPSSNTGGKSSSDSESPCSSNEMSSCGRVTEEISWEHINVDLPVMDDSSIWEEATMSLGFPWVHEGDNDISRFDTCISGGYSNWDSFHSPL

SEQ ID NO: 89951 - DNA, 1041 bp, Arabidopsis thaliana
  misc_feature (1)..(1041): Ceres Seq. ID no. 12721552
  misc_feature: MA Experiment ID: 20000184 Result: Up-regulated in Transcription
  misc_feature: MA Experiment 20000184 PARAMETER Experiment Name: At_Shoots__P Parameter: Age (day) Value: 7
  misc_feature: MA Experiment 20000184 PARAMETER Experiment Name: At_Shoots__P Parameter: Tissue Value: Shoots vs. Whole Plant
  misc_feature: MA Experiment ID: 20000438 Result: Up-regulated in Transcription
  misc_feature: MA Experiment 20000438 PARAMETER Experiment Name: At_Shoots__P Parameter: Age (day) Value: 14
  misc_feature: MA Experiment 20000438 PARAMETER Experiment Name: At_Shoots__P Parameter: Tissue Value: Shoots vs. Whole Plant
atggcagggttcttctatctaggagggagagacaacaacagcaacaacaacaagcaagatcatcatcaagtagacaaggatcatcatcatcaagacaagagcaattatctttatctttacaaagacgagatctataataacaacaagggtttcgagatttggcctccgcaatacttccaacaacaagaacatcaacaacaacaacaacagcaacaacatgcctcagctcctgcaaacttctactcatttggaatggttcctagcggaagcagcagcaacaacaacaataaccgtagccggagtttatacttcaacgtagtctccgatcatgagccgggagggttcacggtgacgagacaaggaggtatgaattgtcaagattgtggaaatcaagctaagaaagattgtcctcatatgagatgtagaacttgttgtaaaagccgaggctttcattgtcaaactcacgttaagagcacttgggttcctgctgctaaacgtcgtgagcgtttagcccaactcgcttccttgcagcaccactcagcctccagccgtgaaacgcaaaacgccaaacgccttcgagaagctagtggtggtgataataatgatgataaagaccatagtggtggtggtggatcggctcttgctaatacccgtgtggtgaatgctaattctaattcagggttggaggtgagtcaacacttaccaccggaggttaactcaccggcgatattccggtgcgttagagtgagctcaatagaagaggatgaagatgatcaagcatatgcttaccaaacggctgtgaacattggaggccatatcttcaaaggcattctctatgaccaaggaccagaacatcaagataatcatcaccttaacctacttgcttccactgcaaccaccaccaatgtggaggagaccgccactaagactgtcaccggtaacaataataatggattaatgcttgatccttcttcgctttacccagctcaactcaactccttcatcgcgggtacgccattcttcacacctccgaggtcttga

SEQ ID NO: 89952 - protein, 346 aa, Arabidopsis thaliana
  peptide (1)..(346): Ceres Seq. ID no. 12721553
  misc_feature (116)..(286): Pfam Name: Domain of unknown function (DUF702) Pfam Description: Domain of unknown function (DUF702)
  misc_feature (1)..(346): Homolog of NCBI NO: 15222285 NR Description: unknown protein; protein id: At1g75520.1
  misc_feature (1)..(345): Homolog of NCBI NO: 15223669 NR Description: hypothetical protein; protein id: At1g19790.1
  misc_feature (1)..(346): Homolog of NCBI NO: 15239350 NR Description: zinc finger protein SHI-like; protein id: supported by cDNA: gi_4929802 [Arabidopsis thaliana] putative zinc finger protein SHI [Arabidopsis thaliana]
  misc_feature (46)..(346): Homolog of NCBI NO: 15234365 NR Description: putative protein; protein id: At4g36260.1
  misc_feature (86)..(327): Homolog of NCBI NO: 34906658 NR Description: putative LRP(lateral root primordia) 1 [Oryza
  misc_feature (189)..(286): Homolog of NCBI NO: 15224110 NR Description: unknown protein; protein id: At2g18120.1
  misc_feature (116)..(173): Homolog of NCBI NO: 15224110 NR Description: unknown protein; protein id: At2g18120.1
  misc_feature (92)..(287): Homolog of NCBI NO: 882341 NR Description: LRP1
  misc_feature (92)..(287): Homolog of NCBI NO: 18416839 NR Description: lateral root primordia (LRP1); protein id: [Arabidopsis thaliana] >gi|14586363|emb|CAC42894.1| lateral root
  misc_feature (233)..(292): Homolog of NCBI NO: 15226540 NR Description: hypothetical protein; protein id: At2g21400.1
MAGFFYLGGRDNNSNNNKQDHHQVDKDHHHQDKSNYLYLYKDEIYNNNKGFEIWPPQYFQQQEHQQQQQQQQHASAPANFYSFGMVPSGSSSNNNNNRSRSLYFNVVSDHEPGGFTVTRQGGMNCQDCGNQAKKDCPHMRCRTCCKSRGFHCQTHVKSTWVPAAKRRERLAQLASLQHHSASSRETQNAKRLREASGGDNNDDKDHSGGGGSALANTRVVNANSNSGLEVSQHLPPEVNSPAIFRCVRVSSIEEDEDDQAYAYQTAVNIGGHIFKGILYDQGPEHQDNHHLNLLASTATTTNVEETATKTVTGNNNNGLMLDPSSLYPAQLNSFIAGTPFFTPPRS

SEQ ID NO: 89953 - protein, 262 aa, Arabidopsis thaliana
  peptide (1)..(262): Ceres Seq. ID no. 12721554
  misc_feature (32)..(202): Pfam Name: Domain of unknown function (DUF702) Pfam Description: Domain of unknown function (DUF702)
  misc_feature (1)..(262): Homolog of NCBI NO: 15222285 NR Description: unknown protein; protein id: At1g75520.1
  misc_feature (1)..(261): Homolog of NCBI NO: 15223669 NR Description: hypothetical protein; protein id: At1g19790.1
  misc_feature (1)..(262): Homolog of NCBI NO: 15239350 NR Description: zinc finger protein SHI-like; protein id: supported by cDNA: gi_4929802 [Arabidopsis thaliana] putative zinc finger protein SHI [Arabidopsis thaliana]
  misc_feature (1)..(262): Homolog of NCBI NO: 15234365 NR Description: putative protein; protein id: At4g36260.1
  misc_feature (2)..(243): Homolog of NCBI NO: 34906658 NR Description: putative LRP(lateral root primordia) 1 [Oryza
  misc_feature (105)..(202): Homolog of NCBI NO: 15224110 NR Description: unknown protein; protein id: At2g18120.1
  misc_feature (32)..(89): Homolog of NCBI NO: 15224110 NR Description: unknown protein; protein id: At2g18120.1
  misc_feature (8)..(203): Homolog of NCBI NO: 882341 NR Description: LRP1
  misc_feature (8)..(203): Homolog of NCBI NO: 18416839 NR Description: lateral root primordia (LRP1); protein id: [Arabidopsis thaliana] >gi|14586363|emb|CAC42894.1| lateral root
  misc_feature (149)..(208): Homolog of NCBI NO: 15226540 NR Description: hypothetical protein; protein id: At2g21400.1
MVPSGSSSNNNNNRSRSLYFNVVSDHEPGGFTVTRQGGMNCQDCGNQAKKDCPHMRCRTCCKSRGFHCQTHVKSTWVPAAKRRERLAQLASLQHHSASSRETQNAKRLREASGGDNNDDKDHSGGGGSALANTRVVNANSNSGLEVSQHLPPEVNSPAIFRCVRVSSIEEDEDDQAYAYQTAVNIGGHIFKGILYDQGPEHQDNHHLNLLASTATTTNVEETATKTVTGNNNNGLMLDPSSLYPAQLNSFIAGTPFFTPPRS

SEQ ID NO: 89954 - protein, 224 aa, Arabidopsis thaliana
  peptide (1)..(224): Ceres Seq. ID no. 12721555
  misc_feature (1)..(164): Pfam Name: Domain of unknown function (DUF702) Pfam Description: Domain of unknown function (DUF702)
  misc_feature (1)..(224): Homolog of NCBI NO: 15222285 NR Description: unknown protein; protein id: At1g75520.1
  misc_feature (1)..(223): Homolog of NCBI NO: 15223669 NR Description: hypothetical protein; protein id: At1g19790.1
  misc_feature (1)..(224): Homolog of NCBI NO: 15239350 NR Description: zinc finger protein SHI-like; protein id: supported by cDNA: gi_4929802 [Arabidopsis thaliana] putative zinc finger protein SHI [Arabidopsis thaliana]
  misc_feature (1)..(224): Homolog of NCBI NO: 15234365 NR Description: putative protein; protein id: At4g36260.1
  misc_feature (1)..(205): Homolog of NCBI NO: 34906658 NR Description: putative LRP(lateral root primordia) 1 [Oryza
  misc_feature (67)..(164): Homolog of NCBI NO: 15224110 NR Description: unknown protein; protein id: At2g18120.1
  misc_feature (1)..(51): Homolog of NCBI NO: 15224110 NR Description: unknown protein; protein id: At2g18120.1
  misc_feature (1)..(165): Homolog of NCBI NO: 882341 NR Description: LRP1
  misc_feature (1)..(165): Homolog of NCBI NO: 18416839 NR Description: lateral root primordia (LRP1); protein id: [Arabidopsis thaliana] >gi|14586363|emb|CAC42894.1| lateral root
  misc_feature (111)..(170): Homolog of NCBI NO: 15226540 NR Description: hypothetical protein; protein id: At2g21400.1
MNCQDCGNQAKKDCPHMRCRTCCKSRGFHCQTHVKSTWVPAAKRRERLAQLASLQHHSASSRETQNAKRLREASGGDNNDDKDHSGGGGSALANTRVVNANSNSGLEVSQHLPPEVNSPAIFRCVRVSSIEEDEDDQAYAYQTAVNIGGHIFKGILYDQGPEHQDNHHLNLLASTATTTNVEETATKTVTGNNNNGLMLDPSSLYPAQLNSFIAGTPFFTPPRS

SEQ ID NO: 89955 - DNA, 996 bp, Arabidopsis thaliana
  misc_feature (1)..(996): Ceres Seq. ID no. 12721560
  misc_feature: MA Experiment ID: 20000184 Result: Up-regulated in Transcription
  misc_feature: MA Experiment 20000184 PARAMETER Experiment Name: At_Shoots__P Parameter: Age (day) Value: 7
  misc_feature: MA Experiment 20000184 PARAMETER Experiment Name: At_Shoots__P Parameter: Tissue Value: Shoots vs. Whole Plant
  misc_feature: MA Experiment ID: 20000185 Result: Up-regulated in Transcription
  misc_feature: MA Experiment 20000185 PARAMETER Experiment Name: At_Roots__P Parameter: Age (day) Value: 7 vs. 21
  misc_feature: MA Experiment 20000185 PARAMETER Experiment Name: At_Roots__P Parameter: Organism Value: A. thaliana
  misc_feature: MA Experiment 20000185 PARAMETER Experiment Name: At_Roots__P Parameter: Tissue Value: Roots vs. Whole Plant
  misc_feature: MA Experiment ID: 20000234 Result: Down-regulated in Transcription
  misc_feature: MA Experiment 20000234 PARAMETER Experiment Name: At_Siliques_P Parameter: Age (day) Value: 21
  misc_feature: MA Experiment 20000234 PARAMETER Experiment Name: At_Siliques_P Parameter: Organism Value: A. thaliana
  misc_feature: MA Experiment 20000234 PARAMETER Experiment Name: At_Siliques_P Parameter: Plant Line Value: WS
  misc_feature: MA Experiment 20000234 PARAMETER Experiment Name: At_Siliques_P Parameter: Tissue Value: Less Than 5mm Siliques vs. Whole Plant
  misc_feature: MA Experiment ID: 20000235 Result: Down-regulated in Transcription
  misc_feature: MA Experiment 20000235 PARAMETER Experiment Name: At_Siliques_P Parameter: Age (day) Value: 21
  misc_feature: MA Experiment 20000235 PARAMETER Experiment Name: At_Siliques_P Parameter: Organism Value: A. thaliana
  misc_feature: MA Experiment 20000235 PARAMETER Experiment Name: At_Siliques_P Parameter: Plant Line Value: WS
  misc_feature: MA Experiment 20000235 PARAMETER Experiment Name: At_Siliques_P Parameter: Tissue Value: 5-10mm Siliques vs. Whole Plant
  misc_feature: MA Experiment ID: 20000264 Result: Down-regulated in Transcription
  misc_feature: MA Experiment 20000264 PARAMETER Experiment Name: At_Open_Flower_P Parameter: Age (day) Value: 21
  misc_feature: MA Experiment 20000264 PARAMETER Experiment Name: At_Open_Flower_P Parameter: Plant Line Value: WS
  misc_feature: MA Experiment 20000264 PARAMETER Experiment Name: At_Open_Flower_P Parameter: Tissue Value: Open Flower vs. Whole Plant
  misc_feature: MA Experiment ID: 20000265 Result: Down-regulated in Transcription
  misc_feature: MA Experiment 20000265 PARAMETER Experiment Name: At_Open_Flower_P Parameter: Age (day) Value: 21
  misc_feature: MA Experiment 20000265 PARAMETER Experiment Name: At_Open_Flower_P Parameter: Plant Line Value: WS
  misc_feature: MA Experiment 20000265 PARAMETER Experiment Name: At_Open_Flower_P Parameter: Tissue Value: Closed Flower vs. Whole Plant
  misc_feature: MA Experiment ID: 20000286 Result: Down-regulated in Transcription
  misc_feature: MA Experiment 20000286 PARAMETER Experiment Name: At_Open_Flower_P Parameter: Age (day) Value: 21
  misc_feature: MA Experiment 20000286 PARAMETER Experiment Name: At_Open_Flower_P Parameter: Plant Line Value: WS
  misc_feature: MA Experiment 20000286 PARAMETER Experiment Name: At_Open_Flower_P Parameter: Tissue Value: Half Open vs. Whole Plant
  misc_feature: MA Experiment ID: 20000438 Result: Up-regulated in Transcription
  misc_feature: MA Experiment 20000438 PARAMETER Experiment Name: At_Shoots__P Parameter: Age (day) Value: 14
  misc_feature: MA Experiment 20000438 PARAMETER Experiment Name: At_Shoots__P Parameter: Tissue Value: Shoots vs. Whole Plant
  misc_feature: MA Experiment ID: 20000439 Result: Up-regulated in Transcription
  misc_feature: MA Experiment 20000439 PARAMETER Experiment Name: At_Roots__P Parameter: Age (day) Value: 14 vs. 21
  misc_feature: MA Experiment 20000439 PARAMETER Experiment Name: At_Roots__P Parameter: Organism Value: A. thaliana
  misc_feature: MA Experiment 20000439 PARAMETER Experiment Name: At_Roots__P Parameter: Tissue Value: Roots vs. Whole Plant
  misc_feature: MA Experiment ID: 20001450 Result: Up-regulated in Transcription
  misc_feature: MA Experiment 20001450 PARAMETER Experiment Name: At_Far-red-induction_P Parameter: Age (day) Value: 7
  misc_feature: MA Experiment 20001450 PARAMETER Experiment Name: At_Far-red-induction_P Parameter: Light Value: Far-red vs. White
  misc_feature: MA Experiment 20001450 PARAMETER Experiment Name: At_Far-red-induction_P Parameter: Organism Value: A. thaliana
  misc_feature: MA Experiment 20001450 PARAMETER Experiment Name: At_Far-red-induction_P Parameter: Plant Line Value: Columbia
  misc_feature: MA Experiment 20001450 PARAMETER Experiment Name: At_Far-red-induction_P Parameter: Timepoint (hr) Value: 8
  misc_feature: MA Experiment 20001450 PARAMETER Experiment Name: At_Far-red-induction_P Parameter: Tissue Value: Whole Plant
atgaagatcaggtgcgacgtctgcgataaagaagaagcgtcggtgttttgcacggccgacgaagcatctctctgcggcggctgcgaccaccaagtccaccacgctaacaaactcgcctctaaacatctccgtttctctctcctttatccttcttcttccaacacctcctctcctctctgcgacatctgtcaggataaaaaagctctgttgttctgtcaacaagatagagctattttatgcaaagattgcgattcatcgatccacgctgcgaacgaacacacaaagaaacacgataggtttcttcttacaggggttaagctctctgcaacatcgtctgtttacaaacctacttcgaaatcttcttcttcttcttcaagcaaccaagatttctctgtccctggatcatcaatctctaatcctcctcctctcaagaaacctctctcagctcctcctcagagcaacaagatccaacccttttcgaagatcaacggcggtgatgcgtcggtgaatcagtggggatccacaagcacgatttctgagtatttgatggatacgttacctggttggcacgttgaggatttcctcgattcctctcttcctacttatggtttctctaagagtggtgatgatgatggagtgttaccatatatggaaccagaagatgacaacaacactaagagaaacaacaacaacaacaacaacaacaacaacaatacagtgtcacttccatctaagaatttagggatttgggtccctcagattccacaaactcttccttcttcatacccaaatcaatacttttctcaagacaacaacatacagtttgggatgtacaacaaagaaacatcaccagaagtagtgtcttttgctccaatacaaaacatgaaacaacaaggacagaacaacaagagatggtatgatgatggtggcttcactgtcccacagatcactcctcctcctctttcttctaataaaaagtttagatctttctggtaa

SEQ ID NO: 89956 - protein, 331 aa, Arabidopsis thaliana
  peptide (1)..(331): Ceres Seq. ID no. 12721561
  misc_feature (55)..(102): Pfam Name: B-box zinc finger Pfam Description: B-box zinc finger
  misc_feature (1)..(331): Homolog of NCBI NO: 15222289 NR Description: CONSTANS B-box zinc finger family protein; id: At1g75540.1 [Arabidopsis thaliana]
  misc_feature (183)..(331): Homolog of NCBI NO: 28416601 NR Description: At1g75540 [Arabidopsis thaliana]
  misc_feature (1)..(196): Homolog of NCBI NO: 22329252 NR Description: CONSTANS B-box zinc finger family protein;
  misc_feature (1)..(196): Homolog of NCBI NO: 26452767 NR Description: putative zinc finger protein [Arabidopsis
  misc_feature (1)..(196): Homolog of NCBI NO: 7485796 NR Description: hypothetical protein F19H22.170 - Arabidopsis >gi|4539326|emb|CAB38827.1| putative zinc finger protein thaliana] >gi|7270890|emb|CAB80570.1| putative zinc finger
  misc_feature (1)..(220): Homolog of NCBI NO: 3618312 NR Description: zinc finger protein [Oryza sativa (japonica
  misc_feature (1)..(138): Homolog of NCBI NO: 38344979 NR Description: OSJNBa0011L07.9 [Oryza sativa (japonica
  misc_feature (1)..(151): Homolog of NCBI NO: 15221367 NR Description: salt-tolerance protein; protein id: At1g06040.1, by cDNA: 39912., supported by cDNA: gi_15027874, supported by
  misc_feature (1)..(151): Homolog of NCBI NO: 30679541 NR Description: salt-tolerance protein [Arabidopsis thaliana]
  misc_feature (1)..(261): Homolog of NCBI NO: 18412037 NR Description: CONSTANS B-box zinc finger family protein; id: At1g78600.1, supported by cDNA: 34830., supported by cDNA: [Arabidopsis thaliana] >gi|20260418|gb|AAM13107.1| highly similar
MKIRCDVCDKEEASVFCTADEASLCGGCDHQVHHANKLASKHLRFSLLYPSSSNTSSPLCDICQDKKALLFCQQDRAILCKDCDSSIHAANEHTKKHDRFLLTGVKLSATSSVYKPTSKSSSSSSSNQDFSVPGSSISNPPPLKKPLSAPPQSNKIQPFSKINGGDASVNQWGSTSTISEYLMDTLPGWHVEDFLDSSLPTYGFSKSGDDDGVLPYMEPEDDNNTKRNNNNNNNNNNNTVSLPSKNLGIWVPQIPQTLPSSYPNQYFSQDNNIQFGMYNKETSPEVVSFAPIQNMKQQGQNNKRWYDDGGFTVPQITPPPLSSNKKFRSFW

SEQ ID NO: 89957 - DNA, 348 bp, Arabidopsis thaliana
  misc_feature (1)..(348): Ceres Seq. ID no. 12721570
  misc_feature: MA Experiment ID: 20000328 Result: Down-regulated in Transcription
  misc_feature: MA Experiment 20000328 PARAMETER Experiment Name: At_42deg_Heat_Sub_P Parameter: Age (day) Value: 14
  misc_feature: MA Experiment 20000328 PARAMETER Experiment Name: At_42deg_Heat_Sub_P Parameter: Organism Value: A. thaliana
  misc_feature: MA Experiment 20000328 PARAMETER Experiment Name: At_42deg_Heat_Sub_P Parameter: Plant Line Value: WS
  misc_feature: MA Experiment 20000328 PARAMETER Experiment Name: At_42deg_Heat_Sub_P Parameter: Temperature (deg C) Value: 42 vs. 22
  misc_feature: MA Experiment 20000328 PARAMETER Experiment Name: At_42deg_Heat_Sub_P Parameter: Timepoint (hr) Value: 6
  misc_feature: MA Experiment 20000328 PARAMETER Experiment Name: At_42deg_Heat_Sub_P Parameter: Tissue Value: Aerial
  misc_feature: MA Experiment ID: 20000355 Result: Up-regulated in Transcription
  misc_feature: MA Experiment 20000355 PARAMETER Experiment Name: At_Siliques_Sub_P Parameter: Age (day) Value: 21
  misc_feature: MA Experiment 20000355 PARAMETER Experiment Name: At_Siliques_Sub_P Parameter: Organism Value: A. thaliana
  misc_feature: MA Experiment 20000355 PARAMETER Experiment Name: At_Siliques_Sub_P Parameter: Plant Line Value: WS
  misc_feature: MA Experiment 20000355 PARAMETER Experiment Name: At_Siliques_Sub_P Parameter: Tissue Value: Less Than 5mm Siliques vs. Whole Plant
  misc_feature: MA Experiment ID: 20000440 Result: Up-regulated in Transcription
  misc_feature: MA Experiment 20000440 PARAMETER Experiment Name: At_Closed-Flower__Sub_P Parameter: Tissue Value: Closed Flower vs. Whole Plant
atggatcttgcggcgaggaaatctgcgccaactaccggtggagtcaagaaacctcaccgttaccgtcccggaaccgtcgctcttcgtgagattcgtaaataccagaagagcacagagttgttgatccgtaaacttccttttcaacgtcttgttcgtgaaatcgcccaagatttcaagacggatctgagattccagagccatgcggtgttagctcttcaagaagctgcggaggcatatttggtgggtttgtttgaagacacaaatctgtgtgccattcatgcaaagagggttacgataatgcctaaagatgttcaattggcaagaaggattcgtggagagcgtgcttag

SEQ ID NO: 89958 - protein, 115 aa, Arabidopsis thaliana
  peptide (1)..(115): Ceres Seq. ID no. 12721571
  misc_feature (4)..(114): Pfam Name: Core histone H2A/H2B/H3/H4 Pfam Description: Core histone H2A/H2B/H3/H4
  misc_feature (1)..(115): Homolog of NCBI NO: 15222298 NR Description: unknown protein; protein id: At1g75610.1
  misc_feature (4)..(115): Homolog of NCBI NO: 25404986 NR Description: protein F10A5.19 [imported] - Arabidopsis >gi|9369379|gb|AAF87128.1|AC006434_24 F10A5.19 [Arabidopsis
  misc_feature (4)..(115): Homolog of NCBI NO: 81850 NR Description: histone H3 (clone pH3c-1) - alfalfa (fragment)
  misc_feature (4)..(115): Homolog of NCBI NO: 488571 NR Description: histone H3.2
  misc_feature (4)..(115): Homolog of NCBI NO: 488573 NR Description: histone H3.2 precursor [Medicago sativa]
  misc_feature (4)..(115): Homolog of NCBI NO: 15236103 NR Description: histone H3.3; protein id: At4g40030.1, supported cDNA: gi_14326561 [Arabidopsis thaliana] Histon H3; protein id: At4g40040.1, supported by cDNA: 2670.
  misc_feature (4)..(115): Homolog of NCBI NO: 4574208 NR Description: histone H3 [Tortula ruralis]
  misc_feature (4)..(115): Homolog of NCBI NO: 15222297 NR Description: histone H3, putative; protein id: At1g75600.1
  misc_feature (4)..(115): Homolog of NCBI NO: 18698662 NR Description: disease-resistent-related protein [Oryza sativa]
  misc_feature (4)..(115): Homolog of NCBI NO: 15222272 NR Description: histone H3 protein, putative; protein id: supported by cDNA: 268982. [Arabidopsis thaliana]
MDLAARKSAPTTGGVKKPHRYRPGTVALREIRKYQKSTELLIRKLPFQRLVREIAQDFKTDLRFQSHAVLALQEAAEAYLVGLFEDTNLCAIHAKRVTIMPKDVQLARRIRGERA

SEQ ID NO: 89959 - DNA, 1644 bp, Arabidopsis thaliana
  misc_feature (1)..(1644): Ceres Seq. ID no. 12721572
  misc_feature: MA Experiment ID: 20000184 Result: Up-regulated in Transcription
  misc_feature: MA Experiment 20000184 PARAMETER Experiment Name: At_Shoots__P Parameter: Age (day) Value: 7
  misc_feature: MA Experiment 20000184 PARAMETER Experiment Name: At_Shoots__P Parameter: Tissue Value: Shoots vs. Whole Plant
  misc_feature: MA Experiment ID: 20000185 Result: Up-regulated in Transcription
  misc_feature: MA Experiment 20000185 PARAMETER Experiment Name: At_Roots__P Parameter: Age (day) Value: 7 vs. 21
  misc_feature: MA Experiment 20000185 PARAMETER Experiment Name: At_Roots__P Parameter: Organism Value: A. thaliana
  misc_feature: MA Experiment 20000185 PARAMETER Experiment Name: At_Roots__P Parameter: Tissue Value: Roots vs. Whole Plant
  misc_feature: MA Experiment ID: 20000439 Result: Up-regulated in Transcription
  misc_feature: MA Experiment 20000439 PARAMETER Experiment Name: At_Roots__P Parameter: Age (day) Value: 14 vs. 21
  misc_feature: MA Experiment 20000439 PARAMETER Experiment Name: At_Roots__P Parameter: Organism Value: A. thaliana
  misc_feature: MA Experiment 20000439 PARAMETER Experiment Name: At_Roots__P Parameter: Tissue Value: Roots vs. Whole Plant
  misc_feature: MA Experiment ID: 20001904 Result: Up-regulated in Transcription
  misc_feature: MA Experiment 20001904 PARAMETER Experiment Name: At_Drought_Reproduction_P Parameter: Age (day) Value: 37
  misc_feature: MA Experiment 20001904 PARAMETER Experiment Name: At_Drought_Reproduction_P Parameter: Organism Value: A. thaliana
  misc_feature: MA Experiment 20001904 PARAMETER Experiment Name: At_Drought_Reproduction_P Parameter: Plant Line Value: WS
  misc_feature: MA Experiment 20001904 PARAMETER Experiment Name: At_Drought_Reproduction_P Parameter: Timepoint (day) Value: 7
  misc_feature: MA Experiment 20001904 PARAMETER Experiment Name: At_Drought_Reproduction_P Parameter: Tissue Value: Rosettes
  misc_feature: MA Experiment 20001904 PARAMETER Experiment Name: At_Drought_Reproduction_P Parameter: Treatment Value: Drought vs. No Drought
  misc_feature: MA Experiment ID: 20001906 Result: Down-regulated in Transcription
  misc_feature: MA Experiment 20001906 PARAMETER Experiment Name: At_Drought_Reproduction_P Parameter: Age (day) Value: 35
  misc_feature: MA Experiment 20001906 PARAMETER Experiment Name: At_Drought_Reproduction_P Parameter: Organism Value: A. thaliana
  misc_feature: MA Experiment 20001906 PARAMETER Experiment Name: At_Drought_Reproduction_P Parameter: Plant Line Value: WS
  misc_feature: MA Experiment 20001906 PARAMETER Experiment Name: At_Drought_Reproduction_P Parameter: Timepoint (day) Value: 5
  misc_feature: MA Experiment 20001906 PARAMETER Experiment Name: At_Drought_Reproduction_P Parameter: Tissue Value: Siliques
  misc_feature: MA Experiment 20001906 PARAMETER Experiment Name: At_Drought_Reproduction_P Parameter: Treatment Value: Drought vs. No Drought
atggctgcaaaagccacaacccaaatcgtctccgacgtcaatcatctccgatacttcgctgtcttctttctcctctcgtgccacgtggcatccggcgacgaaggaacatgggagcttctcttaccaaacgtcggaatctcagcaatgcactctcagctcctccacaacgaccgtgtcataatgtacgaccgaaccaacttcggtccttccaacatctctctccctaacggagcctgccgcagtagcccaggtgacgcggtctcgaaaaccgactgcaccgctcactcggtcgaatacgacgtagctttgaaccgtatccgtcccttaacggtccaatccaacacttggtgctcctcaggaggagtcactcccgacggaactcttctacaaacaggaggtgatttagacggagaacgtaaagttagacttatggatccttgcgacgacaattcttgtgactggatagaagtcgataacggactcgctgcaagaagatggtacgctacgaaccatatcctccccgacggtcgtcagatcataatcggtggtcgaggtcaattcaattacgagtttttccccaaaacaaacgctccaaatttctacagtatcccgtttttgtccgaaaccaatgatcctggagacgaaaacaatctttaccctttcgttttcctcaacaccgatggtaacttgttcattttcgctaacaacagagcgatattgctcgattattccacaaacactgtcgtcagaacttatccggagatccctggaggtgatccaagaagctatccaagcactggctccgctgttcttttaccgatcaagaaccttgtgttagaggttcttgtgtgcggaggtgcaccgaaaggatcgtacaacctctcttggagaaacacttttgtcaaggctcttgacacgtgtgcgagaatcaatatcaacgacgtgaatcctcaatggatcgttgaaaagatgccgagagcgagagttatgggagacatgatgcttttacctgacggaaatgttctgttaattaacggtggttcttcagggacagctgcttgggagcttggtcgtgaaccggttttacatcctgatctttaccatcccgataaaccggtcggttcaagatttgaagttcaaaacccaagcactatccctcgaatgtaccattctatcgcgactttgcttcgtgacgggagaattctcgttggaggaagcaaccctcacgcgttttacaatttcaccggcgtgcttttcccgacggagctgagattagaagctttttcgccgtcgtatttggacactaagtactcgagtcttcgtccgagtattgtggatcctaggccacagacaacggtaaactacggtagagtcttgaggcttaggtttattgtgagcggaagagtgaaaagtccggttaaagttacgatgttatttccttcgtttactacacattctttctcgatgcatcaaaggcttttggttcttgatcatgtcatttcttttaaactcgggattagcaagatttatgaagttagagttaggactccaagctctgcgattcttgcaccacccggttattacatggttttcgttgtaaaccaagatatacccagtgaaggtctttgggtacgtttacagtga

SEQ ID NO: 89960 - protein, 547 aa, Arabidopsis thaliana
  peptide (1)..(547): Ceres Seq. ID no. 12721573
  misc_feature (1)..(547): Homolog of NCBI NO: 15222300 NR Description: unknown protein; protein id: At1g75620.1 thaliana] >gi|9369366|gb|AAF87115.1|AC006434_11 F10A5.18
  misc_feature (23)..(547): Homolog of NCBI NO: 15223699 NR Description: unknown protein; protein id: At1g19900.1, by cDNA: gi_16604506 [Arabidopsis thaliana]
  misc_feature (49)..(547): Homolog of NCBI NO: 25352604 NR Description: hypothetical protein F6F9.4 [imported] - thaliana >gi|10086483|gb|AAG12543.1|AC007797_3 Unknown Protein
  misc_feature (37)..(547): Homolog of NCBI NO: 15230360 NR Description: putative protein; protein id: At3g57620.1 thaliana] >gi|7485502|pir||T06758 probable galactose oxidase (EC
  misc_feature (35)..(546): Homolog of NCBI NO: 25352602 NR Description: F14L17.20 protein - Arabidopsis thaliana Weak similarity to glyoxal oxidase (glx2) from Phanerochaete
  misc_feature (35)..(543): Homolog of NCBI NO: 15223754 NR Description: hypothetical protein; protein id: At1g14430.1
  misc_feature (23)..(546): Homolog of NCBI NO: 15232379 NR Description: putative protein; protein id: At3g53950.1, by cDNA: gi_15809875 [Arabidopsis thaliana]
  misc_feature (29)..(546): Homolog of NCBI NO: 15220398 NR Description: glyoxal oxidase (glx1), putative; protein id: [Arabidopsis thaliana] >gi|9828629|gb|AAG00252.1|AC002130_17 [Arabidopsis thaliana] >gi|27754377|gb|AAO22637.1| putative
  misc_feature (35)..(546): Homolog of NCBI NO: 15241135 NR Description: putative protein; protein id: At5g19580.1,
  misc_feature (35)..(546): Homolog of NCBI NO: 19310437 NR Description: AT5g19580/T20D1_100 [Arabidopsis thaliana]
MAAKATTQIVSDVNHLRYFAVFFLLSCHVASGDEGTWELLLPNVGISAMHSQLLHNDRVIMYDRTNFGPSNISLPNGACRSSPGDAVSKTDCTAHSVEYDVALNRIRPLTVQSNTWCSSGGVTPDGTLLQTGGDLDGERKVRLMDPCDDNSCDWIEVDNGLAARRWYATNHILPDGRQIIIGGRGQFNYEFFPKTNAPNFYSIPFLSETNDPGDENNLYPFVFLNTDGNLFIFANNRAILLDYSTNTVVRTYPEIPGGDPRSYPSTGSAVLLPIKNLVLEVLVCGGAPKGSYNLSWRNTFVKALDTCARININDVNPQWIVEKMPRARVMGDMMLLPDGNVLLINGGSSGTAAWELGREPVLHPDLYHPDKPVGSRFEVQNPSTIPRMYHSIATLLRDGRILVGGSNPHAFYNFTGVLFPTELRLEAFSPSYLDTKYSSLRPSIVDPRPQTTVNYGRVLRLRFIVSGRVKSPVKVTMLFPSFTTHSFSMHQRLLVLDHVISFKLGISKIYEVRVRTPSSAILAPPGYYMVFVVNQDIPSEGLWVRLQ

SEQ ID NO: 89961 - protein, 499 aa, Arabidopsis thaliana
  peptide (1)..(499): Ceres Seq. ID no. 12721574
  misc_feature (1)..(499): Homolog of NCBI NO: 15222300 NR Description: unknown protein; protein id: At1g75620.1 thaliana] >gi|9369366|gb|AAF87115.1|AC006434_11 F10A5.18
  misc_feature (1)..(499): Homolog of NCBI NO: 15223699 NR Description: unknown protein; protein id: At1g19900.1, by cDNA: gi_16604506 [Arabidopsis thaliana]
  misc_feature (1)..(499): Homolog of NCBI NO: 25352604 NR Description: hypothetical protein F6F9.4 [imported] - thaliana >gi|10086483|gb|AAG12543.1|AC007797_3 Unknown Protein
  misc_feature (1)..(499): Homolog of NCBI NO: 15230360 NR Description: putative protein; protein id: At3g57620.1 thaliana] >gi|7485502|pir||T06758 probable galactose oxidase (EC
  misc_feature (1)..(498): Homolog of NCBI NO: 25352602 NR Description: F14L17.20 protein - Arabidopsis thaliana Weak similarity to glyoxal oxidase (glx2) from Phanerochaete
  misc_feature (1)..(495): Homolog of NCBI NO: 15223754 NR Description: hypothetical protein; protein id: At1g14430.1
  misc_feature (1)..(498): Homolog of NCBI NO: 15232379 NR Description: putative protein; protein id: At3g53950.1, by cDNA: gi_15809875 [Arabidopsis thaliana]
  misc_feature (1)..(498): Homolog of NCBI NO: 15220398 NR Description: glyoxal oxidase (glx1), putative; protein id: [Arabidopsis thaliana] >gi|9828629|gb|AAG00252.1|AC002130_17 [Arabidopsis thaliana] >gi|27754377|gb|AAO22637.1| putative
  misc_feature (1)..(498): Homolog of NCBI NO: 15241135 NR Description: putative protein; protein id: At5g19580.1,
  misc_feature (1)..(498): Homolog of NCBI NO: 19310437 NR Description: AT5g19580/T20D1_100 [Arabidopsis thaliana]
MHSQLLHNDRVIMYDRTNFGPSNISLPNGACRSSPGDAVSKTDCTAHSVEYDVALNRIRPLTVQSNTWCSSGGVTPDGTLLQTGGDLDGERKVRLMDPCDDNSCDWIEVDNGLAARRWYATNHILPDGRQIIIGGRGQFNYEFFPKTNAPNFYSIPFLSETNDPGDENNLYPFVFLNTDGNLFIFANNRAILLDYSTNTVVRTYPEIPGGDPRSYPSTGSAVLLPIKNLVLEVLVCGGAPKGSYNLSWRNTFVKALDTCARININDVNPQWIVEKMPRARVMGDMMLLPDGNVLLINGGSSGTAAWELGREPVLHPDLYHPDKPVGSRFEVQNPSTIPRMYHSIATLLRDGRILVGGSNPHAFYNFTGVLFPTELRLEAFSPSYLDTKYSSLRPSIVDPRPQTTVNYGRVLRLRFIVSGRVKSPVKVTMLFPSFTTHSFSMHQRLLVLDHVISFKLGISKIYEVRVRTPSSAILAPPGYYMVFVVNQDIPSEGLWVRLQ

SEQ ID NO: 89962 - protein, 487 aa, Arabidopsis thaliana
  peptide (1)..(487): Ceres Seq. ID no. 12721575
  misc_feature (1)..(487): Homolog of NCBI NO: 15222300 NR Description: unknown protein; protein id: At1g75620.1 thaliana] >gi|9369366|gb|AAF87115.1|AC006434_11 F10A5.18
  misc_feature (1)..(487): Homolog of NCBI NO: 15223699 NR Description: unknown protein; protein id: At1g19900.1, by cDNA: gi_16604506 [Arabidopsis thaliana]
  misc_feature (1)..(487): Homolog of NCBI NO: 25352604 NR Description: hypothetical protein F6F9.4 [imported] - thaliana >gi|10086483|gb|AAG12543.1|AC007797_3 Unknown Protein
  misc_feature (1)..(487): Homolog of NCBI NO: 15230360 NR Description: putative protein; protein id: At3g57620.1 thaliana] >gi|7485502|pir||T06758 probable galactose oxidase (EC
  misc_feature (1)..(486): Homolog of NCBI NO: 25352602 NR Description: F14L17.20 protein - Arabidopsis thaliana Weak similarity to glyoxal oxidase (glx2) from Phanerochaete
  misc_feature (1)..(483): Homolog of NCBI NO: 15223754 NR Description: hypothetical protein; protein id: At1g14430.1
  misc_feature (1)..(486): Homolog of NCBI NO: 15232379 NR Description: putative protein; protein id: At3g53950.1, by cDNA: gi_15809875 [Arabidopsis thaliana]
  misc_feature (1)..(486): Homolog of NCBI NO: 15220398 NR Description: glyoxal oxidase (glx1), putative; protein id: [Arabidopsis thaliana] >gi|9828629|gb|AAG00252.1|AC002130_17 [Arabidopsis thaliana] >gi|27754377|gb|AAO22637.1| putative
  misc_feature (1)..(486): Homolog of NCBI NO: 15241135 NR Description: putative protein; protein id: At5g19580.1,
  misc_feature (1)..(486): Homolog of NCBI NO: 19310437 NR Description: AT5g19580/T20D1_100 [Arabidopsis thaliana]
MYDRTNFGPSNISLPNGACRSSPGDAVSKTDCTAHSVEYDVALNRIRPLTVQSNTWCSSGGVTPDGTLLQTGGDLDGERKVRLMDPCDDNSCDWIEVDNGLAARRWYATNHILPDGRQIIIGGRGQFNYEFFPKTNAPNFYSIPFLSETNDPGDENNLYPFVFLNTDGNLFIFANNRAILLDYSTNTVVRTYPEIPGGDPRSYPSTGSAVLLPIKNLVLEVLVCGGAPKGSYNLSWRNTFVKALDTCARININDVNPQWIVEKMPRARVMGDMMLLPDGNVLLINGGSSGTAAWELGREPVLHPDLYHPDKPVGSRFEVQNPSTIPRMYHSIATLLRDGRILVGGSNPHAFYNFTGVLFPTELRLEAFSPSYLDTKYSSLRPSIVDPRPQTTVNYGRVLRLRFIVSGRVKSPVKVTMLFPSFTTHSFSMHQRLLVLDHVISFKLGISKIYEVRVRTPSSAILAPPGYYMVFVVNQDIPSEGLWVRLQ

SEQ ID NO: 89963 - DNA, 501 bp, Arabidopsis thaliana
  misc_feature (1)..(501): Ceres Seq. ID no. 12721576
  misc_feature: MA Experiment ID: 20000794 Result: Up-regulated in Transcription
  misc_feature: MA Experiment 20000794 PARAMETER Experiment Name: At_Petals_P Parameter: Age (day) Value: 23-25 days
  misc_feature: MA Experiment 20000794 PARAMETER Experiment Name: At_Petals_P Parameter: Plant Line Value: WS
  misc_feature: MA Experiment 20000794 PARAMETER Experiment Name: At_Petals_P Parameter: Tissue Value: Petals vs. Whole plant
  misc_feature: MA Experiment ID: 20001554 Result: Up-regulated in Transcription
  misc_feature: MA Experiment 20001554 PARAMETER Experiment Name: At_Drought_Soil_Dry_P Parameter: Age (day) Value: 21
  misc_feature: MA Experiment 20001554 PARAMETER Experiment Name: At_Drought_Soil_Dry_P Parameter: Organism Value: A. thaliana
  misc_feature: MA Experiment 20001554 PARAMETER Experiment Name: At_Drought_Soil_Dry_P Parameter: Plant Line Value: WS
  misc_feature: MA Experiment 20001554 PARAMETER Experiment Name: At_Drought_Soil_Dry_P Parameter: Post Timepoint (hr) Value: None
  misc_feature: MA Experiment 20001554 PARAMETER Experiment Name: At_Drought_Soil_Dry_P Parameter: Post-Treatment Value: None
  misc_feature: MA Experiment 20001554 PARAMETER Experiment Name: At_Drought_Soil_Dry_P Parameter: Timepoint (day) Value: 7
  misc_feature: MA Experiment 20001554 PARAMETER Experiment Name: At_Drought_Soil_Dry_P Parameter: Treatment Value: Drought vs. No Drought
  misc_feature: MA Experiment ID: 20001757 Result: Down-regulated in Transcription
  misc_feature: MA Experiment 20001757 PARAMETER Experiment Name: At_50mM_NH4NO3_L-to-H_P Parameter: Timepoint (hr) Value: 6
  misc_feature: MA Experiment 20001757 PARAMETER Experiment Name: At_50mM_NH4NO3_L-to-H_P Parameter: Tissue Value: Leaf
  misc_feature: MA Experiment 20001757 PARAMETER Experiment Name: At_50mM_NH4NO3_L-to-H_P Parameter: Treatment Value: 50mM NH4NO3 vs 100mM Mannitol
  misc_feature: MA Experiment ID: 20001905 Result: Up-regulated in Transcription
  misc_feature: MA Experiment 20001905 PARAMETER Experiment Name: At_Drought_Reproduction_P Parameter: Age (day) Value: 40
  misc_feature: MA Experiment 20001905 PARAMETER Experiment Name: At_Drought_Reproduction_P Parameter: Organism Value: A. thaliana
  misc_feature: MA Experiment 20001905 PARAMETER Experiment Name: At_Drought_Reproduction_P Parameter: Plant Line Value: WS
  misc_feature: MA Experiment 20001905 PARAMETER Experiment Name: At_Drought_Reproduction_P Parameter: Timepoint (day) Value: 10
  misc_feature: MA Experiment 20001905 PARAMETER Experiment Name: At_Drought_Reproduction_P Parameter: Tissue Value: Rosettes
  misc_feature: MA Experiment 20001905 PARAMETER Experiment Name: At_Drought_Reproduction_P Parameter: Treatment Value: Drought vs. No Drought
atggtgtttggatatgcatatcctgcttatgagtgcttcaaaacggtcgaactcaacaagcctgaaattcaacaacttcagttctggtgccagtattggattattgtagctgctttgacgattttcgaaagaattggtgatgctcttgtttcttggttaccaatgtatagcgaggcgaagttggctttcttcatttatctctggtttccaaagactaaaggaacaacatacgtttacgattctttcttcaggccatatatagcaaagcatgaaaatgaaattgaccgcaacttggtgaaggtaaagactagagctaaggatatggcaatgatatatctccaaaaagcaatcaaccaagggcagaccaaattctttgagatcttacagtatatcacagaacaatcaacaccaaaatctaaggctgaggaaaagaaagagacaacaatacctaaactcgatgatccaattcttaaggtgaaagaaaacgaagtcactaaatga

SEQ ID NO: 89964 - protein, 166 aa, Arabidopsis thaliana
  peptide (1)..(166): Ceres Seq. ID no. 12721577
  misc_feature (2)..(87): Pfam Name: TB2/DP1, HVA22 family Pfam Description: TB2/DP1, HVA22 family
  misc_feature (1)..(166): Homolog of NCBI NO: 15222332 NR Description: hypothetical protein; protein id: At1g75700.1
  misc_feature (1)..(154): Homolog of NCBI NO: 18394805 NR Description: expressed protein; protein id: At1g19950.1, by cDNA: 147130., supported by cDNA: gi_15010625 [Arabidopsis >gi|15010626|gb|AAK73972.1| At1g19950/T20H2_25 [Arabidopsis
  misc_feature (1)..(154): Homolog of NCBI NO: 21553483 NR Description: pathogenicity protein PATH531-like protein
  misc_feature (1)..(154): Homolog of NCBI NO: 25513732 NR Description: T20H2.26 protein - Arabidopsis thaliana Contains similarity to Magnaporthe grisea pathogenicity protein
  misc_feature (1)..(145): Homolog of NCBI NO: 9759014 NR Description: gene_id:K16E1.3~unknown protein [Arabidopsis
  misc_feature (1)..(145): Homolog of NCBI NO: 18422223 NR Description: expressed protein; protein id: At5g42560.1,
  misc_feature (1)..(145): Homolog of NCBI NO: 21553813 NR Description: unknown [Arabidopsis thaliana]
  misc_feature (1)..(142): Homolog of NCBI NO: 20502988 NR Description: Putative InsB from Escherichia coli [Oryza sativa
  misc_feature (1)..(151): Homolog of NCBI NO: 37531658 NR Description: putative Magnaporthe grisea pathogenicity protein
  misc_feature (1)..(139): Homolog of NCBI NO: 21671921 NR Description: Putative protein with HVA22 domain [Oryza sativa
MVFGYAYPAYECFKTVELNKPEIQQLQFWCQYWIIVAALTIFERIGDALVSWLPMYSEAKLAFFIYLWFPKTKGTTYVYDSFFRPYIAKHENEIDRNLVKVKTRAKDMAMIYLQKAINQGQTKFFEILQYITEQSTPKSKAEEKKETTIPKLDDPILKVKENEVTK

SEQ ID NO: 89965 - protein, 112 aa, Arabidopsis thaliana
  peptide (1)..(112): Ceres Seq. ID no. 12721578
  misc_feature (1)..(112): Homolog of NCBI NO: 15222332 NR Description: hypothetical protein; protein id: At1g75700.1
  misc_feature (1)..(100): Homolog of NCBI NO: 18394805 NR Description: expressed protein; protein id: At1g19950.1, by cDNA: 147130., supported by cDNA: gi_15010625 [Arabidopsis >gi|15010626|gb|AAK73972.1| At1g19950/T20H2_25 [Arabidopsis
  misc_feature (1)..(100): Homolog of NCBI NO: 25513732 NR Description: T20H2.26 protein - Arabidopsis thaliana Contains similarity to Magnaporthe grisea pathogenicity protein
  misc_feature (1)..(100): Homolog of NCBI NO: 21553483 NR Description: pathogenicity protein PATH531-like protein
  misc_feature (1)..(91): Homolog of NCBI NO: 9759014 NR Description: gene_id:K16E1.3~unknown protein [Arabidopsis
  misc_feature (1)..(91): Homolog of NCBI NO: 21553813 NR Description: unknown [Arabidopsis thaliana]
  misc_feature (1)..(91): Homolog of NCBI NO: 18422223 NR Description: expressed protein; protein id: At5g42560.1,
  misc_feature (1)..(88): Homolog of NCBI NO: 20502988 NR Description: Putative InsB from Escherichia coli [Oryza sativa
  misc_feature (1)..(97): Homolog of NCBI NO: 37531658 NR Description: putative Magnaporthe grisea pathogenicity protein
  misc_feature (1)..(85): Homolog of NCBI NO: 21671921 NR Description: Putative protein with HVA22 domain [Oryza sativa
MYSEAKLAFFIYLWFPKTKGTTYVYDSFFRPYIAKHENEIDRNLVKVKTRAKDMAMIYLQKAINQGQTKFFEILQYITEQSTPKSKAEEKKETTIPKLDDPILKVKENEVTK

SEQ ID NO: 89966 - DNA, 1140 bp, Arabidopsis thaliana
  misc_feature (1)..(1140): Ceres Seq. ID no. 12721590
  misc_feature: MA Experiment ID: 20000234 Result: Up-regulated in Transcription
  misc_feature: MA Experiment 20000234 PARAMETER Experiment Name: At_Siliques_P Parameter: Age (day) Value: 21
  misc_feature: MA Experiment 20000234 PARAMETER Experiment Name: At_Siliques_P Parameter: Organism Value: A. thaliana
  misc_feature: MA Experiment 20000234 PARAMETER Experiment Name: At_Siliques_P Parameter: Plant Line Value: WS
  misc_feature: MA Experiment 20000234 PARAMETER Experiment Name: At_Siliques_P Parameter: Tissue Value: Less Than 5mm Siliques vs. Whole Plant
  misc_feature: MA Experiment ID: 20000265 Result: Up-regulated in Transcription
  misc_feature: MA Experiment 20000265 PARAMETER Experiment Name: At_Open_Flower_P Parameter: Age (day) Value: 21
  misc_feature: MA Experiment 20000265 PARAMETER Experiment Name: At_Open_Flower_P Parameter: Plant Line Value: WS
  misc_feature: MA Experiment 20000265 PARAMETER Experiment Name: At_Open_Flower_P Parameter: Tissue Value: Closed Flower vs. Whole Plant
  misc_feature: MA Experiment ID: 20000286 Result: Up-regulated in Transcription
  misc_feature: MA Experiment 20000286 PARAMETER Experiment Name: At_Open_Flower_P Parameter: Age (day) Value: 21
  misc_feature: MA Experiment 20000286 PARAMETER Experiment Name: At_Open_Flower_P Parameter: Plant Line Value: WS
  misc_feature: MA Experiment 20000286 PARAMETER Experiment Name: At_Open_Flower_P Parameter: Tissue Value: Half Open vs. Whole Plant
  misc_feature: MA Experiment ID: 20000441 Result: Down-regulated in Transcription
  misc_feature: MA Experiment 20000441 PARAMETER Experiment Name: At_1uM_BR-BRZ__P Parameter: Tissue Value: Shoot Apices
  misc_feature: MA Experiment 20000441 PARAMETER Experiment Name: At_1uM_BR-BRZ__P Parameter: Treatment Value: 1uM BR vs. No Treatment
  misc_feature: MA Experiment ID: 20000443 Result: Down-regulated in Transcription
  misc_feature: MA Experiment 20000443 PARAMETER Experiment Name: At_1uM_BR-BRZ__P Parameter: Tissue Value: Shoot Apices
  misc_feature: MA Experiment 20000443 PARAMETER Experiment Name: At_1uM_BR-BRZ__P Parameter: Treatment Value: 1uM BRZ vs. No Treatment
  misc_feature: MA Experiment ID: 20001910 Result: Down-regulated in Transcription
  misc_feature: MA Experiment 20001910 PARAMETER Experiment Name: At_Drought_Reproduction_P Parameter: Age (day) Value: 37
  misc_feature: MA Experiment 20001910 PARAMETER Experiment Name: At_Drought_Reproduction_P Parameter: Organism Value: A. thaliana
  misc_feature: MA Experiment 20001910 PARAMETER Experiment Name: At_Drought_Reproduction_P Parameter: Plant Line Value: WS
  misc_feature: MA Experiment 20001910 PARAMETER Experiment Name: At_Drought_Reproduction_P Parameter: Timepoint (day) Value: 7
  misc_feature: MA Experiment 20001910 PARAMETER Experiment Name: At_Drought_Reproduction_P Parameter: Tissue Value: Flowers
  misc_feature: MA Experiment 20001910 PARAMETER Experiment Name: At_Drought_Reproduction_P Parameter: Treatment Value: Drought vs. No Drought
atgaaacgaaacagtataaatattcatcacgttacttctttttcttcgagtccgttttggtgtgttttctttctcgtgttgttatgtaagacgtccaccaacgctttggtgaagcagccgccaaacgaaacgactccggcgataattgtgttcggagattcaatcgttgatgccggaaataatgacgacattatgacaacgttggctagatgcaattatcctccttacggcatcgattttgacggtggaattcctaccggaagattttgcaacggcaaagttgcgactgattttatagcgggaaaattcggaattaaaccaagtataccggcatatcgaaatccaaatttgaaaccagaagatctcttaaccggtgtaacatttgcgtctggtggtgctggttacgttcccttcacaacccaattatcgacgtacctttttatatataaaccattgttgttcttaaagggaggaatagctttatcgcagcaactgaagttattcgaagagtatgtagagaagatgaagaaaatggttggggaagaaaggacaaagctcataattaaaaacagtttgttcatggttatatgtggcagtaatgatataaccaacacctactttggtcttccttctgttcaacaacaatacgacgtcgcttcctttaccactcttatggccgacaatgctcgatcttttgctcaaaaattacatgaatatggagcgaggagaatacaagtattcggtgcaccaccagtaggatgtgtcccatcacagagaaccttagcaggagggccaacaagaaattgtgttgttaggttcaatgatgcaacaaagctctacaatgttaagctcgctgcaaatttgggttctttgtcaagaactttaggagacaagacaataatctacgttgacatatatgattctctccttgatatcattcttgaccctcgacaatatggatttaaggtggttgataaaggatgttgtggaactggactaattgaagttgctcttttatgcaacaactttgcagctgatgtatgtccaaatagagatgaatatgtgttttgggatagtttccatccgactgagaagacttacagaattatggccacaaaatattttgagagatatgtatga

SEQ ID NO: 89967 - protein, 379 aa, Arabidopsis thaliana
  peptide (1)..(379): Ceres Seq. ID no. 12721591
  misc_feature (48)..(374): Pfam Name: GDSL-like Lipase/Acylhydrolase Pfam Description: GDSL-like Lipase/Acylhydrolase
  misc_feature (1)..(379): Homolog of NCBI NO: 18410956 NR Description: family II extracellular lipase 2 (EXL2); protein At1g75890.1, supported by cDNA: gi_15054383 [Arabidopsis >gi|15054384|gb|AAK30017.1| family II lipase EXL2 [Arabidopsis
  misc_feature (31)..(379): Homolog of NCBI NO: 8778807 NR Description: T4O12.12 [Arabidopsis thaliana]
  misc_feature (1)..(379): Homolog of NCBI NO: 18410954 NR Description: family II extracellular lipase 1 (EXL1); protein At1g75880.1, supported by cDNA: gi_15054381 [Arabidopsis >gi|15054382|gb|AAK30016.1| family II lipase EXL1 [Arabidopsis
  misc_feature (1)..(379): Homolog of NCBI NO: 28393626 NR Description: putative family II extracellular lipase 1 (EXL1) thaliana] >gi|28827430|gb|AAO50559.1| putative family II
  misc_feature (1)..(350): Homolog of NCBI NO: 8778807 NR Description: T4O12.12 [Arabidopsis thaliana]
  misc_feature (20)..(379): Homolog of NCBI NO: 15222901 NR Description: family II extracellular lipase 3 (EXL3); protein At1g75900.1, supported by cDNA: gi_15054385 [Arabidopsis >gi|15054386|gb|AAK30018.1| family II lipase EXL3 [Arabidopsis
  misc_feature (20)..(379): Homolog of NCBI NO: 26449364 NR Description: putative family II lipase EXL3 [Arabidopsis
  misc_feature (20)..(378): Homolog of NCBI NO: 25404994 NR Description: protein T4O12.13 [imported] - Arabidopsis >gi|8778808|gb|AAF79815.1|AC007396_8 T4O12.13 [Arabidopsis
  misc_feature (35)..(376): Homolog of NCBI NO: 18394825 NR Description: anter-specific proline-rich protein APG putative; protein id: At1g20120.1, supported by cDNA: 22980.
  misc_feature (35)..(376): Homolog of NCBI NO: 21592372 NR Description: anter-specific proline-rich protein APG
MKRNSINIHHVTSFSSSPFWCVFFLVLLCKTSTNALVKQPPNETTPAIIVFGDSIVDAGNNDDIMTTLARCNYPPYGIDFDGGIPTGRFCNGKVATDFIAGKFGIKPSIPAYRNPNLKPEDLLTGVTFASGGAGYVPFTTQLSTYLFIYKPLLFLKGGIALSQQLKLFEEYVEKMKKMVGEERTKLIIKNSLFMVICGSNDITNTYFGLPSVQQQYDVASFTTLMADNARSFAQKLHEYGARRIQVFGAPPVGCVPSQRTLAGGPTRNCVVRFNDATKLYNVKLAANLGSLSRTLGDKTIIYVDIYDSLLDIILDPRQYGFKVVDKGCCGTGLIEVALLCNNFAADVCPNRDEYVFWDSFHPTEKTYRIMATKYFERYV

SEQ ID NO: 89968 - protein, 315 aa, Arabidopsis thaliana
  peptide (1)..(315): Ceres Seq. ID no. 12721592
  misc_feature (1)..(310): Pfam Name: GDSL-like Lipase/Acylhydrolase Pfam Description: GDSL-like Lipase/Acylhydrolase
  misc_feature (1)..(315): Homolog of NCBI NO: 18410956 NR Description: family II extracellular lipase 2 (EXL2); protein At1g75890.1, supported by cDNA: gi_15054383 [Arabidopsis >gi|15054384|gb|AAK30017.1| family II lipase EXL2 [Arabidopsis
  misc_feature (1)..(315): Homolog of NCBI NO: 8778807 NR Description: T4O12.12 [Arabidopsis thaliana]
  misc_feature (1)..(315): Homolog of NCBI NO: 18410954 NR Description: family II extracellular lipase 1 (EXL1); protein At1g75880.1, supported by cDNA: gi_15054381 [Arabidopsis >gi|15054382|gb|AAK30016.1| family II lipase EXL1 [Arabidopsis
  misc_feature (1)..(315): Homolog of NCBI NO: 28393626 NR Description: putative family II extracellular lipase 1 (EXL1) thaliana] >gi|28827430|gb|AAO50559.1| putative family II
  misc_feature (1)..(286): Homolog of NCBI NO: 8778807 NR Description: T4O12.12 [Arabidopsis thaliana]
  misc_feature (1)..(315): Homolog of NCBI NO: 15222901 NR Description: family II extracellular lipase 3 (EXL3); protein At1g75900.1, supported by cDNA: gi_15054385 [Arabidopsis >gi|15054386|gb|AAK30018.1| family II lipase EXL3 [Arabidopsis
  misc_feature (1)..(315): Homolog of NCBI NO: 26449364 NR Description: putative family II lipase EXL3 [Arabidopsis
  misc_feature (1)..(314): Homolog of NCBI NO: 25404994 NR Description: protein T4O12.13 [imported] - Arabidopsis >gi|8778808|gb|AAF79815.1|AC007396_8 T4O12.13 [Arabidopsis
  misc_feature (1)..(312): Homolog of NCBI NO: 18394825 NR Description: anter-specific proline-rich protein APG putative; protein id: At1g20120.1, supported by cDNA: 22980.
  misc_feature (1)..(312): Homolog of NCBI NO: 21592372 NR Description: anter-specific proline-rich protein APG
MTTLARCNYPPYGIDFDGGIPTGRFCNGKVATDFIAGKFGIKPSIPAYRNPNLKPEDLLTGVTFASGGAGYVPFTTQLSTYLFIYKPLLFLKGGIALSQQLKLFEEYVEKMKKMVGEERTKLIIKNSLFMVICGSNDITNTYFGLPSVQQQYDVASFTTLMADNARSFAQKLHEYGARRIQVFGAPPVGCVPSQRTLAGGPTRNCVVRFNDATKLYNVKLAANLGSLSRTLGDKTIIYVDIYDSLLDIILDPRQYGFKVVDKGCCGTGLIEVALLCNNFAADVCPNRDEYVFWDSFHPTEKTYRIMATKYFERYV

SEQ ID NO: 89969 - protein, 205 aa, Arabidopsis thaliana
  peptide (1)..(205): Ceres Seq. ID no. 12721593
  misc_feature (1)..(200): Pfam Name: GDSL-like Lipase/Acylhydrolase Pfam Description: GDSL-like Lipase/Acylhydrolase
  misc_feature (1)..(205): Homolog of NCBI NO: 18410956 NR Description: family II extracellular lipase 2 (EXL2); protein At1g75890.1, supported by cDNA: gi_15054383 [Arabidopsis >gi|15054384|gb|AAK30017.1| family II lipase EXL2 [Arabidopsis
  misc_feature (1)..(205): Homolog of NCBI NO: 8778807 NR Description: T4O12.12 [Arabidopsis thaliana]
  misc_feature (1)..(205): Homolog of NCBI NO: 18410954 NR Description: family II extracellular lipase 1 (EXL1); protein At1g75880.1, supported by cDNA: gi_15054381 [Arabidopsis >gi|15054382|gb|AAK30016.1| family II lipase EXL1 [Arabidopsis
  misc_feature (1)..(205): Homolog of NCBI NO: 28393626 NR Description: putative family II extracellular lipase 1 (EXL1) thaliana] >gi|28827430|gb|AAO50559.1| putative family II
  misc_feature (1)..(176): Homolog of NCBI NO: 8778807 NR Description: T4O12.12 [Arabidopsis thaliana]
  misc_feature (1)..(205): Homolog of NCBI NO: 15222901 NR Description: family II extracellular lipase 3 (EXL3); protein At1g75900.1, supported by cDNA: gi_15054385 [Arabidopsis >gi|15054386|gb|AAK30018.1| family II lipase EXL3 [Arabidopsis
  misc_feature (1)..(205): Homolog of NCBI NO: 26449364 NR Description: putative family II lipase EXL3 [Arabidopsis
  misc_feature (1)..(204): Homolog of NCBI NO: 25404994 NR Description: protein T4O12.13 [imported] - Arabidopsis >gi|8778808|gb|AAF79815.1|AC007396_8 T4O12.13 [Arabidopsis
  misc_feature (1)..(202): Homolog of NCBI NO: 18394825 NR Description: anter-specific proline-rich protein APG putative; protein id: At1g20120.1, supported by cDNA: 22980.
  misc_feature (1)..(202): Homolog of NCBI NO: 21592372 NR Description: anter-specific proline-rich protein APG
MKKMVGEERTKLIIKNSLFMVICGSNDITNTYFGLPSVQQQYDVASFTTLMADNARSFAQKLHEYGARRIQVFGAPPVGCVPSQRTLAGGPTRNCVVRFNDATKLYNVKLAANLGSLSRTLGDKTIIYVDIYDSLLDIILDPRQYGFKVVDKGCCGTGLIEVALLCNNFAADVCPNRDEYVFWDSFHPTEKTYRIMATKYFERYV

SEQ ID NO: 89970 - DNA, 927 bp, Arabidopsis thaliana
  misc_feature (1)..(927): Ceres Seq. ID no. 12721605
  misc_feature: MA Experiment ID: 20000169 Result: Down-regulated in Transcription
  misc_feature: MA Experiment 20000169 PARAMETER Experiment Name: At_100uM_ABA_P Parameter: Age (day) Value: 14
  misc_feature: MA Experiment 20000169 PARAMETER Experiment Name: At_100uM_ABA_P Parameter: Organism Value: A. thaliana
  misc_feature: MA Experiment 20000169 PARAMETER Experiment Name: At_100uM_ABA_P Parameter: Plant Line Value: WS
  misc_feature: MA Experiment 20000169 PARAMETER Experiment Name: At_100uM_ABA_P Parameter: Timepoint (hr) Value: 6
  misc_feature: MA Experiment 20000169 PARAMETER Experiment Name: At_100uM_ABA_P Parameter: Tissue Value: Aerial
  misc_feature: MA Experiment 20000169 PARAMETER Experiment Name: At_100uM_ABA_P Parameter: Treatment Value: 100uM ABA vs. No Treatment
  misc_feature: MA Experiment ID: 20000184 Result: Up-regulated in Transcription
  misc_feature: MA Experiment 20000184 PARAMETER Experiment Name: At_Shoots__P Parameter: Age (day) Value: 7
  misc_feature: MA Experiment 20000184 PARAMETER Experiment Name: At_Shoots__P Parameter: Tissue Value: Shoots vs. Whole Plant
  misc_feature: MA Experiment ID: 20000185 Result: Up-regulated in Transcription
  misc_feature: MA Experiment 20000185 PARAMETER Experiment Name: At_Roots__P Parameter: Age (day) Value: 7 vs. 21
  misc_feature: MA Experiment 20000185 PARAMETER Experiment Name: At_Roots__P Parameter: Organism Value: A. thaliana
  misc_feature: MA Experiment 20000185 PARAMETER Experiment Name: At_Roots__P Parameter: Tissue Value: Roots vs. Whole Plant
  misc_feature: MA Experiment ID: 20000227 Result: Up-regulated in Transcription
  misc_feature: MA Experiment 20000227 PARAMETER Experiment Name: At_Root-Tips-vs-Tops_P Parameter: Tissue Value: Root Tips vs. Root Tops
  misc_feature: MA Experiment ID: 20000234 Result: Down-regulated in Transcription
  misc_feature: MA Experiment 20000234 PARAMETER Experiment Name: At_Siliques_P Parameter: Age (day) Value: 21
  misc_feature: MA Experiment 20000234 PARAMETER Experiment Name: At_Siliques_P Parameter: Organism Value: A. thaliana
  misc_feature: MA Experiment 20000234 PARAMETER Experiment Name: At_Siliques_P Parameter: Plant Line Value: WS
  misc_feature: MA Experiment 20000234 PARAMETER Experiment Name: At_Siliques_P Parameter: Tissue Value: Less Than 5mm Siliques vs. Whole Plant
  misc_feature: MA Experiment ID: 20000264 Result: Up-regulated in Transcription
  misc_feature: MA Experiment 20000264 PARAMETER Experiment Name: At_Open_Flower_P Parameter: Age (day) Value: 21
  misc_feature: MA Experiment 20000264 PARAMETER Experiment Name: At_Open_Flower_P Parameter: Plant Line Value: WS
  misc_feature: MA Experiment 20000264 PARAMETER Experiment Name: At_Open_Flower_P Parameter: Tissue Value: Open Flower vs. Whole Plant
  misc_feature: MA Experiment ID: 20000308 Result: Down-regulated in Transcription
  misc_feature: MA Experiment 20000308 PARAMETER Experiment Name: At_100mM_NaCl__P Parameter: Age (day) Value: 17
  misc_feature: MA Experiment 20000308 PARAMETER Experiment Name: At_100mM_NaCl__P Parameter: Organism Value: A. thaliana
  misc_feature: MA Experiment 20000308 PARAMETER Experiment Name: At_100mM_NaCl__P Parameter: Plant Line Value: WS
  misc_feature: MA Experiment 20000308 PARAMETER Experiment Name: At_100mM_NaCl__P Parameter: Timepoint (hr) Value: 72
  misc_feature: MA Experiment 20000308 PARAMETER Experiment Name: At_100mM_NaCl__P Parameter: Tissue Value: Whole Plant
  misc_feature: MA Experiment 20000308 PARAMETER Experiment Name: At_100mM_NaCl__P Parameter: Treatment Value: 100mM NaCl vs. No Treatment
  misc_feature: MA Experiment ID: 20000438 Result: Up-regulated in Transcription
  misc_feature: MA Experiment 20000438 PARAMETER Experiment Name: At_Shoots__P Parameter: Age (day) Value: 14
  misc_feature: MA Experiment 20000438 PARAMETER Experiment Name: At_Shoots__P Parameter: Tissue Value: Shoots vs. Whole Plant
  misc_feature: MA Experiment ID: 20000453 Result: Down-regulated in Transcription
  misc_feature: MA Experiment 20000453 PARAMETER Experiment Name: At_100uM_ABA_P Parameter: Age (day) Value: 15
  misc_feature: MA Experiment 20000453 PARAMETER Experiment Name: At_100uM_ABA_P Parameter: Organism Value: A. thaliana
  misc_feature: MA Experiment 20000453 PARAMETER Experiment Name: At_100uM_ABA_P Parameter: Plant Line Value: WS
  misc_feature: MA Experiment 20000453 PARAMETER Experiment Name: At_100uM_ABA_P Parameter: Timepoint (hr) Value: 24
  misc_feature: MA Experiment 20000453 PARAMETER Experiment Name: At_100uM_ABA_P Parameter: Tissue Value: Aerial
  misc_feature: MA Experiment 20000453 PARAMETER Experiment Name: At_100uM_ABA_P Parameter: Treatment Value: 100uM ABA vs. No Treatment
  misc_feature: MA Experiment ID: 20000455 Result: Down-regulated in Transcription
  misc_feature: MA Experiment 20000455 PARAMETER Experiment Name: At_100uM_ABA_P Parameter: Age (day) Value: 16
  misc_feature: MA Experiment 20000455 PARAMETER Experiment Name: At_100uM_ABA_P Parameter: Organism Value: A. thaliana
  misc_feature: MA Experiment 20000455 PARAMETER Experiment Name: At_100uM_ABA_P Parameter: Plant Line Value: WS
  misc_feature: MA Experiment 20000455 PARAMETER Experiment Name: At_100uM_ABA_P Parameter: Timepoint (hr) Value: 48
  misc_feature: MA Experiment 20000455 PARAMETER Experiment Name: At_100uM_ABA_P Parameter: Tissue Value: Aerial
  misc_feature: MA Experiment 20000455 PARAMETER Experiment Name: At_100uM_ABA_P Parameter: Treatment Value: 100uM ABA vs. No Treatment
  misc_feature: MA Experiment ID: 20000794 Result: Up-regulated in Transcription
  misc_feature: MA Experiment 20000794 PARAMETER Experiment Name: At_Petals_P Parameter: Age (day) Value: 23-25 days
  misc_feature: MA Experiment 20000794 PARAMETER Experiment Name: At_Petals_P Parameter: Plant Line Value: WS
  misc_feature: MA Experiment 20000794 PARAMETER Experiment Name: At_Petals_P Parameter: Tissue Value: Petals vs. Whole plant
  misc_feature: MA Experiment ID: 20001248 Result: Down-regulated in Transcription
  misc_feature: MA Experiment 20001248 PARAMETER Experiment Name: At_Far-red-induction_P Parameter: Age (day) Value: 7
  misc_feature: MA Experiment 20001248 PARAMETER Experiment Name: At_Far-red-induction_P Parameter: Light Value: Far-red vs. White
  misc_feature: MA Experiment 20001248 PARAMETER Experiment Name: At_Far-red-induction_P Parameter: Organism Value: A. thaliana
  misc_feature: MA Experiment 20001248 PARAMETER Experiment Name: At_Far-red-induction_P Parameter: Plant Line Value: Columbia
  misc_feature: MA Experiment 20001248 PARAMETER Experiment Name: At_Far-red-induction_P Parameter: Timepoint (hr) Value: 4
  misc_feature: MA Experiment 20001248 PARAMETER Experiment Name: At_Far-red-induction_P Parameter: Tissue Value: Whole Plant
  misc_feature: MA Experiment ID: 20001554 Result: Down-regulated in Transcription
  misc_feature: MA Experiment 20001554 PARAMETER Experiment Name: At_Drought_Soil_Dry_P Parameter: Age (day) Value: 21
  misc_feature: MA Experiment 20001554 PARAMETER Experiment Name: At_Drought_Soil_Dry_P Parameter: Organism Value: A. thaliana
  misc_feature: MA Experiment 20001554 PARAMETER Experiment Name: At_Drought_Soil_Dry_P Parameter: Plant Line Value: WS
  misc_feature: MA Experiment 20001554 PARAMETER Experiment Name: At_Drought_Soil_Dry_P Parameter: Post Timepoint (hr) Value: None
  misc_feature: MA Experiment 20001554 PARAMETER Experiment Name: At_Drought_Soil_Dry_P Parameter: Post-Treatment Value: None
  misc_feature: MA Experiment 20001554 PARAMETER Experiment Name: At_Drought_Soil_Dry_P Parameter: Timepoint (day) Value: 7
  misc_feature: MA Experiment 20001554 PARAMETER Experiment Name: At_Drought_Soil_Dry_P Parameter: Treatment Value: Drought vs. No Drought
  misc_feature: MA Experiment ID: 20001555 Result: Down-regulated in Transcription
  misc_feature: MA Experiment 20001555 PARAMETER Experiment Name: At_Drought_Soil_Dry_P Parameter: Age (day) Value: 24
  misc_feature: MA Experiment 20001555 PARAMETER Experiment Name: At_Drought_Soil_Dry_P Parameter: Organism Value: A. thaliana
  misc_feature: MA Experiment 20001555 PARAMETER Experiment Name: At_Drought_Soil_Dry_P Parameter: Plant Line Value: WS
  misc_feature: MA Experiment 20001555 PARAMETER Experiment Name: At_Drought_Soil_Dry_P Parameter: Post Timepoint (hr) Value: None
  misc_feature: MA Experiment 20001555 PARAMETER Experiment Name: At_Drought_Soil_Dry_P Parameter: Post-Treatment Value: None
  misc_feature: MA Experiment 20001555 PARAMETER Experiment Name: At_Drought_Soil_Dry_P Parameter: Timepoint (day) Value: 10
  misc_feature: MA Experiment 20001555 PARAMETER Experiment Name: At_Drought_Soil_Dry_P Parameter: Treatment Value: Drought vs. No Drought
  misc_feature: MA Experiment ID: 20001556 Result: Down-regulated in Transcription
  misc_feature: MA Experiment 20001556 PARAMETER Experiment Name: At_Drought_Soil_Dry_P Parameter: Age (day) Value: 26
  misc_feature: MA Experiment 20001556 PARAMETER Experiment Name: At_Drought_Soil_Dry_P Parameter: Organism Value: A. thaliana
  misc_feature: MA Experiment 20001556 PARAMETER Experiment Name: At_Drought_Soil_Dry_P Parameter: Plant Line Value: WS
  misc_feature: MA Experiment 20001556 PARAMETER Experiment Name: At_Drought_Soil_Dry_P Parameter: Post Timepoint (hr) Value: None
  misc_feature: MA Experiment 20001556 PARAMETER Experiment Name: At_Drought_Soil_Dry_P Parameter: Post-Treatment Value: None
  misc_feature: MA Experiment 20001556 PARAMETER Experiment Name: At_Drought_Soil_Dry_P Parameter: Timepoint (day) Value: 12
  misc_feature: MA Experiment 20001556 PARAMETER Experiment Name: At_Drought_Soil_Dry_P Parameter: Treatment Value: Drought vs. No Drought
  misc_feature: MA Experiment ID: 20001557 Result: Down-regulated in Transcription
  misc_feature: MA Experiment 20001557 PARAMETER Experiment Name: At_Drought_Soil_Dry_P Parameter: Age (day) Value: 27
  misc_feature: MA Experiment 20001557 PARAMETER Experiment Name: At_Drought_Soil_Dry_P Parameter: Organism Value: A. thaliana
  misc_feature: MA Experiment 20001557 PARAMETER Experiment Name: At_Drought_Soil_Dry_P Parameter: Plant Line Value: WS
  misc_feature: MA Experiment 20001557 PARAMETER Experiment Name: At_Drought_Soil_Dry_P Parameter: Post Timepoint (hr) Value: 3
  misc_feature: MA Experiment 20001557 PARAMETER Experiment Name: At_Drought_Soil_Dry_P Parameter: Post-Treatment Value: Re-Water vs. No Drought
  misc_feature: MA Experiment 20001557 PARAMETER Experiment Name: At_Drought_Soil_Dry_P Parameter: Timepoint (day) Value: 13
  misc_feature: MA Experiment 20001557 PARAMETER Experiment Name: At_Drought_Soil_Dry_P Parameter: Treatment Value: Drought vs. No Drought
  misc_feature: MA Experiment ID: 20001911 Result: Down-regulated in Transcription
  misc_feature: MA Experiment 20001911 PARAMETER Experiment Name: At_Drought_Reproduction_P Parameter: Age (day) Value: 40
  misc_feature: MA Experiment 20001911 PARAMETER Experiment Name: At_Drought_Reproduction_P Parameter: Organism Value: A. thaliana
  misc_feature: MA Experiment 20001911 PARAMETER Experiment Name: At_Drought_Reproduction_P Parameter: Plant Line Value: WS
  misc_feature: MA Experiment 20001911 PARAMETER Experiment Name: At_Drought_Reproduction_P Parameter: Timepoint (day) Value: 10
  misc_feature: MA Experiment 20001911 PARAMETER Experiment Name: At_Drought_Reproduction_P Parameter: Tissue Value: Flowers
  misc_feature: MA Experiment 20001911 PARAMETER Experiment Name: At_Drought_Reproduction_P Parameter: Treatment Value: Drought vs. No Drought
atggttggagttttccgacgatcactctcattccctaacaaaccttgcggccgatcatctccatcgtcaaagccacgtgtctctcatcacacaagatccatcagtctaccctgccggtctcatcccttaatctcccacgttaaccacgagatctctcagctcaaatcctggttctcattcgccggagaaactcacagccgcaccacctcttggatcaccgacggtctcagtctcctcaaggacgttcaagaaacgctcgctgatatacttcagctcccacaatctcaagaatctctacgaaaccgtcctgttttcttcgagaatcttctagaagatcttctccgattcgttgacgcttacggaatcttccgtacgtcgatcctctgcctccgtgagcaccagtccgccgctcaagtcgctctccgtaaaaaagacgacgagaaaatcgcatcttacctaaaatctcgccgatctctcgcaagagatatcgcgaaactgacgtcatcgatccgtgagccgaagacaaaacaccaacactgccacgtagacaacgttaacggaacgtacggtgacgcagagcttgcgtcagttataggtgacgtcattgaagtaactgttttggtttccgttgctctctttaacggcgtttacttatctctcagagccaccaaaacaacgccgtttatagggtttttgaaacgatccgaaaaaaaggagaaactagacgaaggaatcgtggagttgaagcaagttgaagagaaaagcttgattggtttaagcaagaagaagaacgaagaagtaaagagtttgatgaagaggatgatggaattggagaattcgatccgtgaaatcgaatgtgagagtgagaaagtgtttaggggtttgattagcactcgagtctcattgcttaatgccctaacacattaa

SEQ ID NO: 89971 - protein, 308 aa, Arabidopsis thaliana
  peptide (1)..(308): Ceres Seq. ID no. 12721606
  misc_feature (74)..(305): Pfam Name: Arabidopsis protein of unknown function Pfam Description: Arabidopsis protein of unknown function
  misc_feature (1)..(308): Homolog of NCBI NO: 6573720 NR Description: T23E18.17 [Arabidopsis thaliana]
  misc_feature (1)..(308): Homolog of NCBI NO: 15222989 NR Description: hypothetical protein; protein id: At1g76240.1
  misc_feature (1)..(216): Homolog of NCBI NO: 38345858 NR Description: OSJNBa0084K11.22 [Oryza sativa (japonica
  misc_feature (233)..(307): Homolog of NCBI NO: 38345858 NR Description: OSJNBa0084K11.22 [Oryza sativa (japonica
  misc_feature (16)..(307): Homolog of NCBI NO: 37536548 NR Description: hypothetical protein [Oryza sativa (japonica group)] >gi|10140772|gb|AAG13603.1| hypothetical protein [Oryza >gi|31433334|gb|AAP54863.1| hypothetical protein [Oryza sativa
  misc_feature (32)..(279): Homolog of NCBI NO: 37535958 NR Description: hypothetical protein [Oryza sativa (japonica group)] >gi|15144300|gb|AAK84441.1| hypothetical protein [Oryza
  misc_feature (23)..(212): Homolog of NCBI NO: 37535956 NR Description: hypothetical protein [Oryza sativa (japonica group)] >gi|15144316|gb|AAK84457.1| hypothetical protein [Oryza
  misc_feature (260)..(304): Homolog of NCBI NO: 37535956 NR Description: hypothetical protein [Oryza sativa (japonica group)] >gi|15144316|gb|AAK84457.1| hypothetical protein [Oryza
  misc_feature (27)..(308): Homolog of NCBI NO: 15237099 NR Description: putative protein; protein id: At4g35690.1
  misc_feature (27)..(307): Homolog of NCBI NO: 15227881 NR Description: hypothetical protein; protein id: At2g17680.1
MVGVFRRSLSFPNKPCGRSSPSSKPRVSHHTRSISLPCRSHPLISHVNHEISQLKSWFSFAGETHSRTTSWITDGLSLLKDVQETLADILQLPQSQESLRNRPVFFENLLEDLLRFVDAYGIFRTSILCLREHQSAAQVALRKKDDEKIASYLKSRRSLARDIAKLTSSIREPKTKHQHCHVDNVNGTYGDAELASVIGDVIEVTVLVSVALFNGVYLSLRATKTTPFIGFLKRSEKKEKLDEGIVELKQVEEKSLIGLSKKKNEEVKSLMKRMMELENSIREIECESEKVFRGLISTRVSLLNALTH

SEQ ID NO: 89972 - DNA, 2115 bp, Arabidopsis thaliana
  misc_feature (1)..(2115): Ceres Seq. ID no. 12721607
  misc_feature: MA Experiment ID: 20001451 Result: Down-regulated in Transcription
  misc_feature: MA Experiment 20001451 PARAMETER Experiment Name: At_Far-red-induction_P Parameter: Age (day) Value: 7
  misc_feature: MA Experiment 20001451 PARAMETER Experiment Name: At_Far-red-induction_P Parameter: Light Value: Far-red vs. White
  misc_feature: MA Experiment 20001451 PARAMETER Experiment Name: At_Far-red-induction_P Parameter: Organism Value: A. thaliana
  misc_feature: MA Experiment 20001451 PARAMETER Experiment Name: At_Far-red-induction_P Parameter: Plant Line Value: Columbia
  misc_feature: MA Experiment 20001451 PARAMETER Experiment Name: At_Far-red-induction_P Parameter: Timepoint (hr) Value: 24
  misc_feature: MA Experiment 20001451 PARAMETER Experiment Name: At_Far-red-induction_P Parameter: Tissue Value: Whole Plant
tttctctctctctctgatgattttgtttgtttgaagaaaagagaatattgttgtttgtctctcgtgatcgaaacaatgctttgtgattctcaaatacagtaacattttcaacatgctttgattccaaaaatccaaactttcattctctctctcaatctctctatatctccgagcagcgaggtagttgcacggcggccgccatgaatttccatcggcggcgctacccttactacaaccgtctccgtcgtctccttcctctcgttatcgccgtctctctatctctcctcattctcttcgcttttctctctttccttgctccgcctcctggagattccgatcgccttcctccacgcgttcgctactcatccaatgatgcgatcaaagctacaggtttccatattccgagagctggaggcagatcagatcgtgatatctggcgttcacgaaatgctgaattcttttttggatgcagcaatgcaagcagcaaattcgcaaattcgaaagcagtgacgagaaatgatcgatacttggtaatagccactagtggtggtttgaaccaacaacgaactggaattgtagatgcagttgttgcggcaaggattctaaatgctactcttgttgttcccaagttagaccagaagtcttactggaaggatgccagtgacttctcgcatattttcgatgttgattggtttatctcatttctgtctggagacgtcagaattataaagcaacttccactgaaaggagggcgtacatggagtacaagtagaatgcgtgtaccacggaaatgtaacgagagatgctatattaaccgtgttttacctgttcttctcaaaaggcatgcagttcaactgaacaaatttgactatagactttcaaacaagttgagtgatgacttgcaaaagctaagatgtagagtaaattaccatgctctaaagttcactgatcctatacttacaatgggtaatgaattggtccggcgcatgagattgaggagcaaacacttcattgctttacatttaaggtatgaacctgatatgcttgcattctcgggatgctattatggtggtggtgataaggaaaggagagaacttgcagcaattagaaggagatggaaaacattacatattaacaacccagagaaacagaggcgacaaggaagatgtccactcactccagaagaagtcggactgatgcttagagctttgggatatggcagtgatgttcatatatatgtcgcgtctggtgaagtatatggaggagaagaatcattggctcctttgaaagcactctttccacacttctattcaaaagacactatagctacaaaggaagagttagaacctttttcttcgtactcttctagaatggctgcactcgacttccttgtttgtgatgaaagcgacgtatttgtaaccaacaacaatggcaatatggcaaaaatattggctgggaggaggagatacttaggacataaacccactgttaggccgaatgcaaaaaagctttacagattattcatgaacaaagagaacacgacatgggaggagttttcatctaaagtccgttcgtttcagagagggttcatgggagagccaaaggaagtaagagctggtagaggtgaatttcacgaaaacccatccacgtgcatatgcgaagatacagaggctaaggcaaaggcgcaattagaatctagaaaacttggaaagaaaaacaaatccactaataaagacgcagcagtaactgtaaccaatgatgatcaaaccgaagaggatgacccagattggtcggagccagactatgaggaagaacagagtgatcttcaggacagaggattatacaacgggacaagtttagattacgatgatccatctacctctgatgagcctgagcttgaagcaatgctatcagattagttagatacgcatcagtgaccttcacatcactacactgaatctgtcctctgcttgggcacttcacagtgagttttccaaccttggtgctaagccttgttgtcaccattttgcatgtaatgtctcctgtacatagaaccacgcgatagagcattgttttgtttatcaggatctgaggacagatcaatttttttcagtc

SEQ ID NO: 89973 - protein, 572 aa, Arabidopsis thaliana
  peptide (1)..(572): Ceres Seq. ID no. 12721608
  misc_feature (111)..(452): Pfam Name: Plant protein family Pfam Description: Plant protein family
  misc_feature (1)..(572): Homolog of NCBI NO: 18411065 NR Description: putative auxin-independent growth promoter; id: At1g76270.1, supported by cDNA: gi_15292904 [Arabidopsis
  misc_feature (1)..(572): Homolog of NCBI NO: 25406439 NR Description: hypothetical protein F15M4.23 [imported] -
  misc_feature (86)..(572): Homolog of NCBI NO: 6573718 NR Description: T23E18.20 [Arabidopsis thaliana]
  misc_feature (1)..(139): Homolog of NCBI NO: 6573718 NR Description: T23E18.20 [Arabidopsis thaliana]
  misc_feature (1)..(572): Homolog of NCBI NO: 8886957 NR Description: F2D10.3 [Arabidopsis thaliana]
  misc_feature (67)..(572): Homolog of NCBI NO: 8778600 NR Description: F5M15.13 [Arabidopsis thaliana]
  misc_feature (1)..(47): Homolog of NCBI NO: 8778600 NR Description: F5M15.13 [Arabidopsis thaliana]
  misc_feature (275)..(572): Homolog of NCBI NO: 30686880 NR Description: axi 1 protein -related [Arabidopsis thaliana]
  misc_feature (1)..(238): Homolog of NCBI NO: 30686880 NR Description: axi 1 protein -related [Arabidopsis thaliana]
  misc_feature (3)..(542): Homolog of NCBI NO: 322752 NR Description: auxin-independent growth promoter - common
MNFHRRRYPYYNRLRRLLPLVIAVSLSLLILFAFLSFLAPPPGDSDRLPPRVRYSSNDAIKATGFHIPRAGGRSDRDIWRSRNAEFFFGCSNASSKFANSKAVTRNDRYLVIATSGGLNQQRTGIVDAVVAARILNATLVVPKLDQKSYWKDASDFSHIFDVDWFISFLSGDVRIIKQLPLKGGRTWSTSRMRVPRKCNERCYINRVLPVLLKRHAVQLNKFDYRLSNKLSDDLQKLRCRVNYHALKFTDPILTMGNELVRRMRLRSKHFIALHLRYEPDMLAFSGCYYGGGDKERRELAAIRRRWKTLHINNPEKQRRQGRCPLTPEEVGLMLRALGYGSDVHIYVASGEVYGGEESLAPLKALFPHFYSKDTIATKEELEPFSSYSSRMAALDFLVCDESDVFVTNNNGNMAKILAGRRRYLGHKPTVRPNAKKLYRLFMNKENTTWEEFSSKVRSFQRGFMGEPKEVRAGRGEFHENPSTCICEDTEAKAKAQLESRKLGKKNKSTNKDAAVTVTNDDQTEEDDPDWSEPDYEEEQSDLQDRGLYNGTSLDYDDPSTSDEPELEAMLSD

SEQ ID NO: 89974 - protein, 381 aa, Arabidopsis thaliana
  peptide (1)..(381): Ceres Seq. ID no. 12721609
  misc_feature (1)..(261): Pfam Name: Plant protein family Pfam Description: Plant protein family
  misc_feature (1)..(381): Homolog of NCBI NO: 18411065 NR Description: putative auxin-independent growth promoter; id: At1g76270.1, supported by cDNA: gi_15292904 [Arabidopsis
  misc_feature (1)..(381): Homolog of NCBI NO: 25406439 NR Description: hypothetical protein F15M4.23 [imported] -
  misc_feature (1)..(381): Homolog of NCBI NO: 6573718 NR Description: T23E18.20 [Arabidopsis thaliana]
  misc_feature (1)..(381): Homolog of NCBI NO: 8886957 NR Description: F2D10.3 [Arabidopsis thaliana]
  misc_feature (1)..(381): Homolog of NCBI NO: 8778600 NR Description: F5M15.13 [Arabidopsis thaliana]
  misc_feature (84)..(381): Homolog of NCBI NO: 30686880 NR Description: axi 1 protein -related [Arabidopsis thaliana]
  misc_feature (1)..(47): Homolog of NCBI NO: 30686880 NR Description: axi 1 protein -related [Arabidopsis thaliana]
  misc_feature (1)..(351): Homolog of NCBI NO: 322752 NR Description: auxin-independent growth promoter - common
  misc_feature (1)..(303): Homolog of NCBI NO: 15233840 NR Description: putative growth regulator protein; protein id: [Arabidopsis thaliana] >gi|7488119|pir||T05667 probable growth
  misc_feature (1)..(338): Homolog of NCBI NO: 22328730 NR Description: growth regulator like protein; protein id: supported by cDNA: gi_20856497 [Arabidopsis thaliana] AT4g16650/dl4350w [Arabidopsis thaliana]
MRVPRKCNERCYINRVLPVLLKRHAVQLNKFDYRLSNKLSDDLQKLRCRVNYHALKFTDPILTMGNELVRRMRLRSKHFIALHLRYEPDMLAFSGCYYGGGDKERRELAAIRRRWKTLHINNPEKQRRQGRCPLTPEEVGLMLRALGYGSDVHIYVASGEVYGGEESLAPLKALFPHFYSKDTIATKEELEPFSSYSSRMAALDFLVCDESDVFVTNNNGNMAKILAGRRRYLGHKPTVRPNAKKLYRLFMNKENTTWEEFSSKVRSFQRGFMGEPKEVRAGRGEFHENPSTCICEDTEAKAKAQLESRKLGKKNKSTNKDAAVTVTNDDQTEEDDPDWSEPDYEEEQSDLQDRGLYNGTSLDYDDPSTSDEPELEAMLSD

SEQ ID NO: 89975 - protein, 318 aa, Arabidopsis thaliana
  peptide (1)..(318): Ceres Seq. ID no. 12721610
  misc_feature (1)..(198): Pfam Name: Plant protein family Pfam Description: Plant protein family
  misc_feature (1)..(318): Homolog of NCBI NO: 18411065 NR Description: putative auxin-independent growth promoter; id: At1g76270.1, supported by cDNA: gi_15292904 [Arabidopsis
  misc_feature (1)..(318): Homolog of NCBI NO: 25406439 NR Description: hypothetical protein F15M4.23 [imported] -
  misc_feature (1)..(318): Homolog of NCBI NO: 6573718 NR Description: T23E18.20 [Arabidopsis thaliana]
  misc_feature (1)..(318): Homolog of NCBI NO: 8886957 NR Description: F2D10.3 [Arabidopsis thaliana]
  misc_feature (1)..(318): Homolog of NCBI NO: 8778600 NR Description: F5M15.13 [Arabidopsis thaliana]
  misc_feature (21)..(318): Homolog of NCBI NO: 30686880 NR Description: axi 1 protein -related [Arabidopsis thaliana]
  misc_feature (1)..(288): Homolog of NCBI NO: 322752 NR Description: auxin-independent growth promoter - common
  misc_feature (1)..(240): Homolog of NCBI NO: 15233840 NR Description: putative growth regulator protein; protein id: [Arabidopsis thaliana] >gi|7488119|pir||T05667 probable growth
  misc_feature (1)..(275): Homolog of NCBI NO: 22328730 NR Description: growth regulator like protein; protein id: supported by cDNA: gi_20856497 [Arabidopsis thaliana] AT4g16650/dl4350w [Arabidopsis thaliana]
  misc_feature (1)..(233): Homolog of NCBI NO: 38345464 NR Description: OSJNBa0010H02.2 [Oryza sativa (japonica
MGNELVRRMRLRSKHFIALHLRYEPDMLAFSGCYYGGGDKERRELAAIRRRWKTLHINNPEKQRRQGRCPLTPEEVGLMLRALGYGSDVHIYVASGEVYGGEESLAPLKALFPHFYSKDTIATKEELEPFSSYSSRMAALDFLVCDESDVFVTNNNGNMAKILAGRRRYLGHKPTVRPNAKKLYRLFMNKENTTWEEFSSKVRSFQRGFMGEPKEVRAGRGEFHENPSTCICEDTEAKAKAQLESRKLGKKNKSTNKDAAVTVTNDDQTEEDDPDWSEPDYEEEQSDLQDRGLYNGTSLDYDDPSTSDEPELEAMLSD

SEQ ID NO: 89976 - DNA, 1485 bp, Arabidopsis thaliana
  misc_feature (1)..(1485): Ceres Seq. ID no. 12721643
  misc_feature: MA Experiment ID: 20000184 Result: Down-regulated in Transcription
  misc_feature: MA Experiment 20000184 PARAMETER Experiment Name: At_Shoots__P Parameter: Age (day) Value: 7
  misc_feature: MA Experiment 20000184 PARAMETER Experiment Name: At_Shoots__P Parameter: Tissue Value: Shoots vs. Whole Plant
  misc_feature: MA Experiment ID: 20001451 Result: Down-regulated in Transcription
  misc_feature: MA Experiment 20001451 PARAMETER Experiment Name: At_Far-red-induction_P Parameter: Age (day) Value: 7
  misc_feature: MA Experiment 20001451 PARAMETER Experiment Name: At_Far-red-induction_P Parameter: Light Value: Far-red vs. White
  misc_feature: MA Experiment 20001451 PARAMETER Experiment Name: At_Far-red-induction_P Parameter: Organism Value: A. thaliana
  misc_feature: MA Experiment 20001451 PARAMETER Experiment Name: At_Far-red-induction_P Parameter: Plant Line Value: Columbia
  misc_feature: MA Experiment 20001451 PARAMETER Experiment Name: At_Far-red-induction_P Parameter: Timepoint (hr) Value: 24
  misc_feature: MA Experiment 20001451 PARAMETER Experiment Name: At_Far-red-induction_P Parameter: Tissue Value: Whole Plant
atggcggatactgaaatgcaagagcaagatgtgccgtctggtaccaaaggtgttgtagaggagccttcagaactagagaaagacctaaactctattgaaagacctaagtcccctgttccagaggatacgactcatactttggatagtgatgttcatttatctgatgctcccattgctaatcaaattgaggctaatgaagaggttggtggtcagaacagtgttgatgggaggaatggtgatgttgatcagtctgaaaagaagattactagtgatggcggtcaagaggagacaacacttggggaatcaaatcctttgaagggggatccgtcgagtcctcatgttcctgaagaaagtgttaagaagtggaagacatggttgttgagtgatgctgaggccagggaagttgatgaagcaggggcaccacaggatcaagaggcgtttattaaagaagtggaggccttcaacaaggagaatttcctggaatttaaagccccaaagttttacggacagcccttaaattgtctcaagctttggagagccgttatcaagttaggtggctacgatgtggtcaccacatctaagctatggcggcaagttggagaatcgttccatcctccaaagtatggcttgtattgtcctcaatcttcaaccttttccgctttcttaacatgcactacagtctcctggacattccgcattttctatgaaaaggcacttttggagtatgagaagcatttaaggcaaaatggtgagcttaaccttcctggttcagcttctcttccgtcttcaggcattgaaaaggaggcaagtagccatcaagcttcagggtcaggcagaacaagaagagatgctgcagctcgtgctatgcaaggttggcattctcagcgccttcttggatctggggaggttactgagcctattgttaaggagaaaggcttgaattcaaccccaaagcaaaagaacctcaaaaacattggtaatattcctaagcgatggctattgtgtgcagaaacaaaaaacaacaaccggcatggaccttgttttttcacacgaatcagaaaaacagttacgaaagataatcatctcctgtatttttgtgttgcttatgcaagattgctttaccatgtgcaattccatacaatcttatccatcgaaaaaccctgcattgtcaatgtttggtcaactgccgaggttatagatgttggaccccctgcagactgggtgaagatcaatgtcagagaaactaaagactgctttgagatatttgccctggtacctggacttcttcgcgaagaggtccgtgttcagtcagaccctgcagggcggctagttatagcaggccaacctgagcaacttgacaatccttggggaatcacacccttcaaaaaggttgtgaactttcccgcaagaatcgatccgctgcacacgtcagcggttgtgagcctgcatggtcgactgtttgtgcgagtcccatttgagcagtga

SEQ ID NO: 89977 - protein, 494 aa, Arabidopsis thaliana
  peptide (1)..(494): Ceres Seq. ID no. 12721644
  misc_feature (138)..(263): Pfam Name: ARID/BRIGHT DNA binding domain Pfam Description: ARID/BRIGHT DNA binding domain
  misc_feature (1)..(494): Homolog of NCBI NO: 25406449 NR Description: probable DNA-binding protein, 48797-45229
  misc_feature (1)..(326): Homolog of NCBI NO: 30699177 NR Description: DNA-binding protein -related [Arabidopsis
  misc_feature (394)..(494): Homolog of NCBI NO: 30699177 NR Description: DNA-binding protein -related [Arabidopsis
  misc_feature (111)..(326): Homolog of NCBI NO: 30687082 NR Description: expressed protein [Arabidopsis thaliana]
  misc_feature (396)..(494): Homolog of NCBI NO: 30687082 NR Description: expressed protein [Arabidopsis thaliana]
  misc_feature (203)..(326): Homolog of NCBI NO: 25518704 NR Description: hypothetical protein F9H16.11 - Arabidopsis >gi|4836898|gb|AAD30601.1|AC007369_11 Hypothetical protein
  misc_feature (416)..(494): Homolog of NCBI NO: 25518704 NR Description: hypothetical protein F9H16.11 - Arabidopsis >gi|4836898|gb|AAD30601.1|AC007369_11 Hypothetical protein
  misc_feature (111)..(176): Homolog of NCBI NO: 25518704 NR Description: hypothetical protein F9H16.11 - Arabidopsis >gi|4836898|gb|AAD30601.1|AC007369_11 Hypothetical protein
  misc_feature (396)..(419): Homolog of NCBI NO: 25518704 NR Description: hypothetical protein F9H16.11 - Arabidopsis >gi|4836898|gb|AAD30601.1|AC007369_11 Hypothetical protein
  misc_feature (16)..(270): Homolog of NCBI NO: 30679972 NR Description: expressed protein [Arabidopsis thaliana] At2g17400 [Arabidopsis thaliana] >gi|27363260|gb|AAO11549.1|
MADTEMQEQDVPSGTKGVVEEPSELEKDLNSIERPKSPVPEDTTHTLDSDVHLSDAPIANQIEANEEVGGQNSVDGRNGDVDQSEKKITSDGGQEETTLGESNPLKGDPSSPHVPEESVKKWKTWLLSDAEAREVDEAGAPQDQEAFIKEVEAFNKENFLEFKAPKFYGQPLNCLKLWRAVIKLGGYDVVTTSKLWRQVGESFHPPKYGLYCPQSSTFSAFLTCTTVSWTFRIFYEKALLEYEKHLRQNGELNLPGSASLPSSGIEKEASSHQASGSGRTRRDAAARAMQGWHSQRLLGSGEVTEPIVKEKGLNSTPKQKNLKNIGNIPKRWLLCAETKNNNRHGPCFFTRIRKTVTKDNHLLYFCVAYARLLYHVQFHTILSIEKPCIVNVWSTAEVIDVGPPADWVKINVRETKDCFEIFALVPGLLREEVRVQSDPAGRLVIAGQPEQLDNPWGITPFKKVVNFPARIDPLHTSAVVSLHGRLFVRVPFEQ

SEQ ID NO: 89978 - protein, 489 aa, Arabidopsis thaliana
  peptide (1)..(489): Ceres Seq. ID no. 12721645
  misc_feature (133)..(258): Pfam Name: ARID/BRIGHT DNA binding domain Pfam Description: ARID/BRIGHT DNA binding domain
  misc_feature (1)..(489): Homolog of NCBI NO: 25406449 NR Description: probable DNA-binding protein, 48797-45229
  misc_feature (1)..(321): Homolog of NCBI NO: 30699177 NR Description: DNA-binding protein -related [Arabidopsis
  misc_feature (389)..(489): Homolog of NCBI NO: 30699177 NR Description: DNA-binding protein -related [Arabidopsis
  misc_feature (106)..(321): Homolog of NCBI NO: 30687082 NR Description: expressed protein [Arabidopsis thaliana]
  misc_feature (391)..(489): Homolog of NCBI NO: 30687082 NR Description: expressed protein [Arabidopsis thaliana]
  misc_feature (198)..(321): Homolog of NCBI NO: 25518704 NR Description: hypothetical protein F9H16.11 - Arabidopsis >gi|4836898|gb|AAD30601.1|AC007369_11 Hypothetical protein
  misc_feature (411)..(489): Homolog of NCBI NO: 25518704 NR Description: hypothetical protein F9H16.11 - Arabidopsis >gi|4836898|gb|AAD30601.1|AC007369_11 Hypothetical protein
  misc_feature (106)..(171): Homolog of NCBI NO: 25518704 NR Description: hypothetical protein F9H16.11 - Arabidopsis >gi|4836898|gb|AAD30601.1|AC007369_11 Hypothetical protein
  misc_feature (391)..(414): Homolog of NCBI NO: 25518704 NR Description: hypothetical protein F9H16.11 - Arabidopsis >gi|4836898|gb|AAD30601.1|AC007369_11 Hypothetical protein
  misc_feature (11)..(265): Homolog of NCBI NO: 30679972 NR Description: expressed protein [Arabidopsis thaliana] At2g17400 [Arabidopsis thaliana] >gi|27363260|gb|AAO11549.1|
MQEQDVPSGTKGVVEEPSELEKDLNSIERPKSPVPEDTTHTLDSDVHLSDAPIANQIEANEEVGGQNSVDGRNGDVDQSEKKITSDGGQEETTLGESNPLKGDPSSPHVPEESVKKWKTWLLSDAEAREVDEAGAPQDQEAFIKEVEAFNKENFLEFKAPKFYGQPLNCLKLWRAVIKLGGYDVVTTSKLWRQVGESFHPPKYGLYCPQSSTFSAFLTCTTVSWTFRIFYEKALLEYEKHLRQNGELNLPGSASLPSSGIEKEASSHQASGSGRTRRDAAARAMQGWHSQRLLGSGEVTEPIVKEKGLNSTPKQKNLKNIGNIPKRWLLCAETKNNNRHGPCFFTRIRKTVTKDNHLLYFCVAYARLLYHVQFHTILSIEKPCIVNVWSTAEVIDVGPPADWVKINVRETKDCFEIFALVPGLLREEVRVQSDPAGRLVIAGQPEQLDNPWGITPFKKVVNFPARIDPLHTSAVVSLHGRLFVRVPFEQ

SEQ ID NO: 89979 - DNA, 1854 bp, Arabidopsis thaliana
  misc_feature (1)..(1854): Ceres Seq. ID no. 12721650
  misc_feature: MA Experiment ID: 20000235 Result: Up-regulated in Transcription
  misc_feature: MA Experiment 20000235 PARAMETER Experiment Name: At_Siliques_P Parameter: Age (day) Value: 21
  misc_feature: MA Experiment 20000235 PARAMETER Experiment Name: At_Siliques_P Parameter: Organism Value: A. thaliana
  misc_feature: MA Experiment 20000235 PARAMETER Experiment Name: At_Siliques_P Parameter: Plant Line Value: WS
  misc_feature: MA Experiment 20000235 PARAMETER Experiment Name: At_Siliques_P Parameter: Tissue Value: 5-10mm Siliques vs. Whole Plant
atggattcagatttcggaatccccagagaactctctcctcttcaacaactccgatctcagtaccaccctgagcttcctccttgtctccaggggactactgtccgtgttgaacttggtgatggaaccactgtggcaaaggctggtgatgctcatatcattgcccgtgccttcccacatactctaggccagcctttggctcatttcctcagggcaactgctaaagttgctgatgctcagatcattactgaacatccagtgaagagggtcggaattgtgttctgtggaaggcaggctcctggtgggcacaatgtagtttggggtctatacgaggctctcaaagtgcacaacgcgaagaacactttgcttggatttttgggtggttctgaaggtctctttgcccagaagaccctggagatcactgatgaggtcctccaaacttacaaaaaccaaggtggctatgatatgcttggaagaaccaaggatcagattagaacaaccgaacaggtcaatgctgcactaaaagcatgcacggatttgaaattggatagcctagttatcattggaggtgtaacatcaaacacagatgccgctcatcttgctgaattttttgctgaagcaaaatgctcaacaaaggtagttggtgttccggtcactattaatggagatcttaagaatcagtttgtggaagcaaatgttggtttcgatactacatgcaaggtgaattctcagctcattagcaatatctgcaccgatgccctttcagcagagaagtattattactttgtccgtctcatgggtcggaagcattcacatgttgcccttgagtgtacacttcagtctcaccccaacatggtgatactgggtgaggaggttacagcatctaagctcacaatatttgacatcataaaacaaatctgtgatgctgttcaagcaagagccgaacaagacaaaaatcatggagtcatcctaattcctgaagggcttgttgagagtattcctgaactctatgctctgttgaaggaaattcatggattgcttaaggagggtgtgcaggttgataatatttctactcagttgtcatcttggtcatctgctttgtttgagtttttgcctccattcattaagaaacagctacttctccatcccgagtctgatgattctgctcagctatcccagattgagacggagaaacttctggcttatcttgtggagactgaaatgaacaagcgcttgaaagaaggaacctacaaagggaagaaattcaacgctatctgtcacttttttggttaccaagctcgtggatctcttccatcaaaattcgattgtgactacgcctatgttcttggacatgtatgttaccacatcctcgcagctggtttgaatggttacatggcgacagtgactaacctgaagagtcctgtaaacaaatggaaatgcggggctgcgcctatctcagcaatgatgacggttaagcgttggtcccaaaattctggttctactacgattggtagacctgtaattcatccagcttcagttgacttgaaaggaaaagcatacgatctattgagacaaaacgcgcagaaattcttgatggaagatatgtaccgaaacccaggaccagtccagtatgatggtccaggtgcagatgcaaaggcggtaagtctgtgtgtagaagaccaggattacatggggaaaatcaagaagctgcaggagtatcttgatcaggtgaggacgattgtgaaaccgggttgctctcaagatgttttgaaagcggcattgagtgttatggcctcggtgactgatgttctcactacgatctcatcttcttccaccagcggtcagcaatttgcttaa

SEQ ID NO: 89980 - protein, 617 aa, Arabidopsis thaliana
  peptide (1)..(617): Ceres Seq. ID no. 12721651
  misc_feature (87)..(368): Pfam Name: Phosphofructokinase Pfam Description: Phosphofructokinase
  misc_feature (1)..(609): Homolog of NCBI NO: 15218074 NR Description: putative pyrophosphate-dependent alpha subunit; protein id: At1g20950.1, supported by cDNA:
  misc_feature (1)..(615): Homolog of NCBI NO: 2499488 NR Description: Pyrophosphate--fructose 6-phosphate
  misc_feature (1)..(609): Homolog of NCBI NO: 3790102 NR Description: pyrophosphate-dependent phosphofructokinase alpha
  misc_feature (1)..(616): Homolog of NCBI NO: 129881 NR Description: Pyrophosphate--fructose 6-phosphate
  misc_feature (1)..(607): Homolog of NCBI NO: 29647436 NR Description: putative pyrophosphate--fructose 6-phosphate 1-
  misc_feature (88)..(485): Homolog of NCBI NO: 29367525 NR Description: fructose-6-phosphate 1-phosphotransferase [Oryza
  misc_feature (11)..(546): Homolog of NCBI NO: 11528427 NR Description: pyrophosphate-dependent phosphofructokinase
  misc_feature (11)..(558): Homolog of NCBI NO: 15639531 NR Description: pyrophosphate--fructose 6-phosphate beta subunit [Treponema pallidum] >gi|7447685|pir||C71312
  misc_feature (12)..(561): Homolog of NCBI NO: 34540025 NR Description: phosphofructokinase [Porphyromonas gingivalis >gi|10801546|dbj|BAB16715.1| phosphofructokinase [Porphyromonas >gi|34396336|gb|AAQ65403.1| phosphofructokinase [Porphyromonas
  misc_feature (12)..(558): Homolog of NCBI NO: 15221156 NR Description: putative pyrophosphate-fructose-6-phosphate 1- protein id: At1g12000.1, supported by cDNA: gi_17064793,
MDSDFGIPRELSPLQQLRSQYHPELPPCLQGTTVRVELGDGTTVAKAGDAHIIARAFPHTLGQPLAHFLRATAKVADAQIITEHPVKRVGIVFCGRQAPGGHNVVWGLYEALKVHNAKNTLLGFLGGSEGLFAQKTLEITDEVLQTYKNQGGYDMLGRTKDQIRTTEQVNAALKACTDLKLDSLVIIGGVTSNTDAAHLAEFFAEAKCSTKVVGVPVTINGDLKNQFVEANVGFDTTCKVNSQLISNICTDALSAEKYYYFVRLMGRKHSHVALECTLQSHPNMVILGEEVTASKLTIFDIIKQICDAVQARAEQDKNHGVILIPEGLVESIPELYALLKEIHGLLKEGVQVDNISTQLSSWSSALFEFLPPFIKKQLLLHPESDDSAQLSQIETEKLLAYLVETEMNKRLKEGTYKGKKFNAICHFFGYQARGSLPSKFDCDYAYVLGHVCYHILAAGLNGYMATVTNLKSPVNKWKCGAAPISAMMTVKRWSQNSGSTTIGRPVIHPASVDLKGKAYDLLRQNAQKFLMEDMYRNPGPVQYDGPGADAKAVSLCVEDQDYMGKIKKLQEYLDQVRTIVKPGCSQDVLKAALSVMASVTDVLTTISSSSTSGQQFA

SEQ ID NO: 89981 - protein, 463 aa, Arabidopsis thaliana
  peptide (1)..(463): Ceres Seq. ID no. 12721652
  misc_feature (1)..(214): Pfam Name: Phosphofructokinase Pfam Description: Phosphofructokinase
  misc_feature (1)..(455): Homolog of NCBI NO: 15218074 NR Description: putative pyrophosphate-dependent alpha subunit; protein id: At1g20950.1, supported by cDNA:
  misc_feature (1)..(461): Homolog of NCBI NO: 2499488 NR Description: Pyrophosphate--fructose 6-phosphate
  misc_feature (1)..(455): Homolog of NCBI NO: 3790102 NR Description: pyrophosphate-dependent phosphofructokinase alpha
  misc_feature (1)..(462): Homolog of NCBI NO: 129881 NR Description: Pyrophosphate--fructose 6-phosphate
  misc_feature (1)..(453): Homolog of NCBI NO: 29647436 NR Description: putative pyrophosphate--fructose 6-phosphate 1-
  misc_feature (1)..(331): Homolog of NCBI NO: 29367525 NR Description: fructose-6-phosphate 1-phosphotransferase [Oryza
  misc_feature (1)..(392): Homolog of NCBI NO: 11528427 NR Description: pyrophosphate-dependent phosphofructokinase
  misc_feature (1)..(404): Homolog of NCBI NO: 15639531 NR Description: pyrophosphate--fructose 6-phosphate beta subunit [Treponema pallidum] >gi|7447685|pir||C71312
  misc_feature (1)..(407): Homolog of NCBI NO: 34540025 NR Description: phosphofructokinase [Porphyromonas gingivalis >gi|10801546|dbj|BAB16715.1| phosphofructokinase [Porphyromonas >gi|34396336|gb|AAQ65403.1| phosphofructokinase [Porphyromonas
  misc_feature (1)..(404): Homolog of NCBI NO: 15221156 NR Description: putative pyrophosphate-fructose-6-phosphate 1- protein id: At1g12000.1, supported by cDNA: gi_17064793,
MLGRTKDQIRTTEQVNAALKACTDLKLDSLVIIGGVTSNTDAAHLAEFFAEAKCSTKVVGVPVTINGDLKNQFVEANVGFDTTCKVNSQLISNICTDALSAEKYYYFVRLMGRKHSHVALECTLQSHPNMVILGEEVTASKLTIFDIIKQICDAVQARAEQDKNHGVILIPEGLVESIPELYALLKEIHGLLKEGVQVDNISTQLSSWSSALFEFLPPFIKKQLLLHPESDDSAQLSQIETEKLLAYLVETEMNKRLKEGTYKGKKFNAICHFFGYQARGSLPSKFDCDYAYVLGHVCYHILAAGLNGYMATVTNLKSPVNKWKCGAAPISAMMTVKRWSQNSGSTTIGRPVIHPASVDLKGKAYDLLRQNAQKFLMEDMYRNPGPVQYDGPGADAKAVSLCVEDQDYMGKIKKLQEYLDQVRTIVKPGCSQDVLKAALSVMASVTDVLTTISSSSTSGQQFA

SEQ ID NO: 89982 - protein, 353 aa, Arabidopsis thaliana
  peptide (1)..(353): Ceres Seq. ID no. 12721653
  misc_feature (1)..(104): Pfam Name: Phosphofructokinase Pfam Description: Phosphofructokinase
  misc_feature (1)..(345): Homolog of NCBI NO: 15218074 NR Description: putative pyrophosphate-dependent alpha subunit; protein id: At1g20950.1, supported by cDNA:
  misc_feature (1)..(351): Homolog of NCBI NO: 2499488 NR Description: Pyrophosphate--fructose 6-phosphate
  misc_feature (1)..(345): Homolog of NCBI NO: 3790102 NR Description: pyrophosphate-dependent phosphofructokinase alpha
  misc_feature (1)..(352): Homolog of NCBI NO: 129881 NR Description: Pyrophosphate--fructose 6-phosphate
  misc_feature (1)..(343): Homolog of NCBI NO: 29647436 NR Description: putative pyrophosphate--fructose 6-phosphate 1-
  misc_feature (1)..(221): Homolog of NCBI NO: 29367525 NR Description: fructose-6-phosphate 1-phosphotransferase [Oryza
  misc_feature (1)..(282): Homolog of NCBI NO: 11528427 NR Description: pyrophosphate-dependent phosphofructokinase
  misc_feature (1)..(294): Homolog of NCBI NO: 15639531 NR Description: pyrophosphate--fructose 6-phosphate beta subunit [Treponema pallidum] >gi|7447685|pir||C71312
  misc_feature (1)..(297): Homolog of NCBI NO: 34540025 NR Description: phosphofructokinase [Porphyromonas gingivalis >gi|10801546|dbj|BAB16715.1| phosphofructokinase [Porphyromonas >gi|34396336|gb|AAQ65403.1| phosphofructokinase [Porphyromonas
  misc_feature (1)..(294): Homolog of NCBI NO: 15221156 NR Description: putative pyrophosphate-fructose-6-phosphate 1- protein id: At1g12000.1, supported by cDNA: gi_17064793,
MGRKHSHVALECTLQSHPNMVILGEEVTASKLTIFDIIKQICDAVQARAEQDKNHGVILIPEGLVESIPELYALLKEIHGLLKEGVQVDNISTQLSSWSSALFEFLPPFIKKQLLLHPESDDSAQLSQIETEKLLAYLVETEMNKRLKEGTYKGKKFNAICHFFGYQARGSLPSKFDCDYAYVLGHVCYHILAAGLNGYMATVTNLKSPVNKWKCGAAPISAMMTVKRWSQNSGSTTIGRPVIHPASVDLKGKAYDLLRQNAQKFLMEDMYRNPGPVQYDGPGADAKAVSLCVEDQDYMGKIKKLQEYLDQVRTIVKPGCSQDVLKAALSVMASVTDVLTTISSSSTSGQQFA

SEQ ID NO: 89983 - DNA, 2532 bp, Arabidopsis thaliana
  misc_feature (1)..(2532): Ceres Seq. ID no. 12721679
  misc_feature: MA Experiment ID: 20000315 Result: Down-regulated in Transcription
  misc_feature: MA Experiment 20000315 PARAMETER Experiment Name: At_14day_Shoots-Roots_Sub_P Parameter: Age (day) Value: 14
  misc_feature: MA Experiment 20000315 PARAMETER Experiment Name: At_14day_Shoots-Roots_Sub_P Parameter: Organism Value: A. thaliana
  misc_feature: MA Experiment 20000315 PARAMETER Experiment Name: At_14day_Shoots-Roots_Sub_P Parameter: Plant Line Value: WS
  misc_feature: MA Experiment 20000315 PARAMETER Experiment Name: At_14day_Shoots-Roots_Sub_P Parameter: Tissue Value: Shoots vs. Whole Plant
  misc_feature: MA Experiment ID: 20000327 Result: Down-regulated in Transcription
  misc_feature: MA Experiment 20000327 PARAMETER Experiment Name: At_42deg_Heat_Sub_P Parameter: Age (day) Value: 14
  misc_feature: MA Experiment 20000327 PARAMETER Experiment Name: At_42deg_Heat_Sub_P Parameter: Organism Value: A. thaliana
  misc_feature: MA Experiment 20000327 PARAMETER Experiment Name: At_42deg_Heat_Sub_P Parameter: Plant Line Value: WS
  misc_feature: MA Experiment 20000327 PARAMETER Experiment Name: At_42deg_Heat_Sub_P Parameter: Temperature (deg C) Value: 42 vs. 22
  misc_feature: MA Experiment 20000327 PARAMETER Experiment Name: At_42deg_Heat_Sub_P Parameter: Timepoint (hr) Value: 1
  misc_feature: MA Experiment 20000327 PARAMETER Experiment Name: At_42deg_Heat_Sub_P Parameter: Tissue Value: Aerial
  misc_feature: MA Experiment ID: 20000328 Result: Down-regulated in Transcription
  misc_feature: MA Experiment 20000328 PARAMETER Experiment Name: At_42deg_Heat_Sub_P Parameter: Age (day) Value: 14
  misc_feature: MA Experiment 20000328 PARAMETER Experiment Name: At_42deg_Heat_Sub_P Parameter: Organism Value: A. thaliana
  misc_feature: MA Experiment 20000328 PARAMETER Experiment Name: At_42deg_Heat_Sub_P Parameter: Plant Line Value: WS
  misc_feature: MA Experiment 20000328 PARAMETER Experiment Name: At_42deg_Heat_Sub_P Parameter: Temperature (deg C) Value: 42 vs. 22
  misc_feature: MA Experiment 20000328 PARAMETER Experiment Name: At_42deg_Heat_Sub_P Parameter: Timepoint (hr) Value: 6
  misc_feature: MA Experiment 20000328 PARAMETER Experiment Name: At_42deg_Heat_Sub_P Parameter: Tissue Value: Aerial
  misc_feature: MA Experiment ID: 20000329 Result: Up-regulated in Transcription
  misc_feature: MA Experiment 20000329 PARAMETER Experiment Name: At_4deg_Cold_Sub_P Parameter: Age (day) Value: 14
  misc_feature: MA Experiment 20000329 PARAMETER Experiment Name: At_4deg_Cold_Sub_P Parameter: Organism Value: A. thaliana
  misc_feature: MA Experiment 20000329 PARAMETER Experiment Name: At_4deg_Cold_Sub_P Parameter: Plant Line Value: WS
  misc_feature: MA Experiment 20000329 PARAMETER Experiment Name: At_4deg_Cold_Sub_P Parameter: Temperature (deg C) Value: 4 vs. 22
  misc_feature: MA Experiment 20000329 PARAMETER Experiment Name: At_4deg_Cold_Sub_P Parameter: Timepoint (hr) Value: 6
  misc_feature: MA Experiment 20000329 PARAMETER Experiment Name: At_4deg_Cold_Sub_P Parameter: Tissue Value: Aerial
  misc_feature: MA Experiment ID: 20000347 Result: Up-regulated in Transcription
  misc_feature: MA Experiment 20000347 PARAMETER Experiment Name: At_2mM_SA_Sub_P Parameter: Age (day) Value: 14
  misc_feature: MA Experiment 20000347 PARAMETER Experiment Name: At_2mM_SA_Sub_P Parameter: Organism Value: A. thaliana
  misc_feature: MA Experiment 20000347 PARAMETER Experiment Name: At_2mM_SA_Sub_P Parameter: Plant Line Value: WS
  misc_feature: MA Experiment 20000347 PARAMETER Experiment Name: At_2mM_SA_Sub_P Parameter: Timepoint (hr) Value: 6
  misc_feature: MA Experiment 20000347 PARAMETER Experiment Name: At_2mM_SA_Sub_P Parameter: Tissue Value: Aerial
  misc_feature: MA Experiment 20000347 PARAMETER Experiment Name: At_2mM_SA_Sub_P Parameter: Treatment Value: 2mM SA vs. No Treatment
  misc_feature: MA Experiment ID: 20000355 Result: Down-regulated in Transcription
  misc_feature: MA Experiment 20000355 PARAMETER Experiment Name: At_Siliques_Sub_P Parameter: Age (day) Value: 21
  misc_feature: MA Experiment 20000355 PARAMETER Experiment Name: At_Siliques_Sub_P Parameter: Organism Value: A. thaliana
  misc_feature: MA Experiment 20000355 PARAMETER Experiment Name: At_Siliques_Sub_P Parameter: Plant Line Value: WS
  misc_feature: MA Experiment 20000355 PARAMETER Experiment Name: At_Siliques_Sub_P Parameter: Tissue Value: Less Than 5mm Siliques vs. Whole Plant
  misc_feature: MA Experiment ID: 20000440 Result: Down-regulated in Transcription
  misc_feature: MA Experiment 20000440 PARAMETER Experiment Name: At_Closed-Flower__Sub_P Parameter: Tissue Value: Closed Flower vs. Whole Plant
atgagaagtgtaccaaactaccaccattctttcttcattttcctcattttaattctgtttcttgctttctctgtttctccaaacactctttcagccacagaatctctcactatctcaagcaacaaaaccattatatctcctagtcaaatcttcgagctcggtttcttcaatcccgcatcaagttcgcgttggtatctcggcatatggtacaagataatccctataagaacctacgtatgggttgcaaacagagacaatcctctctctagctccaacggaactctcaaaatatccggcaataacctcgtcattttcgatcagtccgataggcctgtttggtcgacgaatataaccggaggagatgtgagatcaccagtggctgcagagcttcttgataacggtaatttcttgctcagagactccaataacagacttctatggcagagtttcgattttccgacagatactttacttgcggagatgaaattgggatgggatcagaaaaccggattcaacaggatcttgagatcctggaaaacaacagatgatccatcaagcggtgagttttcgacaaaactcgaaaccagcgagttccctgagttttacatatgcagcaaggagtcgatactataccgcagcggtccatggaatggaatgcgttttagcagcgtaccagggacaattcaagttgattacatggtttacaatttcacagcaagtaaggaggaagtgacttactcataccgaatcaacaaaacaaacttatactcgagattatacttaaactctgcgggtttattacaacgattgacttggtttgagacaacacagagttggaagcaactatggtactcaccgaaggacctatgcgataactacaaagtgtgcgggaatttcggttattgcgactcgaacagtttaccaaattgttattgtatcaaagggtttaagccagtgaatgagcaagcgtgggacttgagagatggctccgctggttgcatgaggaagacgaggctgagctgtgacggtagagatggttttacccggttgaagaggatgaaattgccagataccacggcgacaattgtggacagagaaattgggttgaaagtatgtaaagaaaggtgtctagaagattgtaattgcactgcgttcgctaatgcggatattcgcaatggcgggtctggttgtgtgatttggaccagagagattttggatatgcgaaattatgctaagggaggtcaggatctttacgttagactagccgctgctgaactcgaggacaagagaatcaaaaatgaaaaaattataggttcgagtattggagtgagcattttgcttcttttaagttttgtcatcttccatttttggaaaaggaagcagaagcgatcaataacaattcaaacacctaatgttgatcaagtgagaagccaagactcgctaatcaacgatgtggtagtatctaggaggggttacacatccaaagaaaaaaaaagtgagtacctagagcttccattgttggagttggaagctcttgccacggcaacaaacaatttttctaacgacaacaagcttggacaaggtggattcggaattgtttacaagggaagattacttgacggaaaagaaattgcggtaaagagactatcgaaaatgtcctcacaagggaccgatgagttcatgaacgaggttagattaattgcaaagcttcagcacataaaccttgtccggcttctaggttgttgcgtcgataagggtgagaagatgttgatctatgagtacttggagaatttaagccttgactcgcatctctttgaccaaacacgaagctctaacttaaattggcaaaagagatttgatattatcaatggtattgctagaggacttctatatcttcaccaagattcacggtgtaggattatccatagagacttgaaagcaagtaacgtattgcttgataaaaatatgactccaaagatctcggatttcggtatggcgaggatctttggacgggaggagacagaggctaatacaaggagggtggtcggaacttacggctacatgtctccagaatatgcaatggacgggatattctcgatgaagtcggatgttttcagctttggggtcttgcttctagagattataagtggaaaaagaaacaaaggattctacaactcaaaccgtgatcttaatctcctcggttttgtgtggaggcattggaaggaaggaaacgagctagagattgtagatccgatcaacatcgattctttgtcatcaaagttcccgacacatgaaatcttaagatgtatacaaattggtctcttgtgtgttcaagaacgagccgaagacagaccagtgatgtcctcggtaatggtgatgcttggaagcgaaactaccgctattcctcagcctaaacgtcctggattttgcattggtagaagtcctcttgaggctgattcttcttcaagtacacagcgcgacgatgaatgtacagtgaaccaaatcactctctcggtcattgacgctcggtaa

SEQ ID NO: 89984 - protein, 843 aa, Arabidopsis thaliana
  peptide (1)..(843): Ceres Seq. ID no. 12721680
  misc_feature (75)..(185): Pfam Name: D-mannose binding lectin Pfam Description: D-mannose binding lectin
  misc_feature (1)..(843): Homolog of NCBI NO: 30314606 NR Description: S receptor kinase [Brassica rapa]
  misc_feature (13)..(435): Homolog of NCBI NO: 15220351 NR Description: receptor kinase, putative; protein id:
  misc_feature (495)..(843): Homolog of NCBI NO: 15220351 NR Description: receptor kinase, putative; protein id:
  misc_feature (14)..(464): Homolog of NCBI NO: 30682152 NR Description: S-locus protein kinase, putative [Arabidopsis
  misc_feature (504)..(843): Homolog of NCBI NO: 30682152 NR Description: S-locus protein kinase, putative [Arabidopsis
  misc_feature (14)..(843): Homolog of NCBI NO: 30682149 NR Description: S-locus protein kinase, putative [Arabidopsis
  misc_feature (34)..(771): Homolog of NCBI NO: 25956275 NR Description: unnamed protein product [Lotus japonicus]
  misc_feature (37)..(606): Homolog of NCBI NO: 25956276 NR Description: similar to S-receptor kinase [Lotus japonicus]
  misc_feature (627)..(733): Homolog of NCBI NO: 25956276 NR Description: similar to S-receptor kinase [Lotus japonicus]
  misc_feature (11)..(458): Homolog of NCBI NO: 25287705 NR Description: protein T1F9.8 [imported] - Arabidopsis thaliana
MRSVPNYHHSFFIFLILILFLAFSVSPNTLSATESLTISSNKTIISPSQIFELGFFNPASSSRWYLGIWYKIIPIRTYVWVANRDNPLSSSNGTLKISGNNLVIFDQSDRPVWSTNITGGDVRSPVAAELLDNGNFLLRDSNNRLLWQSFDFPTDTLLAEMKLGWDQKTGFNRILRSWKTTDDPSSGEFSTKLETSEFPEFYICSKESILYRSGPWNGMRFSSVPGTIQVDYMVYNFTASKEEVTYSYRINKTNLYSRLYLNSAGLLQRLTWFETTQSWKQLWYSPKDLCDNYKVCGNFGYCDSNSLPNCYCIKGFKPVNEQAWDLRDGSAGCMRKTRLSCDGRDGFTRLKRMKLPDTTATIVDREIGLKVCKERCLEDCNCTAFANADIRNGGSGCVIWTREILDMRNYAKGGQDLYVRLAAAELEDKRIKNEKIIGSSIGVSILLLLSFVIFHFWKRKQKRSITIQTPNVDQVRSQDSLINDVVVSRRGYTSKEKKSEYLELPLLELEALATATNNFSNDNKLGQGGFGIVYKGRLLDGKEIAVKRLSKMSSQGTDEFMNEVRLIAKLQHINLVRLLGCCVDKGEKMLIYEYLENLSLDSHLFDQTRSSNLNWQKRFDIINGIARGLLYLHQDSRCRIIHRDLKASNVLLDKNMTPKISDFGMARIFGREETEANTRRVVGTYGYMSPEYAMDGIFSMKSDVFSFGVLLLEIISGKRNKGFYNSNRDLNLLGFVWRHWKEGNELEIVDPINIDSLSSKFPTHEILRCIQIGLLCVQERAEDRPVMSSVMVMLGSETTAIPQPKRPGFCIGRSPLEADSSSSTQRDDECTVNQITLSVIDAR

SEQ ID NO: 89985 - protein, 683 aa, Arabidopsis thaliana
  peptide (1)..(683): Ceres Seq. ID no. 12721681
  misc_feature (181)..(289): Pfam Name: PAN domain Pfam Description: PAN domain
  misc_feature (1)..(683): Homolog of NCBI NO: 30314606 NR Description: S receptor kinase [Brassica rapa]
  misc_feature (1)..(275): Homolog of NCBI NO: 15220351 NR Description: receptor kinase, putative; protein id:
  misc_feature (335)..(683): Homolog of NCBI NO: 15220351 NR Description: receptor kinase, putative; protein id:
  misc_feature (1)..(304): Homolog of NCBI NO: 30682152 NR Description: S-locus protein kinase, putative [Arabidopsis
  misc_feature (344)..(683): Homolog of NCBI NO: 30682152 NR Description: S-locus protein kinase, putative [Arabidopsis
  misc_feature (1)..(683): Homolog of NCBI NO: 30682149 NR Description: S-locus protein kinase, putative [Arabidopsis
  misc_feature (1)..(611): Homolog of NCBI NO: 25956275 NR Description: unnamed protein product [Lotus japonicus]
  misc_feature (1)..(446): Homolog of NCBI NO: 25956276 NR Description: similar to S-receptor kinase [Lotus japonicus]
  misc_feature (467)..(573): Homolog of NCBI NO: 25956276 NR Description: similar to S-receptor kinase [Lotus japonicus]
  misc_feature (1)..(298): Homolog of NCBI NO: 25287705 NR Description: protein T1F9.8 [imported] - Arabidopsis thaliana
MKLGWDQKTGFNRILRSWKTTDDPSSGEFSTKLETSEFPEFYICSKESILYRSGPWNGMRFSSVPGTIQVDYMVYNFTASKEEVTYSYRINKTNLYSRLYLNSAGLLQRLTWFETTQSWKQLWYSPKDLCDNYKVCGNFGYCDSNSLPNCYCIKGFKPVNEQAWDLRDGSAGCMRKTRLSCDGRDGFTRLKRMKLPDTTATIVDREIGLKVCKERCLEDCNCTAFANADIRNGGSGCVIWTREILDMRNYAKGGQDLYVRLAAAELEDKRIKNEKIIGSSIGVSILLLLSFVIFHFWKRKQKRSITIQTPNVDQVRSQDSLINDVVVSRRGYTSKEKKSEYLELPLLELEALATATNNFSNDNKLGQGGFGIVYKGRLLDGKEIAVKRLSKMSSQGTDEFMNEVRLIAKLQHINLVRLLGCCVDKGEKMLIYEYLENLSLDSHLFDQTRSSNLNWQKRFDIINGIARGLLYLHQDSRCRIIHRDLKASNVLLDKNMTPKISDFGMARIFGREETEANTRRVVGTYGYMSPEYAMDGIFSMKSDVFSFGVLLLEIISGKRNKGFYNSNRDLNLLGFVWRHWKEGNELEIVDPINIDSLSSKFPTHEILRCIQIGLLCVQERAEDRPVMSSVMVMLGSETTAIPQPKRPGFCIGRSPLEADSSSSTQRDDECTVNQITLSVIDAR

SEQ ID NO: 89986 - protein, 625 aa, Arabidopsis thaliana
  peptide (1)..(625): Ceres Seq. ID no. 12721682
  misc_feature (123)..(231): Pfam Name: PAN domain Pfam Description: PAN domain
  misc_feature (1)..(625): Homolog of NCBI NO: 30314606 NR Description: S receptor kinase [Brassica rapa]
  misc_feature (1)..(217): Homolog of NCBI NO: 15220351 NR Description: receptor kinase, putative; protein id:
  misc_feature (277)..(625): Homolog of NCBI NO: 15220351 NR Description: receptor kinase, putative; protein id:
  misc_feature (1)..(246): Homolog of NCBI NO: 30682152 NR Description: S-locus protein kinase, putative [Arabidopsis
  misc_feature (286)..(625): Homolog of NCBI NO: 30682152 NR Description: S-locus protein kinase, putative [Arabidopsis
  misc_feature (1)..(625): Homolog of NCBI NO: 30682149 NR Description: S-locus protein kinase, putative [Arabidopsis
  misc_feature (1)..(553): Homolog of NCBI NO: 25956275 NR Description: unnamed protein product [Lotus japonicus]
  misc_feature (1)..(388): Homolog of NCBI NO: 25956276 NR Description: similar to S-receptor kinase [Lotus japonicus]
  misc_feature (409)..(515): Homolog of NCBI NO: 25956276 NR Description: similar to S-receptor kinase [Lotus japonicus]
  misc_feature (1)..(240): Homolog of NCBI NO: 25287705 NR Description: protein T1F9.8 [imported] - Arabidopsis thaliana
MRFSSVPGTIQVDYMVYNFTASKEEVTYSYRINKTNLYSRLYLNSAGLLQRLTWFETTQSWKQLWYSPKDLCDNYKVCGNFGYCDSNSLPNCYCIKGFKPVNEQAWDLRDGSAGCMRKTRLSCDGRDGFTRLKRMKLPDTTATIVDREIGLKVCKERCLEDCNCTAFANADIRNGGSGCVIWTREILDMRNYAKGGQDLYVRLAAAELEDKRIKNEKIIGSSIGVSILLLLSFVIFHFWKRKQKRSITIQTPNVDQVRSQDSLINDVVVSRRGYTSKEKKSEYLELPLLELEALATATNNFSNDNKLGQGGFGIVYKGRLLDGKEIAVKRLSKMSSQGTDEFMNEVRLIAKLQHINLVRLLGCCVDKGEKMLIYEYLENLSLDSHLFDQTRSSNLNWQKRFDIINGIARGLLYLHQDSRCRIIHRDLKASNVLLDKNMTPKISDFGMARIFGREETEANTRRVVGTYGYMSPEYAMDGIFSMKSDVFSFGVLLLEIISGKRNKGFYNSNRDLNLLGFVWRHWKEGNELEIVDPINIDSLSSKFPTHEILRCIQIGLLCVQERAEDRPVMSSVMVMLGSETTAIPQPKRPGFCIGRSPLEADSSSSTQRDDECTVNQITLSVIDAR

SEQ ID NO: 89987 - DNA, 2773 bp, Arabidopsis thaliana
  misc_feature (1)..(2773): Ceres Seq. ID no. 12721683
  misc_feature: MA Experiment ID: 20000171 Result: Down-regulated in Transcription
  misc_feature: MA Experiment 20000171 PARAMETER Experiment Name: At_42deg_Heat_P Parameter: Age (day) Value: 14
  misc_feature: MA Experiment 20000171 PARAMETER Experiment Name: At_42deg_Heat_P Parameter: Organism Value: A. thaliana
  misc_feature: MA Experiment 20000171 PARAMETER Experiment Name: At_42deg_Heat_P Parameter: Plant Line Value: WS
  misc_feature: MA Experiment 20000171 PARAMETER Experiment Name: At_42deg_Heat_P Parameter: Temperature (deg C) Value: 42 vs. 22
  misc_feature: MA Experiment 20000171 PARAMETER Experiment Name: At_42deg_Heat_P Parameter: Timepoint (hr) Value: 1
  misc_feature: MA Experiment 20000171 PARAMETER Experiment Name: At_42deg_Heat_P Parameter: Tissue Value: Aerial
  misc_feature: MA Experiment ID: 20000173 Result: Down-regulated in Transcription
  misc_feature: MA Experiment 20000173 PARAMETER Experiment Name: At_42deg_Heat_P Parameter: Age (day) Value: 14
  misc_feature: MA Experiment 20000173 PARAMETER Experiment Name: At_42deg_Heat_P Parameter: Organism Value: A. thaliana
  misc_feature: MA Experiment 20000173 PARAMETER Experiment Name: At_42deg_Heat_P Parameter: Plant Line Value: WS
  misc_feature: MA Experiment 20000173 PARAMETER Experiment Name: At_42deg_Heat_P Parameter: Temperature (deg C) Value: 42 vs. 22
  misc_feature: MA Experiment 20000173 PARAMETER Experiment Name: At_42deg_Heat_P Parameter: Timepoint (hr) Value: 6
  misc_feature: MA Experiment 20000173 PARAMETER Experiment Name: At_42deg_Heat_P Parameter: Tissue Value: Aerial
  misc_feature: MA Experiment ID: 20000182 Result: Up-regulated in Transcription
  misc_feature: MA Experiment 20000182 PARAMETER Experiment Name: At_2mM_SA_P Parameter: Age (day) Value: 14
  misc_feature: MA Experiment 20000182 PARAMETER Experiment Name: At_2mM_SA_P Parameter: Organism Value: A. thaliana
  misc_feature: MA Experiment 20000182 PARAMETER Experiment Name: At_2mM_SA_P Parameter: Plant Line Value: WS
  misc_feature: MA Experiment 20000182 PARAMETER Experiment Name: At_2mM_SA_P Parameter: Timepoint (hr) Value: 6
  misc_feature: MA Experiment 20000182 PARAMETER Experiment Name: At_2mM_SA_P Parameter: Tissue Value: Aerial
  misc_feature: MA Experiment 20000182 PARAMETER Experiment Name: At_2mM_SA_P Parameter: Treatment Value: 2mM SA vs. No Treatment
  misc_feature: MA Experiment ID: 20000185 Result: Down-regulated in Transcription
  misc_feature: MA Experiment 20000185 PARAMETER Experiment Name: At_Roots__P Parameter: Age (day) Value: 7 vs. 21
  misc_feature: MA Experiment 20000185 PARAMETER Experiment Name: At_Roots__P Parameter: Organism Value: A. thaliana
  misc_feature: MA Experiment 20000185 PARAMETER Experiment Name: At_Roots__P Parameter: Tissue Value: Roots vs. Whole Plant
  misc_feature: MA Experiment ID: 20000234 Result: Down-regulated in Transcription
  misc_feature: MA Experiment 20000234 PARAMETER Experiment Name: At_Siliques_P Parameter: Age (day) Value: 21
  misc_feature: MA Experiment 20000234 PARAMETER Experiment Name: At_Siliques_P Parameter: Organism Value: A. thaliana
  misc_feature: MA Experiment 20000234 PARAMETER Experiment Name: At_Siliques_P Parameter: Plant Line Value: WS
  misc_feature: MA Experiment 20000234 PARAMETER Experiment Name: At_Siliques_P Parameter: Tissue Value: Less Than 5mm Siliques vs. Whole Plant
  misc_feature: MA Experiment ID: 20000235 Result: Down-regulated in Transcription
  misc_feature: MA Experiment 20000235 PARAMETER Experiment Name: At_Siliques_P Parameter: Age (day) Value: 21
  misc_feature: MA Experiment 20000235 PARAMETER Experiment Name: At_Siliques_P Parameter: Organism Value: A. thaliana
  misc_feature: MA Experiment 20000235 PARAMETER Experiment Name: At_Siliques_P Parameter: Plant Line Value: WS
  misc_feature: MA Experiment 20000235 PARAMETER Experiment Name: At_Siliques_P Parameter: Tissue Value: 5-10mm Siliques vs. Whole Plant
  misc_feature: MA Experiment ID: 20000264 Result: Down-regulated in Transcription
  misc_feature: MA Experiment 20000264 PARAMETER Experiment Name: At_Open_Flower_P Parameter: Age (day) Value: 21
  misc_feature: MA Experiment 20000264 PARAMETER Experiment Name: At_Open_Flower_P Parameter: Plant Line Value: WS
  misc_feature: MA Experiment 20000264 PARAMETER Experiment Name: At_Open_Flower_P Parameter: Tissue Value: Open Flower vs. Whole Plant
  misc_feature: MA Experiment ID: 20000265 Result: Down-regulated in Transcription
  misc_feature: MA Experiment 20000265 PARAMETER Experiment Name: At_Open_Flower_P Parameter: Age (day) Value: 21
  misc_feature: MA Experiment 20000265 PARAMETER Experiment Name: At_Open_Flower_P Parameter: Plant Line Value: WS
  misc_feature: MA Experiment 20000265 PARAMETER Experiment Name: At_Open_Flower_P Parameter: Tissue Value: Closed Flower vs. Whole Plant
  misc_feature: MA Experiment ID: 20000437 Result: Down-regulated in Transcription
  misc_feature: MA Experiment 20000437 PARAMETER Experiment Name: At_Drought_P Parameter: Age (day) Value: 8
  misc_feature: MA Experiment 20000437 PARAMETER Experiment Name: At_Drought_P Parameter: Organism Value: A. thaliana
  misc_feature: MA Experiment 20000437 PARAMETER Experiment Name: At_Drought_P Parameter: Plant Line Value: WS
  misc_feature: MA Experiment 20000437 PARAMETER Experiment Name: At_Drought_P Parameter: Timepoint (hr) Value: 24
  misc_feature: MA Experiment 20000437 PARAMETER Experiment Name: At_Drought_P Parameter: Tissue Value: Whole Plant
  misc_feature: MA Experiment 20000437 PARAMETER Experiment Name: At_Drought_P Parameter: Treatment Value: Drought vs. No Drought
  misc_feature: MA Experiment ID: 20000438 Result: Down-regulated in Transcription
  misc_feature: MA Experiment 20000438 PARAMETER Experiment Name: At_Shoots__P Parameter: Age (day) Value: 14
  misc_feature: MA Experiment 20000438 PARAMETER Experiment Name: At_Shoots__P Parameter: Tissue Value: Shoots vs. Whole Plant
  misc_feature: MA Experiment ID: 20000439 Result: Down-regulated in Transcription
  misc_feature: MA Experiment 20000439 PARAMETER Experiment Name: At_Roots__P Parameter: Age (day) Value: 14 vs. 21
  misc_feature: MA Experiment 20000439 PARAMETER Experiment Name: At_Roots__P Parameter: Organism Value: A. thaliana
  misc_feature: MA Experiment 20000439 PARAMETER Experiment Name: At_Roots__P Parameter: Tissue Value: Roots vs. Whole Plant
  misc_feature: MA Experiment ID: 20000573 Result: Down-regulated in Transcription
  misc_feature: MA Experiment 20000573 PARAMETER Experiment Name: At_100uM_ABA_Mutants__P Parameter: Organism Value: A. thaliana
  misc_feature: MA Experiment 20000573 PARAMETER Experiment Name: At_100uM_ABA_Mutants__P Parameter: Plant Line Value: CS22 vs. Ler wt
  misc_feature: MA Experiment 20000573 PARAMETER Experiment Name: At_100uM_ABA_Mutants__P Parameter: Timepoint (hr) Value: N/A
  misc_feature: MA Experiment 20000573 PARAMETER Experiment Name: At_100uM_ABA_Mutants__P Parameter: Tissue Value: Whole Plant
  misc_feature: MA Experiment 20000573 PARAMETER Experiment Name: At_100uM_ABA_Mutants__P Parameter: Treatment Value: None
  misc_feature: MA Experiment ID: 20000574 Result: Down-regulated in Transcription
  misc_feature: MA Experiment 20000574 PARAMETER Experiment Name: At_100uM_ABA_Mutants__P Parameter: Organism Value: A. thaliana
  misc_feature: MA Experiment 20000574 PARAMETER Experiment Name: At_100uM_ABA_Mutants__P Parameter: Plant Line Value: CS23 vs. Ler wt
  misc_feature: MA Experiment 20000574 PARAMETER Experiment Name: At_100uM_ABA_Mutants__P Parameter: Timepoint (hr) Value: N/A
  misc_feature: MA Experiment 20000574 PARAMETER Experiment Name: At_100uM_ABA_Mutants__P Parameter: Tissue Value: Whole Plant
  misc_feature: MA Experiment 20000574 PARAMETER Experiment Name: At_100uM_ABA_Mutants__P Parameter: Treatment Value: None
  misc_feature: MA Experiment ID: 20000794 Result: Down-regulated in Transcription
  misc_feature: MA Experiment 20000794 PARAMETER Experiment Name: At_Petals_P Parameter: Age (day) Value: 23-25 days
  misc_feature: MA Experiment 20000794 PARAMETER Experiment Name: At_Petals_P Parameter: Plant Line Value: WS
  misc_feature: MA Experiment 20000794 PARAMETER Experiment Name: At_Petals_P Parameter: Tissue Value: Petals vs. Whole plant
  misc_feature: MA Experiment ID: 20001248 Result: Down-regulated in Transcription
  misc_feature: MA Experiment 20001248 PARAMETER Experiment Name: At_Far-red-induction_P Parameter: Age (day) Value: 7
  misc_feature: MA Experiment 20001248 PARAMETER Experiment Name: At_Far-red-induction_P Parameter: Light Value: Far-red vs. White
  misc_feature: MA Experiment 20001248 PARAMETER Experiment Name: At_Far-red-induction_P Parameter: Organism Value: A. thaliana
  misc_feature: MA Experiment 20001248 PARAMETER Experiment Name: At_Far-red-induction_P Parameter: Plant Line Value: Columbia
  misc_feature: MA Experiment 20001248 PARAMETER Experiment Name: At_Far-red-induction_P Parameter: Timepoint (hr) Value: 4
  misc_feature: MA Experiment 20001248 PARAMETER Experiment Name: At_Far-red-induction_P Parameter: Tissue Value: Whole Plant
  misc_feature: MA Experiment ID: 20001450 Result: Down-regulated in Transcription
  misc_feature: MA Experiment 20001450 PARAMETER Experiment Name: At_Far-red-induction_P Parameter: Age (day) Value: 7
  misc_feature: MA Experiment 20001450 PARAMETER Experiment Name: At_Far-red-induction_P Parameter: Light Value: Far-red vs. White
  misc_feature: MA Experiment 20001450 PARAMETER Experiment Name: At_Far-red-induction_P Parameter: Organism Value: A. thaliana
  misc_feature: MA Experiment 20001450 PARAMETER Experiment Name: At_Far-red-induction_P Parameter: Plant Line Value: Columbia
  misc_feature: MA Experiment 20001450 PARAMETER Experiment Name: At_Far-red-induction_P Parameter: Timepoint (hr) Value: 8
  misc_feature: MA Experiment 20001450 PARAMETER Experiment Name: At_Far-red-induction_P Parameter: Tissue Value: Whole Plant
  misc_feature: MA Experiment ID: 20001557 Result: Down-regulated in Transcription
  misc_feature: MA Experiment 20001557 PARAMETER Experiment Name: At_Drought_Soil_Dry_P Parameter: Age (day) Value: 27
  misc_feature: MA Experiment 20001557 PARAMETER Experiment Name: At_Drought_Soil_Dry_P Parameter: Organism Value: A. thaliana
  misc_feature: MA Experiment 20001557 PARAMETER Experiment Name: At_Drought_Soil_Dry_P Parameter: Plant Line Value: WS
  misc_feature: MA Experiment 20001557 PARAMETER Experiment Name: At_Drought_Soil_Dry_P Parameter: Post Timepoint (hr) Value: 3
  misc_feature: MA Experiment 20001557 PARAMETER Experiment Name: At_Drought_Soil_Dry_P Parameter: Post-Treatment Value: Re-Water vs. No Drought
  misc_feature: MA Experiment 20001557 PARAMETER Experiment Name: At_Drought_Soil_Dry_P Parameter: Timepoint (day) Value: 13
  misc_feature: MA Experiment 20001557 PARAMETER Experiment Name: At_Drought_Soil_Dry_P Parameter: Treatment Value: Drought vs. No Drought
  misc_feature: MA Experiment ID: 20001558 Result: Down-regulated in Transcription
  misc_feature: MA Experiment 20001558 PARAMETER Experiment Name: At_Drought_Soil_Dry_P Parameter: Age (day) Value: 27
  misc_feature: MA Experiment 20001558 PARAMETER Experiment Name: At_Drought_Soil_Dry_P Parameter: Organism Value: A. thaliana
  misc_feature: MA Experiment 20001558 PARAMETER Experiment Name: At_Drought_Soil_Dry_P Parameter: Plant Line Value: WS
  misc_feature: MA Experiment 20001558 PARAMETER Experiment Name: At_Drought_Soil_Dry_P Parameter: Post Timepoint (hr) Value: 6
  misc_feature: MA Experiment 20001558 PARAMETER Experiment Name: At_Drought_Soil_Dry_P Parameter: Post-Treatment Value: Re-Water vs. No Drought
  misc_feature: MA Experiment 20001558 PARAMETER Experiment Name: At_Drought_Soil_Dry_P Parameter: Timepoint (day) Value: 13
  misc_feature: MA Experiment 20001558 PARAMETER Experiment Name: At_Drought_Soil_Dry_P Parameter: Treatment Value: Drought vs. No Drought
  misc_feature: MA Experiment ID: 20001559 Result: Down-regulated in Transcription
  misc_feature: MA Experiment 20001559 PARAMETER Experiment Name: At_Drought_Soil_Dry_P Parameter: Age (day) Value: 28
  misc_feature: MA Experiment 20001559 PARAMETER Experiment Name: At_Drought_Soil_Dry_P Parameter: Organism Value: A. thaliana
  misc_feature: MA Experiment 20001559 PARAMETER Experiment Name: At_Drought_Soil_Dry_P Parameter: Plant Line Value: WS
  misc_feature: MA Experiment 20001559 PARAMETER Experiment Name: At_Drought_Soil_Dry_P Parameter: Post Timepoint (hr) Value: 29
  misc_feature: MA Experiment 20001559 PARAMETER Experiment Name: At_Drought_Soil_Dry_P Parameter: Post-Treatment Value: Re-Water vs. No Drought
  misc_feature: MA Experiment 20001559 PARAMETER Experiment Name: At_Drought_Soil_Dry_P Parameter: Timepoint (day) Value: 14
  misc_feature: MA Experiment 20001559 PARAMETER Experiment Name: At_Drought_Soil_Dry_P Parameter: Treatment Value: Drought vs. No Drought
  misc_feature: MA Experiment ID: 20001560 Result: Down-regulated in Transcription
  misc_feature: MA Experiment 20001560 PARAMETER Experiment Name: At_Drought_Soil_Dry_P Parameter: Age (day) Value: 28
  misc_feature: MA Experiment 20001560 PARAMETER Experiment Name: At_Drought_Soil_Dry_P Parameter: Organism Value: A. thaliana
  misc_feature: MA Experiment 20001560 PARAMETER Experiment Name: At_Drought_Soil_Dry_P Parameter: Plant Line Value: WS
  misc_feature: MA Experiment 20001560 PARAMETER Experiment Name: At_Drought_Soil_Dry_P Parameter: Post Timepoint (hr) Value: None
  misc_feature: MA Experiment 20001560 PARAMETER Experiment Name: At_Drought_Soil_Dry_P Parameter: Post-Treatment Value: None
  misc_feature: MA Experiment 20001560 PARAMETER Experiment Name: At_Drought_Soil_Dry_P Parameter: Timepoint (day) Value: 14
  misc_feature: MA Experiment 20001560 PARAMETER Experiment Name: At_Drought_Soil_Dry_P Parameter: Treatment Value: Drought vs. No Drought
  misc_feature: MA Experiment ID: 20001904 Result: Down-regulated in Transcription
  misc_feature: MA Experiment 20001904 PARAMETER Experiment Name: At_Drought_Reproduction_P Parameter: Age (day) Value: 37
  misc_feature: MA Experiment 20001904 PARAMETER Experiment Name: At_Drought_Reproduction_P Parameter: Organism Value: A. thaliana
  misc_feature: MA Experiment 20001904 PARAMETER Experiment Name: At_Drought_Reproduction_P Parameter: Plant Line Value: WS
  misc_feature: MA Experiment 20001904 PARAMETER Experiment Name: At_Drought_Reproduction_P Parameter: Timepoint (day) Value: 7
  misc_feature: MA Experiment 20001904 PARAMETER Experiment Name: At_Drought_Reproduction_P Parameter: Tissue Value: Rosettes
  misc_feature: MA Experiment 20001904 PARAMETER Experiment Name: At_Drought_Reproduction_P Parameter: Treatment Value: Drought vs. No Drought
  misc_feature: MA Experiment ID: 20001905 Result: Down-regulated in Transcription
  misc_feature: MA Experiment 20001905 PARAMETER Experiment Name: At_Drought_Reproduction_P Parameter: Age (day) Value: 40
  misc_feature: MA Experiment 20001905 PARAMETER Experiment Name: At_Drought_Reproduction_P Parameter: Organism Value: A. thaliana
  misc_feature: MA Experiment 20001905 PARAMETER Experiment Name: At_Drought_Reproduction_P Parameter: Plant Line Value: WS
  misc_feature: MA Experiment 20001905 PARAMETER Experiment Name: At_Drought_Reproduction_P Parameter: Timepoint (day) Value: 10
  misc_feature: MA Experiment 20001905 PARAMETER Experiment Name: At_Drought_Reproduction_P Parameter: Tissue Value: Rosettes
  misc_feature: MA Experiment 20001905 PARAMETER Experiment Name: At_Drought_Reproduction_P Parameter: Treatment Value: Drought vs. No Drought
  misc_feature: MA Experiment ID: 20001906 Result: Down-regulated in Transcription
  misc_feature: MA Experiment 20001906 PARAMETER Experiment Name: At_Drought_Reproduction_P Parameter: Age (day) Value: 35
  misc_feature: MA Experiment 20001906 PARAMETER Experiment Name: At_Drought_Reproduction_P Parameter: Organism Value: A. thaliana
  misc_feature: MA Experiment 20001906 PARAMETER Experiment Name: At_Drought_Reproduction_P Parameter: Plant Line Value: WS
  misc_feature: MA Experiment 20001906 PARAMETER Experiment Name: At_Drought_Reproduction_P Parameter: Timepoint (day) Value: 5
  misc_feature: MA Experiment 20001906 PARAMETER Experiment Name: At_Drought_Reproduction_P Parameter: Tissue Value: Siliques
  misc_feature: MA Experiment 20001906 PARAMETER Experiment Name: At_Drought_Reproduction_P Parameter: Treatment Value: Drought vs. No Drought
aaaacagaacacaagaaagtgtcctagctagagagagagagagagatgagaaatgtaccaaactatcatcattcttacttcatattattcatcataattctgtttcttgctttctctgtttatgcaagcaacttttcagccacagaatctctcactatctcaagcaacaaaaccattatatctcctagtcaaatcttcgagctcggtttcttcaatcccgactcaagttcacgttggtatctcggcatatggtacaagataatccctataagaacctacgtatgggttgcaaacagagacaatcctctctctagttccaacggaactctcaaaatatccgacaataacctcgtcattttcgatcagtccgataggcctgtttggtcgacgaatataaccggaggagatgtgagatcaccagtggctgcagagcttcttgattacggtaattttgttcttagagactccaaaaataataaaccaagtggatttttgtggcagagtttcgatttcccgacagatactttactatcggatatgaaaatgggatgggataacaaaagcggaggattcaacagaatcttgagatcttggaaaaccacagatgatccgtcaagcggagatttctcgactaaactccgaaccagcgggttcccggagttttacatatacaacaaagagtccataacgtacaggagcggtccatggctcggaaatcggtttagcagcgtaccggggatgaaaccagttgattacatagacaacagtttcacagagaataatcaacaagttgtttactcataccgagtcaacaaaaccaacatttactcgatattaagcctaagctccacgggactattacaacgattaacttggatggaggcagcacagagttggaaacagttatggtactcaccaaaggacctatgtgataactacaaagagtgtgggaattacggttattgcgatgcgaacacttcacctatttgtaattgtatcaaagggtttgagccaatgaatgagcaagcggctttgagagatgattctgttggttgcgtgaggaagacgaagctaagctgtgacggtagagatgggtttgtgcggttgaagaagatgagactgccagatactacagagacaagtgtggacaaaggaattgggttgaaagaatgtgaagagaggtgcctaaagggttgtaattgtacggcgtttgctaatacggatattcgtaatggcggttcaggttgtgtgatttggtccggagggctgttcgatatccgaaattatgctaagggaggtcaggatctttacgttagagtagctgctggtgatctagaggacaagagaatcaaaagtaaaaaaatcataggttcgagtattggagtgagcattttgcttcttttaagtttcatcatcttccatttttggaaaaggaagcagaagcgatcaataacaattcaaacacctattgttgatcttgtgagaagccaagattctctaatgaacgaattggtaaaagcaagcaggagttacacatccaaagaaaacaaaaccgattatctagagctcccattgatggagtggaaagctttagccatggcaacaaacaatttttcgacggacaataagcttggacaaggtggttttggtattgtttacaagggaatgttacttgatggaaaagaaatcgcggtaaagagactatcgaaaatgtcttcacaagggaccgatgagttcatgaacgaggttagattaattgcaaagcttcagcacataaaccttgtccggcttctaggttgttgcgtcgataagggtgagaagatgttgatctatgagtacttggagaatctaagccttgactcgcatctctttgaccaaacacgaagctctaacttaaattggcaaaagagatttgatattatcaatggtattgctagaggacttctatatcttcaccaagattcacggtgtaggattatccatagagacttgaaagcaagtaacgtattgcttgataaaaatatgactccaaagatctccgattttgggatggcgaggatctttggacgggaggagacagaggctaatacaaggagggtggtcggaacttacggctacatgtctccagaatatgcaatggacgggatattctcgatgaagtcggatgttttcagctttggggtcttgcttctagagattataagtggaaaaagaaacaaaggattctacaactcaaaccgtgatcttaatctccttggttttgtgtggaggcattggaaggaaggaaaagagctagagattgtagatccgatcaacatcgatgctttgtcatcagaattcccgacacatgaaatcttaagatgtatacaaattggtctcttgtgtgttcaagaacgagccgaagacagaccagtgatgtcctcggtaatggtgatgcttggaagcgaaactacggctattcctcagcctaaacgtcctggtttttgcgtggggagaagttctcttgaggttgattcttcgtcaagtacacagcgagacgatgaatgtacagtgaaccaagtcactctctcggtcattgacgctcggtaatatgtaagattgtaagttatcgacccactctttttatataaaaatatagacacagggcagtaaggtctccacactaggggctgatactttgcatcagtcagtgataccttgtgtaacaagtttcctttgcctccatggaacgtatacaaaagttgtattcaacttcgttgtaaatataattaag

SEQ ID NO: 89988 - protein, 847 aa, Arabidopsis thaliana
  peptide (1)..(847): Ceres Seq. ID no. 12721684
  misc_feature (75)..(190): Pfam Name: D-mannose binding lectin Pfam Description: D-mannose binding lectin
  misc_feature (1)..(847): Homolog of NCBI NO: 1094411 NR Description: S-receptor kinase
  misc_feature (13)..(441): Homolog of NCBI NO: 15220351 NR Description: receptor kinase, putative; protein id:
  misc_feature (495)..(847): Homolog of NCBI NO: 15220351 NR Description: receptor kinase, putative; protein id:
  misc_feature (37)..(610): Homolog of NCBI NO: 25956276 NR Description: similar to S-receptor kinase [Lotus japonicus]
  misc_feature (631)..(737): Homolog of NCBI NO: 25956276 NR Description: similar to S-receptor kinase [Lotus japonicus]
  misc_feature (144)..(847): Homolog of NCBI NO: 25956275 NR Description: unnamed protein product [Lotus japonicus]
  misc_feature (13)..(501): Homolog of NCBI NO: 25287705 NR Description: protein T1F9.8 [imported] - Arabidopsis thaliana
  misc_feature (508)..(740): Homolog of NCBI NO: 25287705 NR Description: protein T1F9.8 [imported] - Arabidopsis thaliana
  misc_feature (61)..(499): Homolog of NCBI NO: 21741575 NR Description: OSJNBa0094O15.5 [Oryza sativa (japonica
  misc_feature (516)..(810): Homolog of NCBI NO: 21741575 NR Description: OSJNBa0094O15.5 [Oryza sativa (japonica
MRNVPNYHHSYFILFIIILFLAFSVYASNFSATESLTISSNKTIISPSQIFELGFFNPDSSSRWYLGIWYKIIPIRTYVWVANRDNPLSSSNGTLKISDNNLVIFDQSDRPVWSTNITGGDVRSPVAAELLDYGNFVLRDSKNNKPSGFLWQSFDFPTDTLLSDMKMGWDNKSGGFNRILRSWKTTDDPSSGDFSTKLRTSGFPEFYIYNKESITYRSGPWLGNRFSSVPGMKPVDYIDNSFTENNQQVVYSYRVNKTNIYSILSLSSTGLLQRLTWMEAAQSWKQLWYSPKDLCDNYKECGNYGYCDANTSPICNCIKGFEPMNEQAALRDDSVGCVRKTKLSCDGRDGFVRLKKMRLPDTTETSVDKGIGLKECEERCLKGCNCTAFANTDIRNGGSGCVIWSGGLFDIRNYAKGGQDLYVRVAAGDLEDKRIKSKKIIGSSIGVSILLLLSFIIFHFWKRKQKRSITIQTPIVDLVRSQDSLMNELVKASRSYTSKENKTDYLELPLMEWKALAMATNNFSTDNKLGQGGFGIVYKGMLLDGKEIAVKRLSKMSSQGTDEFMNEVRLIAKLQHINLVRLLGCCVDKGEKMLIYEYLENLSLDSHLFDQTRSSNLNWQKRFDIINGIARGLLYLHQDSRCRIIHRDLKASNVLLDKNMTPKISDFGMARIFGREETEANTRRVVGTYGYMSPEYAMDGIFSMKSDVFSFGVLLLEIISGKRNKGFYNSNRDLNLLGFVWRHWKEGKELEIVDPINIDALSSEFPTHEILRCIQIGLLCVQERAEDRPVMSSVMVMLGSETTAIPQPKRPGFCVGRSSLEVDSSSSTQRDDECTVNQVTLSVIDAR

SEQ ID NO: 89989 - protein, 683 aa, Arabidopsis thaliana
  peptide (1)..(683): Ceres Seq. ID no. 12721685
  misc_feature (181)..(289): Pfam Name: PAN domain Pfam Description: PAN domain
  misc_feature (1)..(683): Homolog of NCBI NO: 1094411 NR Description: S-receptor kinase
  misc_feature (1)..(277): Homolog of NCBI NO: 15220351 NR Description: receptor kinase, putative; protein id:
  misc_feature (331)..(683): Homolog of NCBI NO: 15220351 NR Description: receptor kinase, putative; protein id:
  misc_feature (1)..(446): Homolog of NCBI NO: 25956276 NR Description: similar to S-receptor kinase [Lotus japonicus]
  misc_feature (467)..(573): Homolog of NCBI NO: 25956276 NR Description: similar to S-receptor kinase [Lotus japonicus]
  misc_feature (1)..(683): Homolog of NCBI NO: 25956275 NR Description: unnamed protein product [Lotus japonicus]
  misc_feature (1)..(337): Homolog of NCBI NO: 25287705 NR Description: protein T1F9.8 [imported] - Arabidopsis thaliana
  misc_feature (344)..(576): Homolog of NCBI NO: 25287705 NR Description: protein T1F9.8 [imported] - Arabidopsis thaliana
  misc_feature (1)..(335): Homolog of NCBI NO: 21741575 NR Description: OSJNBa0094O15.5 [Oryza sativa (japonica
  misc_feature (352)..(646): Homolog of NCBI NO: 21741575 NR Description: OSJNBa0094O15.5 [Oryza sativa (japonica
MKMGWDNKSGGFNRILRSWKTTDDPSSGDFSTKLRTSGFPEFYIYNKESITYRSGPWLGNRFSSVPGMKPVDYIDNSFTENNQQVVYSYRVNKTNIYSILSLSSTGLLQRLTWMEAAQSWKQLWYSPKDLCDNYKECGNYGYCDANTSPICNCIKGFEPMNEQAALRDDSVGCVRKTKLSCDGRDGFVRLKKMRLPDTTETSVDKGIGLKECEERCLKGCNCTAFANTDIRNGGSGCVIWSGGLFDIRNYAKGGQDLYVRVAAGDLEDKRIKSKKIIGSSIGVSILLLLSFIIFHFWKRKQKRSITIQTPIVDLVRSQDSLMNELVKASRSYTSKENKTDYLELPLMEWKALAMATNNFSTDNKLGQGGFGIVYKGMLLDGKEIAVKRLSKMSSQGTDEFMNEVRLIAKLQHINLVRLLGCCVDKGEKMLIYEYLENLSLDSHLFDQTRSSNLNWQKRFDIINGIARGLLYLHQDSRCRIIHRDLKASNVLLDKNMTPKISDFGMARIFGREETEANTRRVVGTYGYMSPEYAMDGIFSMKSDVFSFGVLLLEIISGKRNKGFYNSNRDLNLLGFVWRHWKEGKELEIVDPINIDALSSEFPTHEILRCIQIGLLCVQERAEDRPVMSSVMVMLGSETTAIPQPKRPGFCVGRSSLEVDSSSSTQRDDECTVNQVTLSVIDAR

SEQ ID NO: 89990 - protein, 681 aa, Arabidopsis thaliana
  peptide (1)..(681): Ceres Seq. ID no. 12721686
  misc_feature (179)..(287): Pfam Name: PAN domain Pfam Description: PAN domain
  misc_feature (1)..(681): Homolog of NCBI NO: 1094411 NR Description: S-receptor kinase
  misc_feature (1)..(275): Homolog of NCBI NO: 15220351 NR Description: receptor kinase, putative; protein id:
  misc_feature (329)..(681): Homolog of NCBI NO: 15220351 NR Description: receptor kinase, putative; protein id:
  misc_feature (1)..(444): Homolog of NCBI NO: 25956276 NR Description: similar to S-receptor kinase [Lotus japonicus]
  misc_feature (465)..(571): Homolog of NCBI NO: 25956276 NR Description: similar to S-receptor kinase [Lotus japonicus]
  misc_feature (1)..(681): Homolog of NCBI NO: 25956275 NR Description: unnamed protein product [Lotus japonicus]
  misc_feature (1)..(335): Homolog of NCBI NO: 25287705 NR Description: protein T1F9.8 [imported] - Arabidopsis thaliana
  misc_feature (342)..(574): Homolog of NCBI NO: 25287705 NR Description: protein T1F9.8 [imported] - Arabidopsis thaliana
  misc_feature (1)..(333): Homolog of NCBI NO: 21741575 NR Description: OSJNBa0094O15.5 [Oryza sativa (japonica
  misc_feature (350)..(644): Homolog of NCBI NO: 21741575 NR Description: OSJNBa0094O15.5 [Oryza sativa (japonica
MGWDNKSGGFNRILRSWKTTDDPSSGDFSTKLRTSGFPEFYIYNKESITYRSGPWLGNRFSSVPGMKPVDYIDNSFTENNQQVVYSYRVNKTNIYSILSLSSTGLLQRLTWMEAAQSWKQLWYSPKDLCDNYKECGNYGYCDANTSPICNCIKGFEPMNEQAALRDDSVGCVRKTKLSCDGRDGFVRLKKMRLPDTTETSVDKGIGLKECEERCLKGCNCTAFANTDIRNGGSGCVIWSGGLFDIRNYAKGGQDLYVRVAAGDLEDKRIKSKKIIGSSIGVSILLLLSFIIFHFWKRKQKRSITIQTPIVDLVRSQDSLMNELVKASRSYTSKENKTDYLELPLMEWKALAMATNNFSTDNKLGQGGFGIVYKGMLLDGKEIAVKRLSKMSSQGTDEFMNEVRLIAKLQHINLVRLLGCCVDKGEKMLIYEYLENLSLDSHLFDQTRSSNLNWQKRFDIINGIARGLLYLHQDSRCRIIHRDLKASNVLLDKNMTPKISDFGMARIFGREETEANTRRVVGTYGYMSPEYAMDGIFSMKSDVFSFGVLLLEIISGKRNKGFYNSNRDLNLLGFVWRHWKEGKELEIVDPINIDALSSEFPTHEILRCIQIGLLCVQERAEDRPVMSSVMVMLGSETTAIPQPKRPGFCVGRSSLEVDSSSSTQRDDECTVNQVTLSVIDAR

SEQ ID NO: 89991 - DNA, 2067 bp, Arabidopsis thaliana
  misc_feature (1)..(2067): Ceres Seq. ID no. 12721687
  misc_feature: MA Experiment ID: 20000179 Result: Up-regulated in Transcription
  misc_feature: MA Experiment 20000179 PARAMETER Experiment Name: At_Germinating_Seeds_P Parameter: Age (hr) Value: 6 vs. 0
  misc_feature: MA Experiment 20000179 PARAMETER Experiment Name: At_Germinating_Seeds_P Parameter: Tissue Value: Germinating Seeds
  misc_feature: MA Experiment ID: 20000185 Result: Up-regulated in Transcription
  misc_feature: MA Experiment 20000185 PARAMETER Experiment Name: At_Roots__P Parameter: Age (day) Value: 7 vs. 21
  misc_feature: MA Experiment 20000185 PARAMETER Experiment Name: At_Roots__P Parameter: Organism Value: A. thaliana
  misc_feature: MA Experiment 20000185 PARAMETER Experiment Name: At_Roots__P Parameter: Tissue Value: Roots vs. Whole Plant
  misc_feature: MA Experiment ID: 20000213 Result: Up-regulated in Transcription
  misc_feature: MA Experiment 20000213 PARAMETER Experiment Name: At_4deg_Cold_P Parameter: Timepoint (hr) Value: 2
  misc_feature: MA Experiment ID: 20000439 Result: Up-regulated in Transcription
  misc_feature: MA Experiment 20000439 PARAMETER Experiment Name: At_Roots__P Parameter: Age (day) Value: 14 vs. 21
  misc_feature: MA Experiment 20000439 PARAMETER Experiment Name: At_Roots__P Parameter: Organism Value: A. thaliana
  misc_feature: MA Experiment 20000439 PARAMETER Experiment Name: At_Roots__P Parameter: Tissue Value: Roots vs. Whole Plant
  misc_feature: MA Experiment ID: 20000794 Result: Up-regulated in Transcription
  misc_feature: MA Experiment 20000794 PARAMETER Experiment Name: At_Petals_P Parameter: Age (day) Value: 23-25 days
  misc_feature: MA Experiment 20000794 PARAMETER Experiment Name: At_Petals_P Parameter: Plant Line Value: WS
  misc_feature: MA Experiment 20000794 PARAMETER Experiment Name: At_Petals_P Parameter: Tissue Value: Petals vs. Whole plant
  misc_feature: MA Experiment ID: 20001248 Result: Down-regulated in Transcription
  misc_feature: MA Experiment 20001248 PARAMETER Experiment Name: At_Far-red-induction_P Parameter: Age (day) Value: 7
  misc_feature: MA Experiment 20001248 PARAMETER Experiment Name: At_Far-red-induction_P Parameter: Light Value: Far-red vs. White
  misc_feature: MA Experiment 20001248 PARAMETER Experiment Name: At_Far-red-induction_P Parameter: Organism Value: A. thaliana
  misc_feature: MA Experiment 20001248 PARAMETER Experiment Name: At_Far-red-induction_P Parameter: Plant Line Value: Columbia
  misc_feature: MA Experiment 20001248 PARAMETER Experiment Name: At_Far-red-induction_P Parameter: Timepoint (hr) Value: 4
  misc_feature: MA Experiment 20001248 PARAMETER Experiment Name: At_Far-red-induction_P Parameter: Tissue Value: Whole Plant
  misc_feature: MA Experiment ID: 20001451 Result: Down-regulated in Transcription
  misc_feature: MA Experiment 20001451 PARAMETER Experiment Name: At_Far-red-induction_P Parameter: Age (day) Value: 7
  misc_feature: MA Experiment 20001451 PARAMETER Experiment Name: At_Far-red-induction_P Parameter: Light Value: Far-red vs. White
  misc_feature: MA Experiment 20001451 PARAMETER Experiment Name: At_Far-red-induction_P Parameter: Organism Value: A. thaliana
  misc_feature: MA Experiment 20001451 PARAMETER Experiment Name: At_Far-red-induction_P Parameter: Plant Line Value: Columbia
  misc_feature: MA Experiment 20001451 PARAMETER Experiment Name: At_Far-red-induction_P Parameter: Timepoint (hr) Value: 24
  misc_feature: MA Experiment 20001451 PARAMETER Experiment Name: At_Far-red-induction_P Parameter: Tissue Value: Whole Plant
  misc_feature: MA Experiment ID: 20001557 Result: Up-regulated in Transcription
  misc_feature: MA Experiment 20001557 PARAMETER Experiment Name: At_Drought_Soil_Dry_P Parameter: Age (day) Value: 27
  misc_feature: MA Experiment 20001557 PARAMETER Experiment Name: At_Drought_Soil_Dry_P Parameter: Organism Value: A. thaliana
  misc_feature: MA Experiment 20001557 PARAMETER Experiment Name: At_Drought_Soil_Dry_P Parameter: Plant Line Value: WS
  misc_feature: MA Experiment 20001557 PARAMETER Experiment Name: At_Drought_Soil_Dry_P Parameter: Post Timepoint (hr) Value: 3
  misc_feature: MA Experiment 20001557 PARAMETER Experiment Name: At_Drought_Soil_Dry_P Parameter: Post-Treatment Value: Re-Water vs. No Drought
  misc_feature: MA Experiment 20001557 PARAMETER Experiment Name: At_Drought_Soil_Dry_P Parameter: Timepoint (day) Value: 13
  misc_feature: MA Experiment 20001557 PARAMETER Experiment Name: At_Drought_Soil_Dry_P Parameter: Treatment Value: Drought vs. No Drought
  misc_feature: MA Experiment ID: 20001904 Result: Up-regulated in Transcription
  misc_feature: MA Experiment 20001904 PARAMETER Experiment Name: At_Drought_Reproduction_P Parameter: Age (day) Value: 37
  misc_feature: MA Experiment 20001904 PARAMETER Experiment Name: At_Drought_Reproduction_P Parameter: Organism Value: A. thaliana
  misc_feature: MA Experiment 20001904 PARAMETER Experiment Name: At_Drought_Reproduction_P Parameter: Plant Line Value: WS
  misc_feature: MA Experiment 20001904 PARAMETER Experiment Name: At_Drought_Reproduction_P Parameter: Timepoint (day) Value: 7
  misc_feature: MA Experiment 20001904 PARAMETER Experiment Name: At_Drought_Reproduction_P Parameter: Tissue Value: Rosettes
  misc_feature: MA Experiment 20001904 PARAMETER Experiment Name: At_Drought_Reproduction_P Parameter: Treatment Value: Drought vs. No Drought
  misc_feature: MA Experiment ID: 20001905 Result: Up-regulated in Transcription
  misc_feature: MA Experiment 20001905 PARAMETER Experiment Name: At_Drought_Reproduction_P Parameter: Age (day) Value: 40
  misc_feature: MA Experiment 20001905 PARAMETER Experiment Name: At_Drought_Reproduction_P Parameter: Organism Value: A. thaliana
  misc_feature: MA Experiment 20001905 PARAMETER Experiment Name: At_Drought_Reproduction_P Parameter: Plant Line Value: WS
  misc_feature: MA Experiment 20001905 PARAMETER Experiment Name: At_Drought_Reproduction_P Parameter: Timepoint (day) Value: 10
  misc_feature: MA Experiment 20001905 PARAMETER Experiment Name: At_Drought_Reproduction_P Parameter: Tissue Value: Rosettes
  misc_feature: MA Experiment 20001905 PARAMETER Experiment Name: At_Drought_Reproduction_P Parameter: Treatment Value: Drought vs. No Drought
  misc_feature: MA Experiment ID: 20001906 Result: Up-regulated in Transcription
  misc_feature: MA Experiment 20001906 PARAMETER Experiment Name: At_Drought_Reproduction_P Parameter: Age (day) Value: 35
  misc_feature: MA Experiment 20001906 PARAMETER Experiment Name: At_Drought_Reproduction_P Parameter: Organism Value: A. thaliana
  misc_feature: MA Experiment 20001906 PARAMETER Experiment Name: At_Drought_Reproduction_P Parameter: Plant Line Value: WS
  misc_feature: MA Experiment 20001906 PARAMETER Experiment Name: At_Drought_Reproduction_P Parameter: Timepoint (day) Value: 5
  misc_feature: MA Experiment 20001906 PARAMETER Experiment Name: At_Drought_Reproduction_P Parameter: Tissue Value: Siliques
  misc_feature: MA Experiment 20001906 PARAMETER Experiment Name: At_Drought_Reproduction_P Parameter: Treatment Value: Drought vs. No Drought
accaaacccttcatcttcttcgtttcagcttttttttctctcatgtttctcgtcttcttctaaacttttgtgaccacccaaaaaaaaaaacgtaacggaacaaaaaaaaaaatgctccgatcacggaattgtaagatctccgccgcgaacgaagccgttatttctaatcgtctttcaatttctaatctcaaagttttattcgtttttgaatcctcgccattgaataatttgattaatcgtttttccgataagcttcgtcgttgaacttatctccgatctctgcaaattttctctcaaatctctccgatcttcctaattgattagaaacttctccatcgtttgctcaattatttcggatttttctctgtttctttccaacaaaatcttcaatggataagaagaagaattcgtttccagataatcttcctgaaggcacaatctctgagcttatgcagaagcagaacaatgtgcagccttctgttattgtgattggtagtggtatatcaggtcttgctgctgctaggaatctctctgaagcatctttcaaggtgactgttcttgaatcacgcgataggattggtggtcgtatccatacggattattcctttggttgtcctgttgatatgggagcttcatggttacatggagtctctgatgagaatcccttagctcccattatacgccgtttaggactgactttataccgaactagcggggatgactccatcttgtatgatcatgatctggagagttatggactttttgacatgcatgggaataaaattccgccgcagttggttactaaagttggagatgcattcaagagaattctcgaagagacggagaaaataagggatgaaactgccaatgacatgtctgttcttcaaggaatatctatcgtcttggatagaaatccagaactaaggcaagaagggatggcgtacgaagttttacagtggtacttatgtaggatggaggcgtggtttgctgtagatgcgaatttaatttcactaaaatgttgggatcaggatgaatgtctttcaggtggtcatggtctaatggtgcagggttatgagccagtgatcagaacaattgcaaaagatcttgatattcgcttgaaccatagggttactaaagttgtaagaacatctaataacaaggtgatagtcgcagttgaaggcggaaccaattttgttgctgatgctgttattattacggttccaatcggtgttctcaaggcaaatctaattcaatttgagccagagctcccacaatggaaaacctctgcgatatcgggtctcggtgtaggcaatgagaataagattgccttgagatttgacagagcgttttggcctaatgtggagttcctcgggatggtggcaccgacttcttacgcatgtggctattttctgaatcttcacaaggcaacaggccatccggtgcttgtttatatggctgcagggaatctagcacaagacctcgaaaagctatctgatgaagctacagcaaatttcgtgatgctgcaacttaagaaaatgtttccagacgcacctgacccggctcaatatctagtgacacggtggggaacggatccaaatacattggggtgttatgcgtatgacgtagtaggaatgccggaagatctgtacccgaggctaggagagccggttgataatattttcttcggaggagaagccgtgaacgtcgagcatcaaggatccgctcacggagctttcttagcaggagtctcggcctcgcagaattgtcaaaggtatatctttgaacgactcggggcttgggagaaactcaagcttgtttctcttatggggaacagtgacattctcgaaactgcaactgtgcctctccaaatctccaggatgtgattatatctgcttaacagacagaagcagggttccaatttatttttctccatctgaacaaataaaaaaacattcatcaattgtgaatgtgaagtcatgtttttttttctttttcttgttctatgatagatctctcgatgggttatataaactgtttataattcaatgatctaaacatgtttaccag

SEQ ID NO: 89992 - protein, 497 aa, Arabidopsis thaliana
  peptide (1)..(497): Ceres Seq. ID no. 12721688
  misc_feature (38)..(394): Pfam Name: Flavin containing amine oxidoreductase Pfam Description: Flavin containing amine oxidoreductase
  misc_feature (1)..(497): Homolog of NCBI NO: 15218830 NR Description: polyamine oxidase, putative; protein id: supported by cDNA: gi_13877614 [Arabidopsis thaliana] putative protein kinase gb|AAD22129 [Arabidopsis thaliana]
  misc_feature (1)..(497): Homolog of NCBI NO: 13877615 NR Description: putative protein kinase gb|AAD22129 [Arabidopsis
  misc_feature (1)..(394): Homolog of NCBI NO: 25404949 NR Description: protein F1E22.18 [imported] - Arabidopsis >gi|6686400|gb|AAF23834.1|AC007234_6 F1E22.18 [Arabidopsis
  misc_feature (391)..(497): Homolog of NCBI NO: 25404949 NR Description: protein F1E22.18 [imported] - Arabidopsis >gi|6686400|gb|AAF23834.1|AC007234_6 F1E22.18 [Arabidopsis
  misc_feature (1)..(497): Homolog of NCBI NO: 15224204 NR Description: putative amine oxidase; protein id: At2g43020.1, by cDNA: gi_18650597 [Arabidopsis thaliana]
  misc_feature (1)..(497): Homolog of NCBI NO: 18650598 NR Description: At2g43020/MFL8.12 [Arabidopsis thaliana]
  misc_feature (19)..(497): Homolog of NCBI NO: 15231622 NR Description: putative protein; protein id: At3g59050.1, by cDNA: 16421., supported by cDNA: gi_18086417 [Arabidopsis
  misc_feature (19)..(497): Homolog of NCBI NO: 21553762 NR Description: putative amine oxidase [Arabidopsis thaliana]
  misc_feature (29)..(497): Homolog of NCBI NO: 38344167 NR Description: OSJNBa0053K19.6 [Oryza sativa (japonica
  misc_feature (187)..(453): Homolog of NCBI NO: 22213173 NR Description: putative polyamine oxidase, 3'-partial [Oryza
MDKKKNSFPDNLPEGTISELMQKQNNVQPSVIVIGSGISGLAAARNLSEASFKVTVLESRDRIGGRIHTDYSFGCPVDMGASWLHGVSDENPLAPIIRRLGLTLYRTSGDDSILYDHDLESYGLFDMHGNKIPPQLVTKVGDAFKRILEETEKIRDETANDMSVLQGISIVLDRNPELRQEGMAYEVLQWYLCRMEAWFAVDANLISLKCWDQDECLSGGHGLMVQGYEPVIRTIAKDLDIRLNHRVTKVVRTSNNKVIVAVEGGTNFVADAVIITVPIGVLKANLIQFEPELPQWKTSAISGLGVGNENKIALRFDRAFWPNVEFLGMVAPTSYACGYFLNLHKATGHPVLVYMAAGNLAQDLEKLSDEATANFVMLQLKKMFPDAPDPAQYLVTRWGTDPNTLGCYAYDVVGMPEDLYPRLGEPVDNIFFGGEAVNVEHQGSAHGAFLAGVSASQNCQRYIFERLGAWEKLKLVSLMGNSDILETATVPLQISRM

SEQ ID NO: 89993 - protein, 477 aa, Arabidopsis thaliana
  peptide (1)..(477): Ceres Seq. ID no. 12721689
  misc_feature (18)..(374): Pfam Name: Flavin containing amine oxidoreductase Pfam Description: Flavin containing amine oxidoreductase
  misc_feature (1)..(477): Homolog of NCBI NO: 15218830 NR Description: polyamine oxidase, putative; protein id: supported by cDNA: gi_13877614 [Arabidopsis thaliana] putative protein kinase gb|AAD22129 [Arabidopsis thaliana]
  misc_feature (1)..(477): Homolog of NCBI NO: 13877615 NR Description: putative protein kinase gb|AAD22129 [Arabidopsis
  misc_feature (1)..(374): Homolog of NCBI NO: 25404949 NR Description: protein F1E22.18 [imported] - Arabidopsis >gi|6686400|gb|AAF23834.1|AC007234_6 F1E22.18 [Arabidopsis
  misc_feature (371)..(477): Homolog of NCBI NO: 25404949 NR Description: protein F1E22.18 [imported] - Arabidopsis >gi|6686400|gb|AAF23834.1|AC007234_6 F1E22.18 [Arabidopsis
  misc_feature (1)..(477): Homolog of NCBI NO: 15224204 NR Description: putative amine oxidase; protein id: At2g43020.1, by cDNA: gi_18650597 [Arabidopsis thaliana]
  misc_feature (1)..(477): Homolog of NCBI NO: 18650598 NR Description: At2g43020/MFL8.12 [Arabidopsis thaliana]
  misc_feature (1)..(477): Homolog of NCBI NO: 15231622 NR Description: putative protein; protein id: At3g59050.1, by cDNA: 16421., supported by cDNA: gi_18086417 [Arabidopsis
  misc_feature (1)..(477): Homolog of NCBI NO: 21553762 NR Description: putative amine oxidase [Arabidopsis thaliana]
  misc_feature (9)..(477): Homolog of NCBI NO: 38344167 NR Description: OSJNBa0053K19.6 [Oryza sativa (japonica
  misc_feature (167)..(433): Homolog of NCBI NO: 22213173 NR Description: putative polyamine oxidase, 3'-partial [Oryza
MQKQNNVQPSVIVIGSGISGLAAARNLSEASFKVTVLESRDRIGGRIHTDYSFGCPVDMGASWLHGVSDENPLAPIIRRLGLTLYRTSGDDSILYDHDLESYGLFDMHGNKIPPQLVTKVGDAFKRILEETEKIRDETANDMSVLQGISIVLDRNPELRQEGMAYEVLQWYLCRMEAWFAVDANLISLKCWDQDECLSGGHGLMVQGYEPVIRTIAKDLDIRLNHRVTKVVRTSNNKVIVAVEGGTNFVADAVIITVPIGVLKANLIQFEPELPQWKTSAISGLGVGNENKIALRFDRAFWPNVEFLGMVAPTSYACGYFLNLHKATGHPVLVYMAAGNLAQDLEKLSDEATANFVMLQLKKMFPDAPDPAQYLVTRWGTDPNTLGCYAYDVVGMPEDLYPRLGEPVDNIFFGGEAVNVEHQGSAHGAFLAGVSASQNCQRYIFERLGAWEKLKLVSLMGNSDILETATVPLQISRM

SEQ ID NO: 89994 - protein, 419 aa, Arabidopsis thaliana
  peptide (1)..(419): Ceres Seq. ID no. 12721690
  misc_feature (1)..(316): Pfam Name: Flavin containing amine oxidoreductase Pfam Description: Flavin containing amine oxidoreductase
  misc_feature (1)..(419): Homolog of NCBI NO: 15218830 NR Description: polyamine oxidase, putative; protein id: supported by cDNA: gi_13877614 [Arabidopsis thaliana] putative protein kinase gb|AAD22129 [Arabidopsis thaliana]
  misc_feature (1)..(419): Homolog of NCBI NO: 13877615 NR Description: putative protein kinase gb|AAD22129 [Arabidopsis
  misc_feature (1)..(316): Homolog of NCBI NO: 25404949 NR Description: protein F1E22.18 [imported] - Arabidopsis >gi|6686400|gb|AAF23834.1|AC007234_6 F1E22.18 [Arabidopsis
  misc_feature (313)..(419): Homolog of NCBI NO: 25404949 NR Description: protein F1E22.18 [imported] - Arabidopsis >gi|6686400|gb|AAF23834.1|AC007234_6 F1E22.18 [Arabidopsis
  misc_feature (1)..(419): Homolog of NCBI NO: 15224204 NR Description: putative amine oxidase; protein id: At2g43020.1, by cDNA: gi_18650597 [Arabidopsis thaliana]
  misc_feature (1)..(419): Homolog of NCBI NO: 18650598 NR Description: At2g43020/MFL8.12 [Arabidopsis thaliana]
  misc_feature (1)..(419): Homolog of NCBI NO: 15231622 NR Description: putative protein; protein id: At3g59050.1, by cDNA: 16421., supported by cDNA: gi_18086417 [Arabidopsis
  misc_feature (1)..(419): Homolog of NCBI NO: 21553762 NR Description: putative amine oxidase [Arabidopsis thaliana]
  misc_feature (1)..(419): Homolog of NCBI NO: 38344167 NR Description: OSJNBa0053K19.6 [Oryza sativa (japonica
  misc_feature (109)..(375): Homolog of NCBI NO: 22213173 NR Description: putative polyamine oxidase, 3'-partial [Oryza
MGASWLHGVSDENPLAPIIRRLGLTLYRTSGDDSILYDHDLESYGLFDMHGNKIPPQLVTKVGDAFKRILEETEKIRDETANDMSVLQGISIVLDRNPELRQEGMAYEVLQWYLCRMEAWFAVDANLISLKCWDQDECLSGGHGLMVQGYEPVIRTIAKDLDIRLNHRVTKVVRTSNNKVIVAVEGGTNFVADAVIITVPIGVLKANLIQFEPELPQWKTSAISGLGVGNENKIALRFDRAFWPNVEFLGMVAPTSYACGYFLNLHKATGHPVLVYMAAGNLAQDLEKLSDEATANFVMLQLKKMFPDAPDPAQYLVTRWGTDPNTLGCYAYDVVGMPEDLYPRLGEPVDNIFFGGEAVNVEHQGSAHGAFLAGVSASQNCQRYIFERLGAWEKLKLVSLMGNSDILETATVPLQISRM

SEQ ID NO: 89995 - DNA, 642 bp, Arabidopsis thaliana
  misc_feature (1)..(642): Ceres Seq. ID no. 12721749
  misc_feature: MA Experiment ID: 20000314 Result: Down-regulated in Transcription
  misc_feature: MA Experiment 20000314 PARAMETER Experiment Name: At_14day_Shoots-Roots_Sub_P Parameter: Age (day) Value: 14
  misc_feature: MA Experiment 20000314 PARAMETER Experiment Name: At_14day_Shoots-Roots_Sub_P Parameter: Organism Value: A. thaliana
  misc_feature: MA Experiment 20000314 PARAMETER Experiment Name: At_14day_Shoots-Roots_Sub_P Parameter: Plant Line Value: WS
  misc_feature: MA Experiment 20000314 PARAMETER Experiment Name: At_14day_Shoots-Roots_Sub_P Parameter: Tissue Value: Roots vs. Whole Plant
  misc_feature: MA Experiment ID: 20000315 Result: Up-regulated in Transcription
  misc_feature: MA Experiment 20000315 PARAMETER Experiment Name: At_14day_Shoots-Roots_Sub_P Parameter: Age (day) Value: 14
  misc_feature: MA Experiment 20000315 PARAMETER Experiment Name: At_14day_Shoots-Roots_Sub_P Parameter: Organism Value: A. thaliana
  misc_feature: MA Experiment 20000315 PARAMETER Experiment Name: At_14day_Shoots-Roots_Sub_P Parameter: Plant Line Value: WS
  misc_feature: MA Experiment 20000315 PARAMETER Experiment Name: At_14day_Shoots-Roots_Sub_P Parameter: Tissue Value: Shoots vs. Whole Plant
  misc_feature: MA Experiment ID: 20000355 Result: Down-regulated in Transcription
  misc_feature: MA Experiment 20000355 PARAMETER Experiment Name: At_Siliques_Sub_P Parameter: Age (day) Value: 21
  misc_feature: MA Experiment 20000355 PARAMETER Experiment Name: At_Siliques_Sub_P Parameter: Organism Value: A. thaliana
  misc_feature: MA Experiment 20000355 PARAMETER Experiment Name: At_Siliques_Sub_P Parameter: Plant Line Value: WS
  misc_feature: MA Experiment 20000355 PARAMETER Experiment Name: At_Siliques_Sub_P Parameter: Tissue Value: Less Than 5mm Siliques vs. Whole Plant
  misc_feature: MA Experiment ID: 20000440 Result: Down-regulated in Transcription
  misc_feature: MA Experiment 20000440 PARAMETER Experiment Name: At_Closed-Flower__Sub_P Parameter: Tissue Value: Closed Flower vs. Whole Plant
atcaatacaagcttacaactctcccacatacatttttgtgatcaaacaactaatcaatcaaaagatggaaggcaagactttgattgtaagtgtgctcataatgagtctgttcatggcacaaaatcaagttgacgcaaatatttgctgtccgtccatccaggctagaactttctataatgcttgcctcttcgcggtaggtagcccgtcaagctgtatacgcaactcgagttgtcttgacattagtgagtcgacatgtcctagaggatatacgaatgacattctcgaaaacacaggtgatgctgtcactgaatactgcaagttggggtgtgtatcctctgtttgcggtgctttaaccattctccagaactccgatgcaagtgaaatcgtgaatggagaagttgaaaaatgtaccatggcatgttctacagtctgtaccaagggctctatgaatgcagttgaaaatgcgtagaccaccatatccatgaagataccacgtacatctgtggtgaagggcgtgaatcgtcgtcatcttttacagtgttgtatatttcatgttttcaataatcgtcgtgtttgtgacatgttaagataatcgtgcttgctgccgtttataatatatttaatcggtgtataatttctgtg

SEQ ID NO: 89996 - protein, 155 aa, Arabidopsis thaliana
  peptide (1)..(155): Ceres Seq. ID no. 12721750
  misc_feature (46)..(91): Pfam Name: Plant thionin Pfam Description: Plant thionin
  misc_feature (22)..(155): Homolog of NCBI NO: 15218931 NR Description: thionin, putative; protein id: At1g66100.1, by cDNA: gi_14190504, supported by cDNA: gi_15809773 [Arabidopsis
  misc_feature (22)..(155): Homolog of NCBI NO: 1181533 NR Description: thionin >gi|1586834|prf||2204399B thionin
  misc_feature (22)..(155): Homolog of NCBI NO: 1076466 NR Description: thionin variant Thi2Ca2 - Abyssinian crambe crambin precursor=thionin variant Thi2Ca2 [Crambe abyssinica,
  misc_feature (22)..(155): Homolog of NCBI NO: 15239447 NR Description: thionin Thi2.2; protein id: At5g36910.1, by cDNA: 1523., supported by cDNA: gi_1181532 [Arabidopsis
  misc_feature (22)..(155): Homolog of NCBI NO: 21553588 NR Description: thionin Thi2.2 [Arabidopsis thaliana]
  misc_feature (22)..(155): Homolog of NCBI NO: 1076462 NR Description: thionin variant Thi2Ca1 - Abyssinian crambe
  misc_feature (22)..(155): Homolog of NCBI NO: 1076463 NR Description: thionin variant Thi2Ca10 - Abyssinian crambe crambin precursor=thionin variant Thi2Ca10 [Crambe abyssinica,
  misc_feature (22)..(155): Homolog of NCBI NO: 6650328 NR Description: thionin [Brassica rapa subsp. pekinensis]
  misc_feature (22)..(155): Homolog of NCBI NO: 1076467 NR Description: thionin variant Thi2Ca3 - Abyssinian crambe crambin precursor=thionin variant Thi2Ca3 [Crambe abyssinica,
  misc_feature (22)..(155): Homolog of NCBI NO: 1076465 NR Description: thionin variant Thi2Ca12 - Abyssinian crambe crambin precursor=thionin variant Thi2Ca12 [Crambe abyssinica,
SIQAYNSPTYIFVIKQLINQKMEGKTLIVSVLIMSLFMAQNQVDANICCPSIQARTFYNACLFAVGSPSSCIRNSSCLDISESTCPRGYTNDILENTGDAVTEYCKLGCVSSVCGALTILQNSDASEIVNGEVEKCTMACSTVCTKGSMNAVENA

SEQ ID NO: 89997 - protein, 134 aa, Arabidopsis thaliana
  peptide (1)..(134): Ceres Seq. ID no. 12721751
  misc_feature (25)..(70): Pfam Name: Plant thionin Pfam Description: Plant thionin
  misc_feature (1)..(134): Homolog of NCBI NO: 15218931 NR Description: thionin, putative; protein id: At1g66100.1, by cDNA: gi_14190504, supported by cDNA: gi_15809773 [Arabidopsis
  misc_feature (1)..(134): Homolog of NCBI NO: 1181533 NR Description: thionin >gi|1586834|prf||2204399B thionin
  misc_feature (1)..(134): Homolog of NCBI NO: 1076466 NR Description: thionin variant Thi2Ca2 - Abyssinian crambe crambin precursor=thionin variant Thi2Ca2 [Crambe abyssinica,
  misc_feature (1)..(134): Homolog of NCBI NO: 15239447 NR Description: thionin Thi2.2; protein id: At5g36910.1, by cDNA: 1523., supported by cDNA: gi_1181532 [Arabidopsis
  misc_feature (1)..(134): Homolog of NCBI NO: 21553588 NR Description: thionin Thi2.2 [Arabidopsis thaliana]
  misc_feature (1)..(134): Homolog of NCBI NO: 1076462 NR Description: thionin variant Thi2Ca1 - Abyssinian crambe
  misc_feature (1)..(134): Homolog of NCBI NO: 1076463 NR Description: thionin variant Thi2Ca10 - Abyssinian crambe crambin precursor=thionin variant Thi2Ca10 [Crambe abyssinica,
  misc_feature (1)..(134): Homolog of NCBI NO: 6650328 NR Description: thionin [Brassica rapa subsp. pekinensis]
  misc_feature (1)..(134): Homolog of NCBI NO: 1076467 NR Description: thionin variant Thi2Ca3 - Abyssinian crambe crambin precursor=thionin variant Thi2Ca3 [Crambe abyssinica,
  misc_feature (1)..(134): Homolog of NCBI NO: 1076465 NR Description: thionin variant Thi2Ca12 - Abyssinian crambe crambin precursor=thionin variant Thi2Ca12 [Crambe abyssinica,
MEGKTLIVSVLIMSLFMAQNQVDANICCPSIQARTFYNACLFAVGSPSSCIRNSSCLDISESTCPRGYTNDILENTGDAVTEYCKLGCVSSVCGALTILQNSDASEIVNGEVEKCTMACSTVCTKGSMNAVENA

SEQ ID NO: 89998 - protein, 122 aa, Arabidopsis thaliana
  peptide (1)..(122): Ceres Seq. ID no. 12721752
  misc_feature (13)..(58): Pfam Name: Plant thionin Pfam Description: Plant thionin
  misc_feature (1)..(122): Homolog of NCBI NO: 15218931 NR Description: thionin, putative; protein id: At1g66100.1, by cDNA: gi_14190504, supported by cDNA: gi_15809773 [Arabidopsis
  misc_feature (1)..(122): Homolog of NCBI NO: 1181533 NR Description: thionin >gi|1586834|prf||2204399B thionin
  misc_feature (1)..(122): Homolog of NCBI NO: 1076466 NR Description: thionin variant Thi2Ca2 - Abyssinian crambe crambin precursor=thionin variant Thi2Ca2 [Crambe abyssinica,
  misc_feature (1)..(122): Homolog of NCBI NO: 15239447 NR Description: thionin Thi2.2; protein id: At5g36910.1, by cDNA: 1523., supported by cDNA: gi_1181532 [Arabidopsis
  misc_feature (1)..(122): Homolog of NCBI NO: 21553588 NR Description: thionin Thi2.2 [Arabidopsis thaliana]
  misc_feature (1)..(122): Homolog of NCBI NO: 1076462 NR Description: thionin variant Thi2Ca1 - Abyssinian crambe
  misc_feature (1)..(122): Homolog of NCBI NO: 1076463 NR Description: thionin variant Thi2Ca10 - Abyssinian crambe crambin precursor=thionin variant Thi2Ca10 [Crambe abyssinica,
  misc_feature (1)..(122): Homolog of NCBI NO: 6650328 NR Description: thionin [Brassica rapa subsp. pekinensis]
  misc_feature (1)..(122): Homolog of NCBI NO: 1076467 NR Description: thionin variant Thi2Ca3 - Abyssinian crambe crambin precursor=thionin variant Thi2Ca3 [Crambe abyssinica,
  misc_feature (1)..(122): Homolog of NCBI NO: 1076465 NR Description: thionin variant Thi2Ca12 - Abyssinian crambe crambin precursor=thionin variant Thi2Ca12 [Crambe abyssinica,
MSLFMAQNQVDANICCPSIQARTFYNACLFAVGSPSSCIRNSSCLDISESTCPRGYTNDILENTGDAVTEYCKLGCVSSVCGALTILQNSDASEIVNGEVEKCTMACSTVCTKGSMNAVENA

SEQ ID NO: 89999 - DNA, 1245 bp, Arabidopsis thaliana
  misc_feature (1)..(1245): Ceres Seq. ID no. 12721753
  misc_feature: MA Experiment ID: 20000166 Result: Down-regulated in Transcription
  misc_feature: MA Experiment 20000166 PARAMETER Experiment Name: At_100uM_ABA_P Parameter: Age (day) Value: 14
  misc_feature: MA Experiment 20000166 PARAMETER Experiment Name: At_100uM_ABA_P Parameter: Organism Value: A. thaliana
  misc_feature: MA Experiment 20000166 PARAMETER Experiment Name: At_100uM_ABA_P Parameter: Plant Line Value: WS
  misc_feature: MA Experiment 20000166 PARAMETER Experiment Name: At_100uM_ABA_P Parameter: Timepoint (hr) Value: 1
  misc_feature: MA Experiment 20000166 PARAMETER Experiment Name: At_100uM_ABA_P Parameter: Tissue Value: Aerial
  misc_feature: MA Experiment 20000166 PARAMETER Experiment Name: At_100uM_ABA_P Parameter: Treatment Value: 100uM ABA vs. No Treatment
  misc_feature: MA Experiment ID: 20000180 Result: Down-regulated in Transcription
  misc_feature: MA Experiment 20000180 PARAMETER Experiment Name: At_Germinating_Seeds_P Parameter: Age (hr) Value: 24 vs. 0
  misc_feature: MA Experiment 20000180 PARAMETER Experiment Name: At_Germinating_Seeds_P Parameter: Tissue Value: Germinating Seeds
  misc_feature: MA Experiment ID: 20000185 Result: Up-regulated in Transcription
  misc_feature: MA Experiment 20000185 PARAMETER Experiment Name: At_Roots__P Parameter: Age (day) Value: 7 vs. 21
  misc_feature: MA Experiment 20000185 PARAMETER Experiment Name: At_Roots__P Parameter: Organism Value: A. thaliana
  misc_feature: MA Experiment 20000185 PARAMETER Experiment Name: At_Roots__P Parameter: Tissue Value: Roots vs. Whole Plant
  misc_feature: MA Experiment ID: 20000227 Result: Down-regulated in Transcription
  misc_feature: MA Experiment 20000227 PARAMETER Experiment Name: At_Root-Tips-vs-Tops_P Parameter: Tissue Value: Root Tips vs. Root Tops
  misc_feature: MA Experiment ID: 20000234 Result: Down-regulated in Transcription
  misc_feature: MA Experiment 20000234 PARAMETER Experiment Name: At_Siliques_P Parameter: Age (day) Value: 21
  misc_feature: MA Experiment 20000234 PARAMETER Experiment Name: At_Siliques_P Parameter: Organism Value: A. thaliana
  misc_feature: MA Experiment 20000234 PARAMETER Experiment Name: At_Siliques_P Parameter: Plant Line Value: WS
  misc_feature: MA Experiment 20000234 PARAMETER Experiment Name: At_Siliques_P Parameter: Tissue Value: Less Than 5mm Siliques vs. Whole Plant
  misc_feature: MA Experiment ID: 20000264 Result: Down-regulated in Transcription
  misc_feature: MA Experiment 20000264 PARAMETER Experiment Name: At_Open_Flower_P Parameter: Age (day) Value: 21
  misc_feature: MA Experiment 20000264 PARAMETER Experiment Name: At_Open_Flower_P Parameter: Plant Line Value: WS
  misc_feature: MA Experiment 20000264 PARAMETER Experiment Name: At_Open_Flower_P Parameter: Tissue Value: Open Flower vs. Whole Plant
  misc_feature: MA Experiment ID: 20000437 Result: Down-regulated in Transcription
  misc_feature: MA Experiment 20000437 PARAMETER Experiment Name: At_Drought_P Parameter: Age (day) Value: 8
  misc_feature: MA Experiment 20000437 PARAMETER Experiment Name: At_Drought_P Parameter: Organism Value: A. thaliana
  misc_feature: MA Experiment 20000437 PARAMETER Experiment Name: At_Drought_P Parameter: Plant Line Value: WS
  misc_feature: MA Experiment 20000437 PARAMETER Experiment Name: At_Drought_P Parameter: Timepoint (hr) Value: 24
  misc_feature: MA Experiment 20000437 PARAMETER Experiment Name: At_Drought_P Parameter: Tissue Value: Whole Plant
  misc_feature: MA Experiment 20000437 PARAMETER Experiment Name: At_Drought_P Parameter: Treatment Value: Drought vs. No Drought
  misc_feature: MA Experiment ID: 20000439 Result: Up-regulated in Transcription
  misc_feature: MA Experiment 20000439 PARAMETER Experiment Name: At_Roots__P Parameter: Age (day) Value: 14 vs. 21
  misc_feature: MA Experiment 20000439 PARAMETER Experiment Name: At_Roots__P Parameter: Organism Value: A. thaliana
  misc_feature: MA Experiment 20000439 PARAMETER Experiment Name: At_Roots__P Parameter: Tissue Value: Roots vs. Whole Plant
  misc_feature: MA Experiment ID: 20000495 Result: Up-regulated in Transcription
  misc_feature: MA Experiment 20000495 PARAMETER Experiment Name: At_Guard_Cells_P Parameter: Harvest Date Value: 8/2/2002
  misc_feature: MA Experiment 20000495 PARAMETER Experiment Name: At_Guard_Cells_P Parameter: Organism Value: A. thaliana
  misc_feature: MA Experiment 20000495 PARAMETER Experiment Name: At_Guard_Cells_P Parameter: Tissue Value: Guard Cells vs. Leaves
  misc_feature: MA Experiment ID: 20001451 Result: Up-regulated in Transcription
  misc_feature: MA Experiment 20001451 PARAMETER Experiment Name: At_Far-red-induction_P Parameter: Age (day) Value: 7
  misc_feature: MA Experiment 20001451 PARAMETER Experiment Name: At_Far-red-induction_P Parameter: Light Value: Far-red vs. White
  misc_feature: MA Experiment 20001451 PARAMETER Experiment Name: At_Far-red-induction_P Parameter: Organism Value: A. thaliana
  misc_feature: MA Experiment 20001451 PARAMETER Experiment Name: At_Far-red-induction_P Parameter: Plant Line Value: Columbia
  misc_feature: MA Experiment 20001451 PARAMETER Experiment Name: At_Far-red-induction_P Parameter: Timepoint (hr) Value: 24
  misc_feature: MA Experiment 20001451 PARAMETER Experiment Name: At_Far-red-induction_P Parameter: Tissue Value: Whole Plant
  misc_feature: MA Experiment ID: 20001458 Result: Up-regulated in Transcription
  misc_feature: MA Experiment 20001458 PARAMETER Experiment Name: At_50mM_NH4NO3_L-to-H_P Parameter: Age (day) Value: Undefined
  misc_feature: MA Experiment 20001458 PARAMETER Experiment Name: At_50mM_NH4NO3_L-to-H_P Parameter: Organism Value: Undefined
  misc_feature: MA Experiment 20001458 PARAMETER Experiment Name: At_50mM_NH4NO3_L-to-H_P Parameter: Plant Line Value: Undefined
  misc_feature: MA Experiment 20001458 PARAMETER Experiment Name: At_50mM_NH4NO3_L-to-H_P Parameter: Timepoint (hr) Value: 2
  misc_feature: MA Experiment 20001458 PARAMETER Experiment Name: At_50mM_NH4NO3_L-to-H_P Parameter: Tissue Value: Siliques
  misc_feature: MA Experiment 20001458 PARAMETER Experiment Name: At_50mM_NH4NO3_L-to-H_P Parameter: Treatment Value: 50mM NH4NO3 vs. 100mM Manitol
  misc_feature: MA Experiment ID: 20001755 Result: Up-regulated in Transcription
  misc_feature: MA Experiment 20001755 PARAMETER Experiment Name: At_50mM_NH4NO3_L-to-H_P Parameter: Timepoint (hr) Value: 2
  misc_feature: MA Experiment 20001755 PARAMETER Experiment Name: At_50mM_NH4NO3_L-to-H_P Parameter: Tissue Value: Leaf
  misc_feature: MA Experiment 20001755 PARAMETER Experiment Name: At_50mM_NH4NO3_L-to-H_P Parameter: Treatment Value: 50mM NH4NO3 vs 100mM Mannitol
  misc_feature: MA Experiment ID: 20001757 Result: Up-regulated in Transcription
  misc_feature: MA Experiment 20001757 PARAMETER Experiment Name: At_50mM_NH4NO3_L-to-H_P Parameter: Timepoint (hr) Value: 6
  misc_feature: MA Experiment 20001757 PARAMETER Experiment Name: At_50mM_NH4NO3_L-to-H_P Parameter: Tissue Value: Leaf
  misc_feature: MA Experiment 20001757 PARAMETER Experiment Name: At_50mM_NH4NO3_L-to-H_P Parameter: Treatment Value: 50mM NH4NO3 vs 100mM Mannitol
  misc_feature: MA Experiment ID: 20001760 Result: Up-regulated in Transcription
  misc_feature: MA Experiment 20001760 PARAMETER Experiment Name: At_50mM_NH4NO3_L-to-H_P Parameter: Timepoint (hr) Value: 2
  misc_feature: MA Experiment 20001760 PARAMETER Experiment Name: At_50mM_NH4NO3_L-to-H_P Parameter: Tissue Value: Siliques
  misc_feature: MA Experiment 20001760 PARAMETER Experiment Name: At_50mM_NH4NO3_L-to-H_P Parameter: Treatment Value: 50mM NH4NO3 vs 100mM Mannitol
  misc_feature: MA Experiment ID: 20001905 Result: Down-regulated in Transcription
  misc_feature: MA Experiment 20001905 PARAMETER Experiment Name: At_Drought_Reproduction_P Parameter: Age (day) Value: 40
  misc_feature: MA Experiment 20001905 PARAMETER Experiment Name: At_Drought_Reproduction_P Parameter: Organism Value: A. thaliana
  misc_feature: MA Experiment 20001905 PARAMETER Experiment Name: At_Drought_Reproduction_P Parameter: Plant Line Value: WS
  misc_feature: MA Experiment 20001905 PARAMETER Experiment Name: At_Drought_Reproduction_P Parameter: Timepoint (day) Value: 10
  misc_feature: MA Experiment 20001905 PARAMETER Experiment Name: At_Drought_Reproduction_P Parameter: Tissue Value: Rosettes
  misc_feature: MA Experiment 20001905 PARAMETER Experiment Name: At_Drought_Reproduction_P Parameter: Treatment Value: Drought vs. No Drought
actctctcctcttttgtgctcccaaaccaaacataacactcacaatttaactctctctgtctctctctcatatctctcacttcttctctttctttttaagtccccaaaataacctcgagatcgatggactcaaatctgttcataactcccacttcttctctcaaatcccaagccttggtctcttcatcatcctaactatataagaaaaagaaaaaacaacgtaaagtttctgccataaatcatgagaccaatattagacctcgaaattgaagcttcatcgggcagtagtagcagccaagtggcctcaaacttgtctccggttggggaagattacaaaccaatctcgctgaatcttagcctcagtttcaacaacaacaacaacaataatctggatcttgaatcatcgtctttgacgctgccactttcgagcacgagtgagagtagtaacccggagcagcagcagcaacaacaaccatctgtatcaaagagagtcttctcttgtaactactgccaaaggaagttctatagctctcaagcgctaggtggtcaccaaaacgctcacaaacgtgagagaacactcgccaaacgcgctatgcgtatgggtcttgctggggtcttccccggtagaggatcaagtagcaattatgcggctgctgccacagcagccgctctctcgtgtttgccgcttcacggaagcggaaacgggaacatgacatcgttcaggactttgggaatccgggcacattcctcggcgcacgacgtcagcatgacaaggcagacaccagaaacacttattagaaacattgccaggttcaaccaggggtatttcggtaattgtatacctttttacgtggaggacgacgaggccgagatgctctggccggggagtttccggcaagctacgaatgcggttgcggttgaagcgggtaatgataatttaggtgaaagaaaaatggatttcttggacgtcaagcaagcgatggatatggaaagttctcttccagatctaaccttgaagctttgagctttcgttttttttgtttttttttttgctgaatttggattcttaatttggtgcatcagcttcataactctattatgtacagtgagagtttcacaaaccatttctgatatgttatggtcactatcgattgatcgaccaaaagtcaattctagtgtttgcttacgtggataaaccatttaaacgtttatgtattgtaaactaaatattaagttaattatgct

SEQ ID NO: 90000 - protein, 260 aa, Arabidopsis thaliana
  peptide (1)..(260): Ceres Seq. ID no. 12721754
  misc_feature (85)..(107): Pfam Name: Zinc finger, C2H2 type Pfam Description: Zinc finger, C2H2 type
  misc_feature (1)..(260): Homolog of NCBI NO: 15218939 NR Description: C2H2-type zinc finger protein, putative; protein At1g66140.1, supported by cDNA: gi_13605608, supported by cDNA: supported by cDNA: gi_790678 [Arabidopsis thaliana]
  misc_feature (1)..(260): Homolog of NCBI NO: 1362017 NR Description: CCHH finger protein 4 - Arabidopsis thaliana
  misc_feature (54)..(180): Homolog of NCBI NO: 15220823 NR Description: zinc finger protein; protein id: At1g80730.1, by cDNA: gi_790672 [Arabidopsis thaliana]
  misc_feature (41)..(175): Homolog of NCBI NO: 15238724 NR Description: ZFP3 zinc finger protein; protein id: supported by cDNA: gi_790676 [Arabidopsis thaliana]
  misc_feature (30)..(120): Homolog of NCBI NO: 15242152 NR Description: CCHH finger protein 2-like protein (pir||S55882); id: At5g57520.1, supported by cDNA: gi_790674 [Arabidopsis >gi|27923888|sp|Q39261|ZFP2_ARATH Zinc finger protein 2
  misc_feature (47)..(121): Homolog of NCBI NO: 18395528 NR Description: zinc finger protein 7, ZFP7; protein id: supported by cDNA: gi_790684 [Arabidopsis thaliana]
  misc_feature (29)..(126): Homolog of NCBI NO: 15238913 NR Description: zinc finger -like protein; protein id: At5g10970.1
  misc_feature (51)..(116): Homolog of NCBI NO: 40538953 NR Description: expressed protein [Oryza sativa (japonica
  misc_feature (60)..(156): Homolog of NCBI NO: 15241284 NR Description: putative protein; protein id: At5g14010.1 thaliana] >gi|10177667|dbj|BAB11129.1|
  misc_feature (64)..(117): Homolog of NCBI NO: 29027767 NR Description: OJ1710_H11.12 [Oryza sativa (japonica
MRPILDLEIEASSGSSSSQVASNLSPVGEDYKPISLNLSLSFNNNNNNNLDLESSSLTLPLSSTSESSNPEQQQQQQPSVSKRVFSCNYCQRKFYSSQALGGHQNAHKRERTLAKRAMRMGLAGVFPGRGSSSNYAAAATAAALSCLPLHGSGNGNMTSFRTLGIRAHSSAHDVSMTRQTPETLIRNIARFNQGYFGNCIPFYVEDDEAEMLWPGSFRQATNAVAVEAGNDNLGERKMDFLDVKQAMDMESSLPDLTLKL

SEQ ID NO: 90001 - protein, 143 aa, Arabidopsis thaliana
  peptide (1)..(143): Ceres Seq. ID no. 12721755
  misc_feature (1)..(143): Homolog of NCBI NO: 15218939 NR Description: C2H2-type zinc finger protein, putative; protein At1g66140.1, supported by cDNA: gi_13605608, supported by cDNA: supported by cDNA: gi_790678 [Arabidopsis thaliana]
  misc_feature (1)..(143): Homolog of NCBI NO: 1362017 NR Description: CCHH finger protein 4 - Arabidopsis thaliana
  misc_feature (1)..(63): Homolog of NCBI NO: 15220823 NR Description: zinc finger protein; protein id: At1g80730.1, by cDNA: gi_790672 [Arabidopsis thaliana]
  misc_feature (1)..(58): Homolog of NCBI NO: 15238724 NR Description: ZFP3 zinc finger protein; protein id: supported by cDNA: gi_790676 [Arabidopsis thaliana]
  misc_feature (1)..(39): Homolog of NCBI NO: 15241284 NR Description: putative protein; protein id: At5g14010.1 thaliana] >gi|10177667|dbj|BAB11129.1|
  misc_feature (1)..(22): Homolog of NCBI NO: 15240118 NR Description: zinc finger-like protein; protein id: At5g06650.1
MRMGLAGVFPGRGSSSNYAAAATAAALSCLPLHGSGNGNMTSFRTLGIRAHSSAHDVSMTRQTPETLIRNIARFNQGYFGNCIPFYVEDDEAEMLWPGSFRQATNAVAVEAGNDNLGERKMDFLDVKQAMDMESSLPDLTLKL

SEQ ID NO: 90002 - protein, 141 aa, Arabidopsis thaliana
  peptide (1)..(141): Ceres Seq. ID no. 12721756
  misc_feature (1)..(141): Homolog of NCBI NO: 15218939 NR Description: C2H2-type zinc finger protein, putative; protein At1g66140.1, supported by cDNA: gi_13605608, supported by cDNA: supported by cDNA: gi_790678 [Arabidopsis thaliana]
  misc_feature (1)..(141): Homolog of NCBI NO: 1362017 NR Description: CCHH finger protein 4 - Arabidopsis thaliana
  misc_feature (1)..(61): Homolog of NCBI NO: 15220823 NR Description: zinc finger protein; protein id: At1g80730.1, by cDNA: gi_790672 [Arabidopsis thaliana]
  misc_feature (1)..(56): Homolog of NCBI NO: 15238724 NR Description: ZFP3 zinc finger protein; protein id: supported by cDNA: gi_790676 [Arabidopsis thaliana]
  misc_feature (1)..(37): Homolog of NCBI NO: 15241284 NR Description: putative protein; protein id: At5g14010.1 thaliana] >gi|10177667|dbj|BAB11129.1|
  misc_feature (1)..(20): Homolog of NCBI NO: 15240118 NR Description: zinc finger-like protein; protein id: At5g06650.1
MGLAGVFPGRGSSSNYAAAATAAALSCLPLHGSGNGNMTSFRTLGIRAHSSAHDVSMTRQTPETLIRNIARFNQGYFGNCIPFYVEDDEAEMLWPGSFRQATNAVAVEAGNDNLGERKMDFLDVKQAMDMESSLPDLTLKL

SEQ ID NO: 90003 - DNA, 1015 bp, Arabidopsis thaliana
  misc_feature (1)..(1015): Ceres Seq. ID no. 12721767
  misc_feature: MA Experiment ID: 20000166 Result: Down-regulated in Transcription
  misc_feature: MA Experiment 20000166 PARAMETER Experiment Name: At_100uM_ABA_P Parameter: Age (day) Value: 14
  misc_feature: MA Experiment 20000166 PARAMETER Experiment Name: At_100uM_ABA_P Parameter: Organism Value: A. thaliana
  misc_feature: MA Experiment 20000166 PARAMETER Experiment Name: At_100uM_ABA_P Parameter: Plant Line Value: WS
  misc_feature: MA Experiment 20000166 PARAMETER Experiment Name: At_100uM_ABA_P Parameter: Timepoint (hr) Value: 1
  misc_feature: MA Experiment 20000166 PARAMETER Experiment Name: At_100uM_ABA_P Parameter: Tissue Value: Aerial
  misc_feature: MA Experiment 20000166 PARAMETER Experiment Name: At_100uM_ABA_P Parameter: Treatment Value: 100uM ABA vs. No Treatment
  misc_feature: MA Experiment ID: 20000180 Result: Up-regulated in Transcription
  misc_feature: MA Experiment 20000180 PARAMETER Experiment Name: At_Germinating_Seeds_P Parameter: Age (hr) Value: 24 vs. 0
  misc_feature: MA Experiment 20000180 PARAMETER Experiment Name: At_Germinating_Seeds_P Parameter: Tissue Value: Germinating Seeds
  misc_feature: MA Experiment ID: 20000182 Result: Down-regulated in Transcription
  misc_feature: MA Experiment 20000182 PARAMETER Experiment Name: At_2mM_SA_P Parameter: Age (day) Value: 14
  misc_feature: MA Experiment 20000182 PARAMETER Experiment Name: At_2mM_SA_P Parameter: Organism Value: A. thaliana
  misc_feature: MA Experiment 20000182 PARAMETER Experiment Name: At_2mM_SA_P Parameter: Plant Line Value: WS
  misc_feature: MA Experiment 20000182 PARAMETER Experiment Name: At_2mM_SA_P Parameter: Timepoint (hr) Value: 6
  misc_feature: MA Experiment 20000182 PARAMETER Experiment Name: At_2mM_SA_P Parameter: Tissue Value: Aerial
  misc_feature: MA Experiment 20000182 PARAMETER Experiment Name: At_2mM_SA_P Parameter: Treatment Value: 2mM SA vs. No Treatment
  misc_feature: MA Experiment ID: 20000184 Result: Down-regulated in Transcription
  misc_feature: MA Experiment 20000184 PARAMETER Experiment Name: At_Shoots__P Parameter: Age (day) Value: 7
  misc_feature: MA Experiment 20000184 PARAMETER Experiment Name: At_Shoots__P Parameter: Tissue Value: Shoots vs. Whole Plant
  misc_feature: MA Experiment ID: 20000213 Result: Down-regulated in Transcription
  misc_feature: MA Experiment 20000213 PARAMETER Experiment Name: At_4deg_Cold_P Parameter: Timepoint (hr) Value: 2
  misc_feature: MA Experiment ID: 20000234 Result: Down-regulated in Transcription
  misc_feature: MA Experiment 20000234 PARAMETER Experiment Name: At_Siliques_P Parameter: Age (day) Value: 21
  misc_feature: MA Experiment 20000234 PARAMETER Experiment Name: At_Siliques_P Parameter: Organism Value: A. thaliana
  misc_feature: MA Experiment 20000234 PARAMETER Experiment Name: At_Siliques_P Parameter: Plant Line Value: WS
  misc_feature: MA Experiment 20000234 PARAMETER Experiment Name: At_Siliques_P Parameter: Tissue Value: Less Than 5mm Siliques vs. Whole Plant
  misc_feature: MA Experiment ID: 20000264 Result: Down-regulated in Transcription
  misc_feature: MA Experiment 20000264 PARAMETER Experiment Name: At_Open_Flower_P Parameter: Age (day) Value: 21
  misc_feature: MA Experiment 20000264 PARAMETER Experiment Name: At_Open_Flower_P Parameter: Plant Line Value: WS
  misc_feature: MA Experiment 20000264 PARAMETER Experiment Name: At_Open_Flower_P Parameter: Tissue Value: Open Flower vs. Whole Plant
  misc_feature: MA Experiment ID: 20000265 Result: Down-regulated in Transcription
  misc_feature: MA Experiment 20000265 PARAMETER Experiment Name: At_Open_Flower_P Parameter: Age (day) Value: 21
  misc_feature: MA Experiment 20000265 PARAMETER Experiment Name: At_Open_Flower_P Parameter: Plant Line Value: WS
  misc_feature: MA Experiment 20000265 PARAMETER Experiment Name: At_Open_Flower_P Parameter: Tissue Value: Closed Flower vs. Whole Plant
  misc_feature: MA Experiment ID: 20000269 Result: Down-regulated in Transcription
  misc_feature: MA Experiment 20000269 PARAMETER Experiment Name: At_1mM_KNO3_L-vs-H_Roots_P Parameter: Age (day) Value: 7,10,12
  misc_feature: MA Experiment 20000269 PARAMETER Experiment Name: At_1mM_KNO3_L-vs-H_Roots_P Parameter: Organism Value: A. thaliana
  misc_feature: MA Experiment 20000269 PARAMETER Experiment Name: At_1mM_KNO3_L-vs-H_Roots_P Parameter: Plant Line Value: WS
  misc_feature: MA Experiment 20000269 PARAMETER Experiment Name: At_1mM_KNO3_L-vs-H_Roots_P Parameter: Timepoint (day) Value: 7,10,12
  misc_feature: MA Experiment 20000269 PARAMETER Experiment Name: At_1mM_KNO3_L-vs-H_Roots_P Parameter: Tissue Value: Roots
  misc_feature: MA Experiment 20000269 PARAMETER Experiment Name: At_1mM_KNO3_L-vs-H_Roots_P Parameter: Treatment Value: 1mM KNO3 vs. 50mM KNO3
  misc_feature: MA Experiment ID: 20000286 Result: Down-regulated in Transcription
  misc_feature: MA Experiment 20000286 PARAMETER Experiment Name: At_Open_Flower_P Parameter: Age (day) Value: 21
  misc_feature: MA Experiment 20000286 PARAMETER Experiment Name: At_Open_Flower_P Parameter: Plant Line Value: WS
  misc_feature: MA Experiment 20000286 PARAMETER Experiment Name: At_Open_Flower_P Parameter: Tissue Value: Half Open vs. Whole Plant
  misc_feature: MA Experiment ID: 20000439 Result: Down-regulated in Transcription
  misc_feature: MA Experiment 20000439 PARAMETER Experiment Name: At_Roots__P Parameter: Age (day) Value: 14 vs. 21
  misc_feature: MA Experiment 20000439 PARAMETER Experiment Name: At_Roots__P Parameter: Organism Value: A. thaliana
  misc_feature: MA Experiment 20000439 PARAMETER Experiment Name: At_Roots__P Parameter: Tissue Value: Roots vs. Whole Plant
  misc_feature: MA Experiment ID: 20000452 Result: Up-regulated in Transcription
  misc_feature: MA Experiment 20000452 PARAMETER Experiment Name: At_CS6879_Shoots-Roots_P Parameter: Age (day) Value: 14
  misc_feature: MA Experiment 20000452 PARAMETER Experiment Name: At_CS6879_Shoots-Roots_P Parameter: Organism Value: A. thaliana
  misc_feature: MA Experiment 20000452 PARAMETER Experiment Name: At_CS6879_Shoots-Roots_P Parameter: Plant Line Value: CS6879 vs. WS
  misc_feature: MA Experiment 20000452 PARAMETER Experiment Name: At_CS6879_Shoots-Roots_P Parameter: Tissue Value: Shoots
  misc_feature: MA Experiment ID: 20000453 Result: Down-regulated in Transcription
  misc_feature: MA Experiment 20000453 PARAMETER Experiment Name: At_100uM_ABA_P Parameter: Age (day) Value: 15
  misc_feature: MA Experiment 20000453 PARAMETER Experiment Name: At_100uM_ABA_P Parameter: Organism Value: A. thaliana
  misc_feature: MA Experiment 20000453 PARAMETER Experiment Name: At_100uM_ABA_P Parameter: Plant Line Value: WS
  misc_feature: MA Experiment 20000453 PARAMETER Experiment Name: At_100uM_ABA_P Parameter: Timepoint (hr) Value: 24
  misc_feature: MA Experiment 20000453 PARAMETER Experiment Name: At_100uM_ABA_P Parameter: Tissue Value: Aerial
  misc_feature: MA Experiment 20000453 PARAMETER Experiment Name: At_100uM_ABA_P Parameter: Treatment Value: 100uM ABA vs. No Treatment
  misc_feature: MA Experiment ID: 20000573 Result: Down-regulated in Transcription
  misc_feature: MA Experiment 20000573 PARAMETER Experiment Name: At_100uM_ABA_Mutants__P Parameter: Organism Value: A. thaliana
  misc_feature: MA Experiment 20000573 PARAMETER Experiment Name: At_100uM_ABA_Mutants__P Parameter: Plant Line Value: CS22 vs. Ler wt
  misc_feature: MA Experiment 20000573 PARAMETER Experiment Name: At_100uM_ABA_Mutants__P Parameter: Timepoint (hr) Value: N/A
  misc_feature: MA Experiment 20000573 PARAMETER Experiment Name: At_100uM_ABA_Mutants__P Parameter: Tissue Value: Whole Plant
  misc_feature: MA Experiment 20000573 PARAMETER Experiment Name: At_100uM_ABA_Mutants__P Parameter: Treatment Value: None
  misc_feature: MA Experiment ID: 20000794 Result: Down-regulated in Transcription
  misc_feature: MA Experiment 20000794 PARAMETER Experiment Name: At_Petals_P Parameter: Age (day) Value: 23-25 days
  misc_feature: MA Experiment 20000794 PARAMETER Experiment Name: At_Petals_P Parameter: Plant Line Value: WS
  misc_feature: MA Experiment 20000794 PARAMETER Experiment Name: At_Petals_P Parameter: Tissue Value: Petals vs. Whole plant
  misc_feature: MA Experiment ID: 20001247 Result: Up-regulated in Transcription
  misc_feature: MA Experiment 20001247 PARAMETER Experiment Name: At_Far-red-induction_P Parameter: Age (day) Value: 7
  misc_feature: MA Experiment 20001247 PARAMETER Experiment Name: At_Far-red-induction_P Parameter: Light Value: Far-red vs. White
  misc_feature: MA Experiment 20001247 PARAMETER Experiment Name: At_Far-red-induction_P Parameter: Organism Value: A. thaliana
  misc_feature: MA Experiment 20001247 PARAMETER Experiment Name: At_Far-red-induction_P Parameter: Plant Line Value: Columbia
  misc_feature: MA Experiment 20001247 PARAMETER Experiment Name: At_Far-red-induction_P Parameter: Timepoint (hr) Value: 1
  misc_feature: MA Experiment 20001247 PARAMETER Experiment Name: At_Far-red-induction_P Parameter: Tissue Value: Whole Plant
  misc_feature: MA Experiment ID: 20001554 Result: Down-regulated in Transcription
  misc_feature: MA Experiment 20001554 PARAMETER Experiment Name: At_Drought_Soil_Dry_P Parameter: Age (day) Value: 21
  misc_feature: MA Experiment 20001554 PARAMETER Experiment Name: At_Drought_Soil_Dry_P Parameter: Organism Value: A. thaliana
  misc_feature: MA Experiment 20001554 PARAMETER Experiment Name: At_Drought_Soil_Dry_P Parameter: Plant Line Value: WS
  misc_feature: MA Experiment 20001554 PARAMETER Experiment Name: At_Drought_Soil_Dry_P Parameter: Post Timepoint (hr) Value: None
  misc_feature: MA Experiment 20001554 PARAMETER Experiment Name: At_Drought_Soil_Dry_P Parameter: Post-Treatment Value: None
  misc_feature: MA Experiment 20001554 PARAMETER Experiment Name: At_Drought_Soil_Dry_P Parameter: Timepoint (day) Value: 7
  misc_feature: MA Experiment 20001554 PARAMETER Experiment Name: At_Drought_Soil_Dry_P Parameter: Treatment Value: Drought vs. No Drought
  misc_feature: MA Experiment ID: 20001556 Result: Down-regulated in Transcription
  misc_feature: MA Experiment 20001556 PARAMETER Experiment Name: At_Drought_Soil_Dry_P Parameter: Age (day) Value: 26
  misc_feature: MA Experiment 20001556 PARAMETER Experiment Name: At_Drought_Soil_Dry_P Parameter: Organism Value: A. thaliana
  misc_feature: MA Experiment 20001556 PARAMETER Experiment Name: At_Drought_Soil_Dry_P Parameter: Plant Line Value: WS
  misc_feature: MA Experiment 20001556 PARAMETER Experiment Name: At_Drought_Soil_Dry_P Parameter: Post Timepoint (hr) Value: None
  misc_feature: MA Experiment 20001556 PARAMETER Experiment Name: At_Drought_Soil_Dry_P Parameter: Post-Treatment Value: None
  misc_feature: MA Experiment 20001556 PARAMETER Experiment Name: At_Drought_Soil_Dry_P Parameter: Timepoint (day) Value: 12
  misc_feature: MA Experiment 20001556 PARAMETER Experiment Name: At_Drought_Soil_Dry_P Parameter: Treatment Value: Drought vs. No Drought
  misc_feature: MA Experiment ID: 20001906 Result: Down-regulated in Transcription
  misc_feature: MA Experiment 20001906 PARAMETER Experiment Name: At_Drought_Reproduction_P Parameter: Age (day) Value: 35
  misc_feature: MA Experiment 20001906 PARAMETER Experiment Name: At_Drought_Reproduction_P Parameter: Organism Value: A. thaliana
  misc_feature: MA Experiment 20001906 PARAMETER Experiment Name: At_Drought_Reproduction_P Parameter: Plant Line Value: WS
  misc_feature: MA Experiment 20001906 PARAMETER Experiment Name: At_Drought_Reproduction_P Parameter: Timepoint (day) Value: 5
  misc_feature: MA Experiment 20001906 PARAMETER Experiment Name: At_Drought_Reproduction_P Parameter: Tissue Value: Siliques
  misc_feature: MA Experiment 20001906 PARAMETER Experiment Name: At_Drought_Reproduction_P Parameter: Treatment Value: Drought vs. No Drought
tacatcagtatgcatatatataggtggttgcaaggcttacccaaatctctcttcaacttgccataacatttactctctttggacaaagacacagacagagagatagataaaaacagagaattgtcatagaaccaattcagagagaacgagagagagagagagagaaatggggagacaaccatgctgtgacaaagtagggttgaagaaaggaccatggactgcagaagaggataggaagctcataaacttcatccttaccaatggacaatgttgttggagagctgttcctaagctttctggtcttcttaggtgtggcaagagttgcagacttcgttggactaactatcttagaccagaccttaagagaggtcttctctctgattacgaagagaagatggtcattgatctccattcccagcttggaaacaggtggtcaaagatagcttctcatttaccaggaagaacagacaacgaaatcaagaatcattggaacactcacatcaagaagaagttgaggaaaatggggattgatcctcttacacataaaccactctctatcgtcgaaaaagaagacgaagaacccttaaagaagctacagaataatacagttccttttcaagaaacaatggagcgtcctttagagaacaacatcaagaacatatcaagacttgaagagtctttaggtgatgatcaattcatggagataaatcttgagtatggtgtcgaagatgtccctcttattgaaacagagtctttagaccttatctgcagcaattcaacaatgtcttcatccacgtccacatcttcgcattcttctaatgattcgagtttcttgaaggatttgcagttcccggagttcgagtggtccgactatggtaatagtaataatgataataataatggtgtggacaacattatagagaacaatatgatgagcctgtgggaaattagtgactttagcagtttggatttgctgcttaatgatgagagttcttccacttttgggttgttttga

SEQ ID NO: 90004 - protein, 282 aa, Arabidopsis thaliana
  peptide (1)..(282): Ceres Seq. ID no. 12721768
  misc_feature (14)..(61): Pfam Name: Myb-like DNA-binding domain Pfam Description: Myb-like DNA-binding domain
  misc_feature (1)..(282): Homolog of NCBI NO: 15219601 NR Description: myb family transcription factor(MYB20); protein At1g66230.1 [Arabidopsis thaliana] >gi|25294090|pir||C96687
  misc_feature (1)..(278): Homolog of NCBI NO: 11358532 NR Description: myb-related transcription factor MYB20 [imported] Arabidopsis thaliana >gi|3941430|gb|AAC83591.1| putative
  misc_feature (1)..(275): Homolog of NCBI NO: 15237380 NR Description: myb family transcription factor; protein id: supported by cDNA: gi_5823312 [Arabidopsis thaliana] putative transcription factor [Arabidopsis thaliana]
  misc_feature (1)..(152): Homolog of NCBI NO: 7446177 NR Description: myb-related transcription factor - tomato
  misc_feature (1)..(235): Homolog of NCBI NO: 23343575 NR Description: Myb51 protein [Oryza sativa]
  misc_feature (1)..(235): Homolog of NCBI NO: 7446182 NR Description: probable myb factor - rice
  misc_feature (1)..(129): Homolog of NCBI NO: 19072740 NR Description: typical P-type R2R3 Myb protein [Zea mays]
  misc_feature (1)..(201): Homolog of NCBI NO: 6651292 NR Description: myb-related transcription factor [Pimpinella
  misc_feature (1)..(147): Homolog of NCBI NO: 19073330 NR Description: typical P-type R2R3 Myb protein [Sorghum bicolor]
  misc_feature (1)..(147): Homolog of NCBI NO: 19073336 NR Description: typical P-type R2R3 Myb protein [Sorghum bicolor]
MGRQPCCDKVGLKKGPWTAEEDRKLINFILTNGQCCWRAVPKLSGLLRCGKSCRLRWTNYLRPDLKRGLLSDYEEKMVIDLHSQLGNRWSKIASHLPGRTDNEIKNHWNTHIKKKLRKMGIDPLTHKPLSIVEKEDEEPLKKLQNNTVPFQETMERPLENNIKNISRLEESLGDDQFMEINLEYGVEDVPLIETESLDLICSNSTMSSSTSTSSHSSNDSSFLKDLQFPEFEWSDYGNSNNDNNNGVDNIIENNMMSLWEISDFSSLDLLLNDESSSTFGLF

SEQ ID NO: 90005 - protein, 206 aa, Arabidopsis thaliana
  peptide (1)..(206): Ceres Seq. ID no. 12721769
  misc_feature (1)..(206): Homolog of NCBI NO: 15219601 NR Description: myb family transcription factor(MYB20); protein At1g66230.1 [Arabidopsis thaliana] >gi|25294090|pir||C96687
  misc_feature (1)..(202): Homolog of NCBI NO: 11358532 NR Description: myb-related transcription factor MYB20 [imported] Arabidopsis thaliana >gi|3941430|gb|AAC83591.1| putative
  misc_feature (1)..(199): Homolog of NCBI NO: 15237380 NR Description: myb family transcription factor; protein id: supported by cDNA: gi_5823312 [Arabidopsis thaliana] putative transcription factor [Arabidopsis thaliana]
  misc_feature (1)..(76): Homolog of NCBI NO: 7446177 NR Description: myb-related transcription factor - tomato
  misc_feature (1)..(159): Homolog of NCBI NO: 23343575 NR Description: Myb51 protein [Oryza sativa]
  misc_feature (1)..(159): Homolog of NCBI NO: 7446182 NR Description: probable myb factor - rice
  misc_feature (1)..(53): Homolog of NCBI NO: 19072740 NR Description: typical P-type R2R3 Myb protein [Zea mays]
  misc_feature (1)..(125): Homolog of NCBI NO: 6651292 NR Description: myb-related transcription factor [Pimpinella
  misc_feature (1)..(71): Homolog of NCBI NO: 19073330 NR Description: typical P-type R2R3 Myb protein [Sorghum bicolor]
  misc_feature (1)..(71): Homolog of NCBI NO: 19073336 NR Description: typical P-type R2R3 Myb protein [Sorghum bicolor]
MVIDLHSQLGNRWSKIASHLPGRTDNEIKNHWNTHIKKKLRKMGIDPLTHKPLSIVEKEDEEPLKKLQNNTVPFQETMERPLENNIKNISRLEESLGDDQFMEINLEYGVEDVPLIETESLDLICSNSTMSSSTSTSSHSSNDSSFLKDLQFPEFEWSDYGNSNNDNNNGVDNIIENNMMSLWEISDFSSLDLLLNDESSSTFGLF

SEQ ID NO: 90006 - protein, 164 aa, Arabidopsis thaliana
  peptide (1)..(164): Ceres Seq. ID no. 12721770
  misc_feature (1)..(164): Homolog of NCBI NO: 15219601 NR Description: myb family transcription factor(MYB20); protein At1g66230.1 [Arabidopsis thaliana] >gi|25294090|pir||C96687
  misc_feature (1)..(160): Homolog of NCBI NO: 11358532 NR Description: myb-related transcription factor MYB20 [imported] Arabidopsis thaliana >gi|3941430|gb|AAC83591.1| putative
  misc_feature (1)..(157): Homolog of NCBI NO: 15237380 NR Description: myb family transcription factor; protein id: supported by cDNA: gi_5823312 [Arabidopsis thaliana] putative transcription factor [Arabidopsis thaliana]
  misc_feature (1)..(34): Homolog of NCBI NO: 7446177 NR Description: myb-related transcription factor - tomato
  misc_feature (1)..(117): Homolog of NCBI NO: 23343575 NR Description: Myb51 protein [Oryza sativa]
  misc_feature (1)..(117): Homolog of NCBI NO: 7446182 NR Description: probable myb factor - rice
  misc_feature (1)..(11): Homolog of NCBI NO: 19072740 NR Description: typical P-type R2R3 Myb protein [Zea mays]
  misc_feature (1)..(83): Homolog of NCBI NO: 6651292 NR Description: myb-related transcription factor [Pimpinella
  misc_feature (1)..(29): Homolog of NCBI NO: 19073330 NR Description: typical P-type R2R3 Myb protein [Sorghum bicolor]
  misc_feature (1)..(29): Homolog of NCBI NO: 19073336 NR Description: typical P-type R2R3 Myb protein [Sorghum bicolor]
MGIDPLTHKPLSIVEKEDEEPLKKLQNNTVPFQETMERPLENNIKNISRLEESLGDDQFMEINLEYGVEDVPLIETESLDLICSNSTMSSSTSTSSHSSNDSSFLKDLQFPEFEWSDYGNSNNDNNNGVDNIIENNMMSLWEISDFSSLDLLLNDESSSTFGLF

SEQ ID NO: 90007 - DNA, 741 bp, Arabidopsis thaliana
  misc_feature (1)..(741): Ceres Seq. ID no. 12721795
  misc_feature: MA Experiment ID: 20000527 Result: Down-regulated in Transcription
  misc_feature: MA Experiment 20000527 PARAMETER Experiment Name: At_10percent_PEG_P Parameter: Age (day) Value: 20
  misc_feature: MA Experiment 20000527 PARAMETER Experiment Name: At_10percent_PEG_P Parameter: Organism Value: A. thaliana
  misc_feature: MA Experiment 20000527 PARAMETER Experiment Name: At_10percent_PEG_P Parameter: Plant Line Value: WS
  misc_feature: MA Experiment 20000527 PARAMETER Experiment Name: At_10percent_PEG_P Parameter: Timepoint (day) Value: 20
  misc_feature: MA Experiment 20000527 PARAMETER Experiment Name: At_10percent_PEG_P Parameter: Tissue Value: Whole Plant
  misc_feature: MA Experiment 20000527 PARAMETER Experiment Name: At_10percent_PEG_P Parameter: Treatment Value: 10percent PEG vs. No Treatment
atgggcgaatcacccaaagggttgagaaaaggtacatggactactgaagaagatattctcttgaggcaatgcattgataagtatggagaaggcaaatggcatcgagttcctttaagaactggtctcaatcggtgccgaaagagttgtagacttagatggttgaattatttgaagccaagtattaagagaggaaaactctgctccgatgaagttgatcttgttcttcgccttcataaacttctaggaaataggtggtccttgatcgctggtagattgcctggtcggactgctaatgatgtcaagaattactggaacactcatttgagtaagaagcacgatgaacgatgctgtaagacgaagatgataaacaaaaacattacttctcatcctacttcatcggcccaaaaaatcgatgttttaaagcctcggcctcgatccttctccgataaaaatagttgcaacgatgtcaatatcttgccaaaagttgacgttgttcctttacatcttggactcaacaacaattatgtttgtgaaagtagtattacatgtaacaaagatgagcaaaaagataagcttattaatattaatctattggatggagataatatgtggtgggaaagtttactggaggcagatgtgttgggtccagaagctacggaaacagcaaagggtgtgaccttaccgcttgactttgagcaaatttgggctcggtttgatgaagagactttagaactgaattag

SEQ ID NO: 90008 - protein, 246 aa, Arabidopsis thaliana
  peptide (1)..(246): Ceres Seq. ID no. 12721796
  misc_feature (10)..(57): Pfam Name: Myb-like DNA-binding domain Pfam Description: Myb-like DNA-binding domain
  misc_feature (1)..(246): Homolog of NCBI NO: 15219632 NR Description: Myb-related transcription factor, putative; id: At1g66370.1, supported by cDNA: gi_11641121 [Arabidopsis
  misc_feature (1)..(246): Homolog of NCBI NO: 15219651 NR Description: Myb-related transcription factor, putative; id: At1g66390.1, supported by cDNA: gi_11935172, supported by
  misc_feature (1)..(246): Homolog of NCBI NO: 15223582 NR Description: myb-related protein anthocyanin2, putative; id: At1g56650.1, supported by cDNA: gi_3941507 [Arabidopsis
  misc_feature (1)..(209): Homolog of NCBI NO: 11358560 NR Description: myb-related transcription factor MYB75 [imported] Arabidopsis thaliana >gi|3941508|gb|AAC83630.1| putative
  misc_feature (1)..(139): Homolog of NCBI NO: 15219650 NR Description: myb family transcription factor (MYB114); protein At1g66380.1, supported by cDNA: gi_11641123 [Arabidopsis
  misc_feature (4)..(148): Homolog of NCBI NO: 7673084 NR Description: An2 protein [Petunia x hybrida]
  misc_feature (4)..(213): Homolog of NCBI NO: 7673088 NR Description: An2 protein [Petunia integrifolia]
  misc_feature (4)..(213): Homolog of NCBI NO: 7673086 NR Description: An2 protein [Petunia integrifolia]
  misc_feature (1)..(148): Homolog of NCBI NO: 40643886 NR Description: MYB10 protein [Gerbera hybrid cv. 'Terra Regina']
  misc_feature (4)..(159): Homolog of NCBI NO: 33867693 NR Description: anthocyanin 1 [Lycopersicon esculentum]
MGESPKGLRKGTWTTEEDILLRQCIDKYGEGKWHRVPLRTGLNRCRKSCRLRWLNYLKPSIKRGKLCSDEVDLVLRLHKLLGNRWSLIAGRLPGRTANDVKNYWNTHLSKKHDERCCKTKMINKNITSHPTSSAQKIDVLKPRPRSFSDKNSCNDVNILPKVDVVPLHLGLNNNYVCESSITCNKDEQKDKLININLLDGDNMWWESLLEADVLGPEATETAKGVTLPLDFEQIWARFDEETLELN

SEQ ID NO: 90009 - protein, 126 aa, Arabidopsis thaliana
  peptide (1)..(126): Ceres Seq. ID no. 12721797
  misc_feature (1)..(126): Homolog of NCBI NO: 15219632 NR Description: Myb-related transcription factor, putative; id: At1g66370.1, supported by cDNA: gi_11641121 [Arabidopsis
  misc_feature (1)..(126): Homolog of NCBI NO: 15219651 NR Description: Myb-related transcription factor, putative; id: At1g66390.1, supported by cDNA: gi_11935172, supported by
  misc_feature (1)..(126): Homolog of NCBI NO: 15223582 NR Description: myb-related protein anthocyanin2, putative; id: At1g56650.1, supported by cDNA: gi_3941507 [Arabidopsis
  misc_feature (1)..(89): Homolog of NCBI NO: 11358560 NR Description: myb-related transcription factor MYB75 [imported] Arabidopsis thaliana >gi|3941508|gb|AAC83630.1| putative
  misc_feature (1)..(19): Homolog of NCBI NO: 15219650 NR Description: myb family transcription factor (MYB114); protein At1g66380.1, supported by cDNA: gi_11641123 [Arabidopsis
  misc_feature (1)..(28): Homolog of NCBI NO: 7673084 NR Description: An2 protein [Petunia x hybrida]
  misc_feature (1)..(93): Homolog of NCBI NO: 7673088 NR Description: An2 protein [Petunia integrifolia]
  misc_feature (1)..(93): Homolog of NCBI NO: 7673086 NR Description: An2 protein [Petunia integrifolia]
  misc_feature (1)..(28): Homolog of NCBI NO: 40643886 NR Description: MYB10 protein [Gerbera hybrid cv. 'Terra Regina']
  misc_feature (1)..(39): Homolog of NCBI NO: 33867693 NR Description: anthocyanin 1 [Lycopersicon esculentum]
MINKNITSHPTSSAQKIDVLKPRPRSFSDKNSCNDVNILPKVDVVPLHLGLNNNYVCESSITCNKDEQKDKLININLLDGDNMWWESLLEADVLGPEATETAKGVTLPLDFEQIWARFDEETLELN

SEQ ID NO: 90010 - DNA, 1367 bp, Arabidopsis thaliana
  misc_feature (1)..(1367): Ceres Seq. ID no. 12721807
  misc_feature: MA Experiment ID: 20000180 Result: Up-regulated in Transcription
  misc_feature: MA Experiment 20000180 PARAMETER Experiment Name: At_Germinating_Seeds_P Parameter: Age (hr) Value: 24 vs. 0
  misc_feature: MA Experiment 20000180 PARAMETER Experiment Name: At_Germinating_Seeds_P Parameter: Tissue Value: Germinating Seeds
  misc_feature: MA Experiment ID: 20000437 Result: Down-regulated in Transcription
  misc_feature: MA Experiment 20000437 PARAMETER Experiment Name: At_Drought_P Parameter: Age (day) Value: 8
  misc_feature: MA Experiment 20000437 PARAMETER Experiment Name: At_Drought_P Parameter: Organism Value: A. thaliana
  misc_feature: MA Experiment 20000437 PARAMETER Experiment Name: At_Drought_P Parameter: Plant Line Value: WS
  misc_feature: MA Experiment 20000437 PARAMETER Experiment Name: At_Drought_P Parameter: Timepoint (hr) Value: 24
  misc_feature: MA Experiment 20000437 PARAMETER Experiment Name: At_Drought_P Parameter: Tissue Value: Whole Plant
  misc_feature: MA Experiment 20000437 PARAMETER Experiment Name: At_Drought_P Parameter: Treatment Value: Drought vs. No Drought
  misc_feature: MA Experiment ID: 20000439 Result: Down-regulated in Transcription
  misc_feature: MA Experiment 20000439 PARAMETER Experiment Name: At_Roots__P Parameter: Age (day) Value: 14 vs. 21
  misc_feature: MA Experiment 20000439 PARAMETER Experiment Name: At_Roots__P Parameter: Organism Value: A. thaliana
  misc_feature: MA Experiment 20000439 PARAMETER Experiment Name: At_Roots__P Parameter: Tissue Value: Roots vs. Whole Plant
  misc_feature: MA Experiment ID: 20000451 Result: Up-regulated in Transcription
  misc_feature: MA Experiment 20000451 PARAMETER Experiment Name: At_CS6879_Shoots-Roots_P Parameter: Age (day) Value: 14
  misc_feature: MA Experiment 20000451 PARAMETER Experiment Name: At_CS6879_Shoots-Roots_P Parameter: Organism Value: A. thaliana
  misc_feature: MA Experiment 20000451 PARAMETER Experiment Name: At_CS6879_Shoots-Roots_P Parameter: Plant Line Value: CS6879 vs. WS
  misc_feature: MA Experiment 20000451 PARAMETER Experiment Name: At_CS6879_Shoots-Roots_P Parameter: Tissue Value: Roots
  misc_feature: MA Experiment ID: 20000452 Result: Up-regulated in Transcription
  misc_feature: MA Experiment 20000452 PARAMETER Experiment Name: At_CS6879_Shoots-Roots_P Parameter: Age (day) Value: 14
  misc_feature: MA Experiment 20000452 PARAMETER Experiment Name: At_CS6879_Shoots-Roots_P Parameter: Organism Value: A. thaliana
  misc_feature: MA Experiment 20000452 PARAMETER Experiment Name: At_CS6879_Shoots-Roots_P Parameter: Plant Line Value: CS6879 vs. WS
  misc_feature: MA Experiment 20000452 PARAMETER Experiment Name: At_CS6879_Shoots-Roots_P Parameter: Tissue Value: Shoots
  misc_feature: MA Experiment ID: 20000573 Result: Down-regulated in Transcription
  misc_feature: MA Experiment 20000573 PARAMETER Experiment Name: At_100uM_ABA_Mutants__P Parameter: Organism Value: A. thaliana
  misc_feature: MA Experiment 20000573 PARAMETER Experiment Name: At_100uM_ABA_Mutants__P Parameter: Plant Line Value: CS22 vs. Ler wt
  misc_feature: MA Experiment 20000573 PARAMETER Experiment Name: At_100uM_ABA_Mutants__P Parameter: Timepoint (hr) Value: N/A
  misc_feature: MA Experiment 20000573 PARAMETER Experiment Name: At_100uM_ABA_Mutants__P Parameter: Tissue Value: Whole Plant
  misc_feature: MA Experiment 20000573 PARAMETER Experiment Name: At_100uM_ABA_Mutants__P Parameter: Treatment Value: None
  misc_feature: MA Experiment ID: 20000794 Result: Down-regulated in Transcription
  misc_feature: MA Experiment 20000794 PARAMETER Experiment Name: At_Petals_P Parameter: Age (day) Value: 23-25 days
  misc_feature: MA Experiment 20000794 PARAMETER Experiment Name: At_Petals_P Parameter: Plant Line Value: WS
  misc_feature: MA Experiment 20000794 PARAMETER Experiment Name: At_Petals_P Parameter: Tissue Value: Petals vs. Whole plant
  misc_feature: MA Experiment ID: 20001451 Result: Down-regulated in Transcription
  misc_feature: MA Experiment 20001451 PARAMETER Experiment Name: At_Far-red-induction_P Parameter: Age (day) Value: 7
  misc_feature: MA Experiment 20001451 PARAMETER Experiment Name: At_Far-red-induction_P Parameter: Light Value: Far-red vs. White
  misc_feature: MA Experiment 20001451 PARAMETER Experiment Name: At_Far-red-induction_P Parameter: Organism Value: A. thaliana
  misc_feature: MA Experiment 20001451 PARAMETER Experiment Name: At_Far-red-induction_P Parameter: Plant Line Value: Columbia
  misc_feature: MA Experiment 20001451 PARAMETER Experiment Name: At_Far-red-induction_P Parameter: Timepoint (hr) Value: 24
  misc_feature: MA Experiment 20001451 PARAMETER Experiment Name: At_Far-red-induction_P Parameter: Tissue Value: Whole Plant
  misc_feature: MA Experiment ID: 20001560 Result: Up-regulated in Transcription
  misc_feature: MA Experiment 20001560 PARAMETER Experiment Name: At_Drought_Soil_Dry_P Parameter: Age (day) Value: 28
  misc_feature: MA Experiment 20001560 PARAMETER Experiment Name: At_Drought_Soil_Dry_P Parameter: Organism Value: A. thaliana
  misc_feature: MA Experiment 20001560 PARAMETER Experiment Name: At_Drought_Soil_Dry_P Parameter: Plant Line Value: WS
  misc_feature: MA Experiment 20001560 PARAMETER Experiment Name: At_Drought_Soil_Dry_P Parameter: Post Timepoint (hr) Value: None
  misc_feature: MA Experiment 20001560 PARAMETER Experiment Name: At_Drought_Soil_Dry_P Parameter: Post-Treatment Value: None
  misc_feature: MA Experiment 20001560 PARAMETER Experiment Name: At_Drought_Soil_Dry_P Parameter: Timepoint (day) Value: 14
  misc_feature: MA Experiment 20001560 PARAMETER Experiment Name: At_Drought_Soil_Dry_P Parameter: Treatment Value: Drought vs. No Drought
atggctctccaagccactactactacgttctgcttctccggtccaactttccgatcaactcctcactcactcacttcaaaacgtcctatctccatcaaagctactacttcttctccttcaagactctccaattcacgatctaatctcaaaggaagagcattgtctagtgatggttcaacacaagaatctccttatgtagtctgttttggagaaatgctaatcgattttgtaccgacgacaagcggactttcattagccgatgcaccggcttttaaaaaagctccaggtggtgcacctgctaatgtagctgttggtattgctcgtcttggtggttcttcagctttcattggaaaggttggtgaagatgagtttggttatatgcttgcgaatattttgaaagataataatgtgaacaatgatggtatgaggtttgatccaggagcaagaactgctttagcttttgtgactttgactaatgaaggtgaaagagagtttatgttttaccgaaacccgagtgctgatatgttgttagaggagtctgagcttgattttgatttgatcaaaaaggcaaagatatttcattacggttcgataagtcttatcaccgaaccgtgcaagtctgcgcatatttctgcagctaaggcggctaaggaggctggtgttatactctcttatgaccctaaccttaggcttccgttgtggccttctgcagacaatgctagggaagagattctgagcatttgggagactgctgatattataaagataagtgaagaggagattgtctttctaacgaaaggagaagatccgtatgatgataatgttgtacgcaagttgtttcatcctaagctgaaacttctccttgtcactgaaggtcctgaaggctgtcggtactacaccaaggattttagtgggagagtgcatggattgaaggtggatgtagtggacacaacaggtgctggtgatgcatttgttgcggggatactatcgcaactagccaatgatctctccttgcttcaggacgaagagcgactgagagaggctcttatgtttgcgaatgcatgcggggcattaaccgttaaagtgagaggcgcaatcccggcccttccaaccaaagaagctgtacatgaggctctactcaaagccgtcgtttaacattcaataacatcaccaatatgagaaacagtttgtacgccagcagatttcgcaagtctgcattttgttgttgtaaaattgttgtataatgtacttaccaatgtttgtattctagtagctgtagagctttaagcctttgaatatattgttgagccaagaactagaatccatcttttgatctttgtaactctcagtttgaattagagagatct

SEQ ID NO: 90011 - protein, 384 aa, Arabidopsis thaliana
  peptide (1)..(384): Ceres Seq. ID no. 12721808
  misc_feature (63)..(372): Pfam Name: pfkB family carbohydrate kinase Pfam Description: pfkB family carbohydrate kinase
  misc_feature (1)..(384): Homolog of NCBI NO: 22330456 NR Description: fructokinase, putative; protein id: At1g66430.1
  misc_feature (36)..(379): Homolog of NCBI NO: 23476263 NR Description: fructokinase [Lycopersicon esculentum]
  misc_feature (142)..(384): Homolog of NCBI NO: 24030222 NR Description: putative fructokinase [Arabidopsis thaliana]
  misc_feature (48)..(379): Homolog of NCBI NO: 15242193 NR Description: fructokinase 1; protein id: At5g51830.1, by cDNA: gi_13878052, supported by cDNA: gi_17104644 [Arabidopsis >gi|10177882|dbj|BAB11252.1| fructokinase 1 [Arabidopsis
  misc_feature (48)..(379): Homolog of NCBI NO: 7434220 NR Description: fructokinase (EC 2.7.1.4) 1 - tomato
  misc_feature (158)..(384): Homolog of NCBI NO: 23397332 NR Description: putative fructokinase [Arabidopsis thaliana]
  misc_feature (54)..(381): Homolog of NCBI NO: 7434223 NR Description: fructokinase (EC 2.7.1.4) - beet
  misc_feature (59)..(381): Homolog of NCBI NO: 15231692 NR Description: fructokinase-like protein; protein id: supported by cDNA: 24751. [Arabidopsis thaliana]
  misc_feature (59)..(381): Homolog of NCBI NO: 21592495 NR Description: fructokinase-like protein [Arabidopsis thaliana]
  misc_feature (66)..(381): Homolog of NCBI NO: 33329198 NR Description: putative fructokinase; S1 self-incompatibility
MALQATTTTFCFSGPTFRSTPHSLTSKRPISIKATTSSPSRLSNSRSNLKGRALSSDGSTQESPYVVCFGEMLIDFVPTTSGLSLADAPAFKKAPGGAPANVAVGIARLGGSSAFIGKVGEDEFGYMLANILKDNNVNNDGMRFDPGARTALAFVTLTNEGEREFMFYRNPSADMLLEESELDFDLIKKAKIFHYGSISLITEPCKSAHISAAKAAKEAGVILSYDPNLRLPLWPSADNAREEILSIWETADIIKISEEEIVFLTKGEDPYDDNVVRKLFHPKLKLLLVTEGPEGCRYYTKDFSGRVHGLKVDVVDTTGAGDAFVAGILSQLANDLSLLQDEERLREALMFANACGALTVKVRGAIPALPTKEAVHEALLKAVV

SEQ ID NO: 90012 - protein, 313 aa, Arabidopsis thaliana
  peptide (1)..(313): Ceres Seq. ID no. 12721809
  misc_feature (1)..(301): Pfam Name: pfkB family carbohydrate kinase Pfam Description: pfkB family carbohydrate kinase
  misc_feature (1)..(313): Homolog of NCBI NO: 22330456 NR Description: fructokinase, putative; protein id: At1g66430.1
  misc_feature (1)..(308): Homolog of NCBI NO: 23476263 NR Description: fructokinase [Lycopersicon esculentum]
  misc_feature (71)..(313): Homolog of NCBI NO: 24030222 NR Description: putative fructokinase [Arabidopsis thaliana]
  misc_feature (1)..(308): Homolog of NCBI NO: 15242193 NR Description: fructokinase 1; protein id: At5g51830.1, by cDNA: gi_13878052, supported by cDNA: gi_17104644 [Arabidopsis >gi|10177882|dbj|BAB11252.1| fructokinase 1 [Arabidopsis
  misc_feature (1)..(308): Homolog of NCBI NO: 7434220 NR Description: fructokinase (EC 2.7.1.4) 1 - tomato
  misc_feature (87)..(313): Homolog of NCBI NO: 23397332 NR Description: putative fructokinase [Arabidopsis thaliana]
  misc_feature (1)..(310): Homolog of NCBI NO: 7434223 NR Description: fructokinase (EC 2.7.1.4) - beet
  misc_feature (1)..(310): Homolog of NCBI NO: 15231692 NR Description: fructokinase-like protein; protein id: supported by cDNA: 24751. [Arabidopsis thaliana]
  misc_feature (1)..(310): Homolog of NCBI NO: 21592495 NR Description: fructokinase-like protein [Arabidopsis thaliana]
  misc_feature (1)..(310): Homolog of NCBI NO: 33329198 NR Description: putative fructokinase; S1 self-incompatibility
MLIDFVPTTSGLSLADAPAFKKAPGGAPANVAVGIARLGGSSAFIGKVGEDEFGYMLANILKDNNVNNDGMRFDPGARTALAFVTLTNEGEREFMFYRNPSADMLLEESELDFDLIKKAKIFHYGSISLITEPCKSAHISAAKAAKEAGVILSYDPNLRLPLWPSADNAREEILSIWETADIIKISEEEIVFLTKGEDPYDDNVVRKLFHPKLKLLLVTEGPEGCRYYTKDFSGRVHGLKVDVVDTTGAGDAFVAGILSQLANDLSLLQDEERLREALMFANACGALTVKVRGAIPALPTKEAVHEALLKAVV

SEQ ID NO: 90013 - protein, 258 aa, Arabidopsis thaliana
  peptide (1)..(258): Ceres Seq. ID no. 12721810
  misc_feature (1)..(246): Pfam Name: pfkB family carbohydrate kinase Pfam Description: pfkB family carbohydrate kinase
  misc_feature (1)..(258): Homolog of NCBI NO: 22330456 NR Description: fructokinase, putative; protein id: At1g66430.1
  misc_feature (1)..(253): Homolog of NCBI NO: 23476263 NR Description: fructokinase [Lycopersicon esculentum]
  misc_feature (16)..(258): Homolog of NCBI NO: 24030222 NR Description: putative fructokinase [Arabidopsis thaliana]
  misc_feature (1)..(253): Homolog of NCBI NO: 15242193 NR Description: fructokinase 1; protein id: At5g51830.1, by cDNA: gi_13878052, supported by cDNA: gi_17104644 [Arabidopsis >gi|10177882|dbj|BAB11252.1| fructokinase 1 [Arabidopsis
  misc_feature (1)..(253): Homolog of NCBI NO: 7434220 NR Description: fructokinase (EC 2.7.1.4) 1 - tomato
  misc_feature (32)..(258): Homolog of NCBI NO: 23397332 NR Description: putative fructokinase [Arabidopsis thaliana]
  misc_feature (1)..(255): Homolog of NCBI NO: 7434223 NR Description: fructokinase (EC 2.7.1.4) - beet
  misc_feature (1)..(255): Homolog of NCBI NO: 15231692 NR Description: fructokinase-like protein; protein id: supported by cDNA: 24751. [Arabidopsis thaliana]
  misc_feature (1)..(255): Homolog of NCBI NO: 21592495 NR Description: fructokinase-like protein [Arabidopsis thaliana]
  misc_feature (1)..(255): Homolog of NCBI NO: 33329198 NR Description: putative fructokinase; S1 self-incompatibility
MLANILKDNNVNNDGMRFDPGARTALAFVTLTNEGEREFMFYRNPSADMLLEESELDFDLIKKAKIFHYGSISLITEPCKSAHISAAKAAKEAGVILSYDPNLRLPLWPSADNAREEILSIWETADIIKISEEEIVFLTKGEDPYDDNVVRKLFHPKLKLLLVTEGPEGCRYYTKDFSGRVHGLKVDVVDTTGAGDAFVAGILSQLANDLSLLQDEERLREALMFANACGALTVKVRGAIPALPTKEAVHEALLKAVV

SEQ ID NO: 90014 - DNA, 1404 bp, Arabidopsis thaliana
  misc_feature (1)..(1404): Ceres Seq. ID no. 12721811
  misc_feature: MA Experiment ID: 20000173 Result: Down-regulated in Transcription
  misc_feature: MA Experiment 20000173 PARAMETER Experiment Name: At_42deg_Heat_P Parameter: Age (day) Value: 14
  misc_feature: MA Experiment 20000173 PARAMETER Experiment Name: At_42deg_Heat_P Parameter: Organism Value: A. thaliana
  misc_feature: MA Experiment 20000173 PARAMETER Experiment Name: At_42deg_Heat_P Parameter: Plant Line Value: WS
  misc_feature: MA Experiment 20000173 PARAMETER Experiment Name: At_42deg_Heat_P Parameter: Temperature (deg C) Value: 42 vs. 22
  misc_feature: MA Experiment 20000173 PARAMETER Experiment Name: At_42deg_Heat_P Parameter: Timepoint (hr) Value: 6
  misc_feature: MA Experiment 20000173 PARAMETER Experiment Name: At_42deg_Heat_P Parameter: Tissue Value: Aerial
  misc_feature: MA Experiment ID: 20000227 Result: Up-regulated in Transcription
  misc_feature: MA Experiment 20000227 PARAMETER Experiment Name: At_Root-Tips-vs-Tops_P Parameter: Tissue Value: Root Tips vs. Root Tops
  misc_feature: MA Experiment ID: 20000234 Result: Up-regulated in Transcription
  misc_feature: MA Experiment 20000234 PARAMETER Experiment Name: At_Siliques_P Parameter: Age (day) Value: 21
  misc_feature: MA Experiment 20000234 PARAMETER Experiment Name: At_Siliques_P Parameter: Organism Value: A. thaliana
  misc_feature: MA Experiment 20000234 PARAMETER Experiment Name: At_Siliques_P Parameter: Plant Line Value: WS
  misc_feature: MA Experiment 20000234 PARAMETER Experiment Name: At_Siliques_P Parameter: Tissue Value: Less Than 5mm Siliques vs. Whole Plant
  misc_feature: MA Experiment ID: 20000235 Result: Up-regulated in Transcription
  misc_feature: MA Experiment 20000235 PARAMETER Experiment Name: At_Siliques_P Parameter: Age (day) Value: 21
  misc_feature: MA Experiment 20000235 PARAMETER Experiment Name: At_Siliques_P Parameter: Organism Value: A. thaliana
  misc_feature: MA Experiment 20000235 PARAMETER Experiment Name: At_Siliques_P Parameter: Plant Line Value: WS
  misc_feature: MA Experiment 20000235 PARAMETER Experiment Name: At_Siliques_P Parameter: Tissue Value: 5-10mm Siliques vs. Whole Plant
  misc_feature: MA Experiment ID: 20000439 Result: Up-regulated in Transcription
  misc_feature: MA Experiment 20000439 PARAMETER Experiment Name: At_Roots__P Parameter: Age (day) Value: 14 vs. 21
  misc_feature: MA Experiment 20000439 PARAMETER Experiment Name: At_Roots__P Parameter: Organism Value: A. thaliana
  misc_feature: MA Experiment 20000439 PARAMETER Experiment Name: At_Roots__P Parameter: Tissue Value: Roots vs. Whole Plant
  misc_feature: MA Experiment ID: 20000451 Result: Down-regulated in Transcription
  misc_feature: MA Experiment 20000451 PARAMETER Experiment Name: At_CS6879_Shoots-Roots_P Parameter: Age (day) Value: 14
  misc_feature: MA Experiment 20000451 PARAMETER Experiment Name: At_CS6879_Shoots-Roots_P Parameter: Organism Value: A. thaliana
  misc_feature: MA Experiment 20000451 PARAMETER Experiment Name: At_CS6879_Shoots-Roots_P Parameter: Plant Line Value: CS6879 vs. WS
  misc_feature: MA Experiment 20000451 PARAMETER Experiment Name: At_CS6879_Shoots-Roots_P Parameter: Tissue Value: Roots
  misc_feature: MA Experiment ID: 20000573 Result: Down-regulated in Transcription
  misc_feature: MA Experiment 20000573 PARAMETER Experiment Name: At_100uM_ABA_Mutants__P Parameter: Organism Value: A. thaliana
  misc_feature: MA Experiment 20000573 PARAMETER Experiment Name: At_100uM_ABA_Mutants__P Parameter: Plant Line Value: CS22 vs. Ler wt
  misc_feature: MA Experiment 20000573 PARAMETER Experiment Name: At_100uM_ABA_Mutants__P Parameter: Timepoint (hr) Value: N/A
  misc_feature: MA Experiment 20000573 PARAMETER Experiment Name: At_100uM_ABA_Mutants__P Parameter: Tissue Value: Whole Plant
  misc_feature: MA Experiment 20000573 PARAMETER Experiment Name: At_100uM_ABA_Mutants__P Parameter: Treatment Value: None
  misc_feature: MA Experiment ID: 20000574 Result: Down-regulated in Transcription
  misc_feature: MA Experiment 20000574 PARAMETER Experiment Name: At_100uM_ABA_Mutants__P Parameter: Organism Value: A. thaliana
  misc_feature: MA Experiment 20000574 PARAMETER Experiment Name: At_100uM_ABA_Mutants__P Parameter: Plant Line Value: CS23 vs. Ler wt
  misc_feature: MA Experiment 20000574 PARAMETER Experiment Name: At_100uM_ABA_Mutants__P Parameter: Timepoint (hr) Value: N/A
  misc_feature: MA Experiment 20000574 PARAMETER Experiment Name: At_100uM_ABA_Mutants__P Parameter: Tissue Value: Whole Plant
  misc_feature: MA Experiment 20000574 PARAMETER Experiment Name: At_100uM_ABA_Mutants__P Parameter: Treatment Value: None
  misc_feature: MA Experiment ID: 20000794 Result: Up-regulated in Transcription
  misc_feature: MA Experiment 20000794 PARAMETER Experiment Name: At_Petals_P Parameter: Age (day) Value: 23-25 days
  misc_feature: MA Experiment 20000794 PARAMETER Experiment Name: At_Petals_P Parameter: Plant Line Value: WS
  misc_feature: MA Experiment 20000794 PARAMETER Experiment Name: At_Petals_P Parameter: Tissue Value: Petals vs. Whole plant
atgattcttgatttgggttttccttgttttgttcctcctcgaaccagctctcgtgaggacaacaaagcttggcttctggctgaaacagagccgaagcttattgactcagaacaacattcgttgcagtcttcgtttaggtttagtctttgctcacagttggagctggagaagattaaaaaggagaaaccttcgttgtcttatcggaattttccagtgtctgaaggatcagagacggttctgctagtgaatctggagaatgagacaggagaattgacaggtgagatgaattggtcgagaggcctttcactggagaagagtatttctccggtggccgattctttgatccgattcagttaccgcgaactcctcactgccacgcgcaatttctcaaaacggagggttttgggaagaggagcttgtagctatgtttttaagggaagaatcgggatttggcgtaaagccgtggccatcaaaagacttgataaaaaagataaagaatctccaaagtcgttttgcagagagttgatgattgcaagctctcttaatagccccaacgttgtgcctctgctaggtttctgtatcgatcccgatcaagggcttttcttggtgtacaagtatgtgtctggtggcagcctcgaacgctttttacatgataagaagaaaaagaagagtaggaagacccccttgaatctgccttggtctacaaggtacaaggttgccttaggtattgcagatgccatagcctatttacataatggcactgagcaatgcgttgtgcatagagacattaaaccctcaaatattcttctttcctcaaacaaaattccaaagttgtgtgattttgggttggctacttggaccgctgcgccttcggttcctttcctctgtaaaaccgtgaaaggaacttttggttatctggctcctgagtatttccaacacggcaagatatctgacaagaccgatgtttacgcatttggagtcgtgttgcttgagctaataactggtcggaagccaattgaagcaagaagaccatctggtgaagaaaatttggtagtttgggcaaaaccgttgttgcatagagggatagaagctacagaggagttgctagatccaaggctgaaatgtactagaaaaaactcggcttcgatggagcgtatgatccgagctgcggcagcgtgtgtgatcaatgaggaatcacgaagaccggggatgaaggagatactttcaatcctaaaaggcggtgaagggatagaactaaggacgttatcaagccggaagaaatcaaatcttccgggtataatggactgttatccgcagttgcaacggacaaaatctgagatgaagagtcatcttacgcttgcgatgctcggagtaacggaatttgaagctgatgatcttttgtag

SEQ ID NO: 90015 - protein, 467 aa, Arabidopsis thaliana
  peptide (1)..(467): Ceres Seq. ID no. 12721812
  misc_feature (1)..(467): Homolog of NCBI NO: 15219657 NR Description: protein kinase, putative; protein id: At1g66460.1
  misc_feature (19)..(465): Homolog of NCBI NO: 15240345 NR Description: protein kinase - like protein; protein id: supported by cDNA: 105458. [Arabidopsis thaliana]
  misc_feature (236)..(465): Homolog of NCBI NO: 10177167 NR Description: Ser/Thr protein kinase-like protein [Arabidopsis
  misc_feature (150)..(221): Homolog of NCBI NO: 10177167 NR Description: Ser/Thr protein kinase-like protein [Arabidopsis
  misc_feature (117)..(466): Homolog of NCBI NO: 22329713 NR Description: hypothetical protein; protein id: At1g21590.1, by cDNA: gi_18086337 [Arabidopsis thaliana] At1g21590/F24J8_9 [Arabidopsis thaliana]
  misc_feature (104)..(460): Homolog of NCBI NO: 15227291 NR Description: putative protein kinase; protein id: At2g16750.1
  misc_feature (117)..(460): Homolog of NCBI NO: 28376688 NR Description: putative serine/threonine kinase [Oryza sativa
  misc_feature (117)..(465): Homolog of NCBI NO: 15237563 NR Description: putative protein; protein id: At5g63940.1, by cDNA: gi_20260317 [Arabidopsis thaliana] contains similarity to protein kinase~gene_id:MBM17.4
  misc_feature (95)..(462): Homolog of NCBI NO: 15236248 NR Description: protein kinase - like; protein id: At4g35030.1
  misc_feature (117)..(353): Homolog of NCBI NO: 15223890 NR Description: hypothetical protein; protein id: At1g77280.1
MILDLGFPCFVPPRTSSREDNKAWLLAETEPKLIDSEQHSLQSSFRFSLCSQLELEKIKKEKPSLSYRNFPVSEGSETVLLVNLENETGELTGEMNWSRGLSLEKSISPVADSLIRFSYRELLTATRNFSKRRVLGRGACSYVFKGRIGIWRKAVAIKRLDKKDKESPKSFCRELMIASSLNSPNVVPLLGFCIDPDQGLFLVYKYVSGGSLERFLHDKKKKKSRKTPLNLPWSTRYKVALGIADAIAYLHNGTEQCVVHRDIKPSNILLSSNKIPKLCDFGLATWTAAPSVPFLCKTVKGTFGYLAPEYFQHGKISDKTDVYAFGVVLLELITGRKPIEARRPSGEENLVVWAKPLLHRGIEATEELLDPRLKCTRKNSASMERMIRAAAACVINEESRRPGMKEILSILKGGEGIELRTLSSRKKSNLPGIMDCYPQLQRTKSEMKSHLTLAMLGVTEFEADDLL

SEQ ID NO: 90016 - protein, 373 aa, Arabidopsis thaliana
  peptide (1)..(373): Ceres Seq. ID no. 12721813
  misc_feature (1)..(373): Homolog of NCBI NO: 15219657 NR Description: protein kinase, putative; protein id: At1g66460.1
  misc_feature (1)..(371): Homolog of NCBI NO: 15240345 NR Description: protein kinase - like protein; protein id: supported by cDNA: 105458. [Arabidopsis thaliana]
  misc_feature (142)..(371): Homolog of NCBI NO: 10177167 NR Description: Ser/Thr protein kinase-like protein [Arabidopsis
  misc_feature (56)..(127): Homolog of NCBI NO: 10177167 NR Description: Ser/Thr protein kinase-like protein [Arabidopsis
  misc_feature (23)..(372): Homolog of NCBI NO: 22329713 NR Description: hypothetical protein; protein id: At1g21590.1, by cDNA: gi_18086337 [Arabidopsis thaliana] At1g21590/F24J8_9 [Arabidopsis thaliana]
  misc_feature (10)..(366): Homolog of NCBI NO: 15227291 NR Description: putative protein kinase; protein id: At2g16750.1
  misc_feature (23)..(366): Homolog of NCBI NO: 28376688 NR Description: putative serine/threonine kinase [Oryza sativa
  misc_feature (23)..(371): Homolog of NCBI NO: 15237563 NR Description: putative protein; protein id: At5g63940.1, by cDNA: gi_20260317 [Arabidopsis thaliana] contains similarity to protein kinase~gene_id:MBM17.4
  misc_feature (1)..(368): Homolog of NCBI NO: 15236248 NR Description: protein kinase - like; protein id: At4g35030.1
  misc_feature (23)..(259): Homolog of NCBI NO: 15223890 NR Description: hypothetical protein; protein id: At1g77280.1
MNWSRGLSLEKSISPVADSLIRFSYRELLTATRNFSKRRVLGRGACSYVFKGRIGIWRKAVAIKRLDKKDKESPKSFCRELMIASSLNSPNVVPLLGFCIDPDQGLFLVYKYVSGGSLERFLHDKKKKKSRKTPLNLPWSTRYKVALGIADAIAYLHNGTEQCVVHRDIKPSNILLSSNKIPKLCDFGLATWTAAPSVPFLCKTVKGTFGYLAPEYFQHGKISDKTDVYAFGVVLLELITGRKPIEARRPSGEENLVVWAKPLLHRGIEATEELLDPRLKCTRKNSASMERMIRAAAACVINEESRRPGMKEILSILKGGEGIELRTLSSRKKSNLPGIMDCYPQLQRTKSEMKSHLTLAMLGVTEFEADDLL

SEQ ID NO: 90017 - protein, 292 aa, Arabidopsis thaliana
  peptide (1)..(292): Ceres Seq. ID no. 12721814
  misc_feature (1)..(292): Homolog of NCBI NO: 15219657 NR Description: protein kinase, putative; protein id: At1g66460.1
  misc_feature (1)..(290): Homolog of NCBI NO: 15240345 NR Description: protein kinase - like protein; protein id: supported by cDNA: 105458. [Arabidopsis thaliana]
  misc_feature (61)..(290): Homolog of NCBI NO: 10177167 NR Description: Ser/Thr protein kinase-like protein [Arabidopsis
  misc_feature (1)..(46): Homolog of NCBI NO: 10177167 NR Description: Ser/Thr protein kinase-like protein [Arabidopsis
  misc_feature (1)..(291): Homolog of NCBI NO: 22329713 NR Description: hypothetical protein; protein id: At1g21590.1, by cDNA: gi_18086337 [Arabidopsis thaliana] At1g21590/F24J8_9 [Arabidopsis thaliana]
  misc_feature (1)..(285): Homolog of NCBI NO: 15227291 NR Description: putative protein kinase; protein id: At2g16750.1
  misc_feature (1)..(285): Homolog of NCBI NO: 28376688 NR Description: putative serine/threonine kinase [Oryza sativa
  misc_feature (1)..(290): Homolog of NCBI NO: 15237563 NR Description: putative protein; protein id: At5g63940.1, by cDNA: gi_20260317 [Arabidopsis thaliana] contains similarity to protein kinase~gene_id:MBM17.4
  misc_feature (1)..(287): Homolog of NCBI NO: 15236248 NR Description: protein kinase - like; protein id: At4g35030.1
  misc_feature (1)..(178): Homolog of NCBI NO: 15223890 NR Description: hypothetical protein; protein id: At1g77280.1
MIASSLNSPNVVPLLGFCIDPDQGLFLVYKYVSGGSLERFLHDKKKKKSRKTPLNLPWSTRYKVALGIADAIAYLHNGTEQCVVHRDIKPSNILLSSNKIPKLCDFGLATWTAAPSVPFLCKTVKGTFGYLAPEYFQHGKISDKTDVYAFGVVLLELITGRKPIEARRPSGEENLVVWAKPLLHRGIEATEELLDPRLKCTRKNSASMERMIRAAAACVINEESRRPGMKEILSILKGGEGIELRTLSSRKKSNLPGIMDCYPQLQRTKSEMKSHLTLAMLGVTEFEADDLL

SEQ ID NO: 90018 - DNA, 1161 bp, Arabidopsis thaliana
  misc_feature (1)..(1161): Ceres Seq. ID no. 12721826
  misc_feature: MA Experiment ID: 20000185 Result: Up-regulated in Transcription
  misc_feature: MA Experiment 20000185 PARAMETER Experiment Name: At_Roots__P Parameter: Age (day) Value: 7 vs. 21
  misc_feature: MA Experiment 20000185 PARAMETER Experiment Name: At_Roots__P Parameter: Organism Value: A. thaliana
  misc_feature: MA Experiment 20000185 PARAMETER Experiment Name: At_Roots__P Parameter: Tissue Value: Roots vs. Whole Plant
  misc_feature: MA Experiment ID: 20000439 Result: Up-regulated in Transcription
  misc_feature: MA Experiment 20000439 PARAMETER Experiment Name: At_Roots__P Parameter: Age (day) Value: 14 vs. 21
  misc_feature: MA Experiment 20000439 PARAMETER Experiment Name: At_Roots__P Parameter: Organism Value: A. thaliana
  misc_feature: MA Experiment 20000439 PARAMETER Experiment Name: At_Roots__P Parameter: Tissue Value: Roots vs. Whole Plant
atggtatcagctccgtatagtgagcattggaggaatctccgacgtattggcgccgtcgagattttctccaatcatcggcttaatagcttttacactatccgccgcgacgagatccggcgacttatcgctcgtctctctcggtctccaaacgcttcactcgaatttgcaaaggttgagatgaattcaatgttatctaacttagcattcaacaacattattagaatggtgacgggaaaatgttactatggagatggtgcagaggatgatcctgaggctaaacgtgtgcggcagcttatcgcagaggcgatgagttgttttggtgcaggacatgcggctgatcatttaccgatgttgcgatggattacagatttcgagaggcgggtaaagaagattgctgctaggcttgatgagtttttccaaagattggttgatgagaaacgtgtggcaaaggagaagaaggagaacacgatgattgatcacttgctttctttgcaagtatcccaacctgagtactacacagaccataccattaaaggaaccatgctttctcttatacttgcggggactgatacatcagcggtaacattggaatgggcattatcaagccttttgaacaatcctgaagtactaaaaaaggtgagagatgaaatcgacaatcaaattggcttggacaggcttttggaagaatcagacattccaaaccttccttatcttcagaacattgtctctgaaacgttgcgcttgtatcccgctgggcccttgttagtcccacacatctcatcagaagattgtaaagtagggggttacgatatgccgtgtggcacgatgttattggtgaacgtctgggctatacatagagatcctaggctatgggatgatcccgcgagtttcaagccagagaggtttgagaaagaaggagagacgcataagttattgacgttcgggttaggaagaagagcgtgtcctggttccggactggctcgacggctagtgagcttgagtctcgggtctttgattcaatgttttgaatgggagaggattggagaagaggaggtggatatgactgaaggtggtggactcacaatgcctagagctattccgttggtagccatgtgcagagcacgtgcctttgttggaaaaattccacatgagtctggttga

SEQ ID NO: 90019 - protein, 386 aa, Arabidopsis thaliana
  peptide (1)..(386): Ceres Seq. ID no. 12721827
  misc_feature (1)..(386): Homolog of NCBI NO: 22330459 NR Description: cytochrome p450 family; protein id: At1g66540.1
  misc_feature (11)..(386): Homolog of NCBI NO: 25282574 NR Description: probable cytochrome P450 F28G11.4 [imported] - thaliana >gi|12322266|gb|AAG51161.1|AC074025_11 cytochrome P450,
  misc_feature (1)..(385): Homolog of NCBI NO: 15235534 NR Description: cytochrome P450 monooxygenase, putative; protein
  misc_feature (1)..(385): Homolog of NCBI NO: 15235535 NR Description: cytochrome p450 family; protein id: At4g37360.1
  misc_feature (1)..(385): Homolog of NCBI NO: 15235536 NR Description: cytochrome p450 family; protein id: At4g37370.1, by cDNA: 253698., supported by cDNA: gi_17473897 [Arabidopsis
  misc_feature (1)..(381): Homolog of NCBI NO: 21554381 NR Description: cytochrome P450-like protein [Arabidopsis
  misc_feature (1)..(380): Homolog of NCBI NO: 15235517 NR Description: cytochrome p450 family; protein id: At4g37320.1
  misc_feature (1)..(381): Homolog of NCBI NO: 15235533 NR Description: cytochrome p450 family; protein id: At4g37330.1
  misc_feature (1)..(381): Homolog of NCBI NO: 25282604 NR Description: cytochrome P450 monooxygenase [imported] - thaliana (fragment) >gi|3164142|dbj|BAA28538.1| cytochrome P450
  misc_feature (1)..(381): Homolog of NCBI NO: 30692923 NR Description: cytochrome P450 91A1 [Arabidopsis thaliana] Cytochrome P450 81D1 >gi|9759034|dbj|BAB09361.1| cytochrome P450 thaliana] >gi|20147351|gb|AAM10388.1| AT5g36220/T30G6_3
MVSAPYSEHWRNLRRIGAVEIFSNHRLNSFYTIRRDEIRRLIARLSRSPNASLEFAKVEMNSMLSNLAFNNIIRMVTGKCYYGDGAEDDPEAKRVRQLIAEAMSCFGAGHAADHLPMLRWITDFERRVKKIAARLDEFFQRLVDEKRVAKEKKENTMIDHLLSLQVSQPEYYTDHTIKGTMLSLILAGTDTSAVTLEWALSSLLNNPEVLKKVRDEIDNQIGLDRLLEESDIPNLPYLQNIVSETLRLYPAGPLLVPHISSEDCKVGGYDMPCGTMLLVNVWAIHRDPRLWDDPASFKPERFEKEGETHKLLTFGLGRRACPGSGLARRLVSLSLGSLIQCFEWERIGEEEVDMTEGGGLTMPRAIPLVAMCRARAFVGKIPHESG

SEQ ID NO: 90020 - protein, 327 aa, Arabidopsis thaliana
  peptide (1)..(327): Ceres Seq. ID no. 12721828
  misc_feature (1)..(327): Homolog of NCBI NO: 22330459 NR Description: cytochrome p450 family; protein id: At1g66540.1
  misc_feature (1)..(327): Homolog of NCBI NO: 25282574 NR Description: probable cytochrome P450 F28G11.4 [imported] - thaliana >gi|12322266|gb|AAG51161.1|AC074025_11 cytochrome P450,
  misc_feature (1)..(326): Homolog of NCBI NO: 15235534 NR Description: cytochrome P450 monooxygenase, putative; protein
  misc_feature (1)..(326): Homolog of NCBI NO: 15235535 NR Description: cytochrome p450 family; protein id: At4g37360.1
  misc_feature (1)..(326): Homolog of NCBI NO: 15235536 NR Description: cytochrome p450 family; protein id: At4g37370.1, by cDNA: 253698., supported by cDNA: gi_17473897 [Arabidopsis
  misc_feature (1)..(322): Homolog of NCBI NO: 21554381 NR Description: cytochrome P450-like protein [Arabidopsis
  misc_feature (1)..(321): Homolog of NCBI NO: 15235517 NR Description: cytochrome p450 family; protein id: At4g37320.1
  misc_feature (1)..(322): Homolog of NCBI NO: 15235533 NR Description: cytochrome p450 family; protein id: At4g37330.1
  misc_feature (1)..(322): Homolog of NCBI NO: 25282604 NR Description: cytochrome P450 monooxygenase [imported] - thaliana (fragment) >gi|3164142|dbj|BAA28538.1| cytochrome P450
  misc_feature (1)..(322): Homolog of NCBI NO: 30692923 NR Description: cytochrome P450 91A1 [Arabidopsis thaliana] Cytochrome P450 81D1 >gi|9759034|dbj|BAB09361.1| cytochrome P450 thaliana] >gi|20147351|gb|AAM10388.1| AT5g36220/T30G6_3
MNSMLSNLAFNNIIRMVTGKCYYGDGAEDDPEAKRVRQLIAEAMSCFGAGHAADHLPMLRWITDFERRVKKIAARLDEFFQRLVDEKRVAKEKKENTMIDHLLSLQVSQPEYYTDHTIKGTMLSLILAGTDTSAVTLEWALSSLLNNPEVLKKVRDEIDNQIGLDRLLEESDIPNLPYLQNIVSETLRLYPAGPLLVPHISSEDCKVGGYDMPCGTMLLVNVWAIHRDPRLWDDPASFKPERFEKEGETHKLLTFGLGRRACPGSGLARRLVSLSLGSLIQCFEWERIGEEEVDMTEGGGLTMPRAIPLVAMCRARAFVGKIPHESG

SEQ ID NO: 90021 - protein, 324 aa, Arabidopsis thaliana
  peptide (1)..(324): Ceres Seq. ID no. 12721829
  misc_feature (1)..(324): Homolog of NCBI NO: 22330459 NR Description: cytochrome p450 family; protein id: At1g66540.1
  misc_feature (1)..(324): Homolog of NCBI NO: 25282574 NR Description: probable cytochrome P450 F28G11.4 [imported] - thaliana >gi|12322266|gb|AAG51161.1|AC074025_11 cytochrome P450,
  misc_feature (1)..(323): Homolog of NCBI NO: 15235534 NR Description: cytochrome P450 monooxygenase, putative; protein
  misc_feature (1)..(323): Homolog of NCBI NO: 15235535 NR Description: cytochrome p450 family; protein id: At4g37360.1
  misc_feature (1)..(323): Homolog of NCBI NO: 15235536 NR Description: cytochrome p450 family; protein id: At4g37370.1, by cDNA: 253698., supported by cDNA: gi_17473897 [Arabidopsis
  misc_feature (1)..(319): Homolog of NCBI NO: 21554381 NR Description: cytochrome P450-like protein [Arabidopsis
  misc_feature (1)..(318): Homolog of NCBI NO: 15235517 NR Description: cytochrome p450 family; protein id: At4g37320.1
  misc_feature (1)..(319): Homolog of NCBI NO: 15235533 NR Description: cytochrome p450 family; protein id: At4g37330.1
  misc_feature (1)..(319): Homolog of NCBI NO: 25282604 NR Description: cytochrome P450 monooxygenase [imported] - thaliana (fragment) >gi|3164142|dbj|BAA28538.1| cytochrome P450
  misc_feature (1)..(319): Homolog of NCBI NO: 30692923 NR Description: cytochrome P450 91A1 [Arabidopsis thaliana] Cytochrome P450 81D1 >gi|9759034|dbj|BAB09361.1| cytochrome P450 thaliana] >gi|20147351|gb|AAM10388.1| AT5g36220/T30G6_3
MLSNLAFNNIIRMVTGKCYYGDGAEDDPEAKRVRQLIAEAMSCFGAGHAADHLPMLRWITDFERRVKKIAARLDEFFQRLVDEKRVAKEKKENTMIDHLLSLQVSQPEYYTDHTIKGTMLSLILAGTDTSAVTLEWALSSLLNNPEVLKKVRDEIDNQIGLDRLLEESDIPNLPYLQNIVSETLRLYPAGPLLVPHISSEDCKVGGYDMPCGTMLLVNVWAIHRDPRLWDDPASFKPERFEKEGETHKLLTFGLGRRACPGSGLARRLVSLSLGSLIQCFEWERIGEEEVDMTEGGGLTMPRAIPLVAMCRARAFVGKIPHESG

SEQ ID NO: 90022 - DNA, 765 bp, Arabidopsis thaliana
  misc_feature (1)..(765): Ceres Seq. ID no. 12721830
  misc_feature: MA Experiment ID: 20000184 Result: Up-regulated in Transcription
  misc_feature: MA Experiment 20000184 PARAMETER Experiment Name: At_Shoots__P Parameter: Age (day) Value: 7
  misc_feature: MA Experiment 20000184 PARAMETER Experiment Name: At_Shoots__P Parameter: Tissue Value: Shoots vs. Whole Plant
atggtttccaacattgatcacaaggctatggaagcactcctccgtggccaaggatgcgctaacaacctcaagattctccttgaaaacggcgaaataagctcagtttcaacagaaccactcatccacaccattctcgattctttctcacttgctctgtcttttatggattctcctaatcatccaccataccatgaatcctcttctcataacatggcaagtcatatgtcccggagatcatctaagcaagtacaacatcgcagaaaactttgtgtagcagaaggtttagtgaattacaatcacgattcccggactatgtgccccaatgatggcttcacctggaggaaatatggacaaaaaaccattaaagcctcagcgcacaaaaggtgttactatcggtgtacctatgcaaaagaccaaaactgcaatgctacaaagcgggtgcagaagatcaaagacaaccctccagtgtacagaaccacttacttgggaaaacatgtgtgtaaagcttttgcagttcatgatgatacatatagttccacgatgattcgattcgaccaagttgttcctgaaccgattatgccgcagctcacaacaattgaccaccaagtaattaccgtggaggaaaactccgcagaacatatcatgaaccaagaatgtgatattaatgattatttggtggatgatgacccattttgggctagtcaatttcccccgtttccatcgagtgacacaatgttcttggaaaacatttctgcttttgattag

SEQ ID NO: 90023 - protein, 254 aa, Arabidopsis thaliana
  peptide (1)..(254): Ceres Seq. ID no. 12721831
  misc_feature (1)..(254): Homolog of NCBI NO: 18408541 NR Description: WRKY family transcription factor; protein id: supported by cDNA: gi_15991731 [Arabidopsis thaliana]
  misc_feature (1)..(254): Homolog of NCBI NO: 25404630 NR Description: probable wrky-type DNA binding protein F28G11.3
  misc_feature (1)..(254): Homolog of NCBI NO: 15219685 NR Description: WRKY family transcription factor; protein id: supported by cDNA: gi_18252118 [Arabidopsis thaliana]
  misc_feature (1)..(245): Homolog of NCBI NO: 15219706 NR Description: hypothetical protein; protein id: At1g66600.1, by cDNA: gi_17980953 [Arabidopsis thaliana]
  misc_feature (67)..(231): Homolog of NCBI NO: 15220174 NR Description: WRKY family transcription factor; protein id: [Arabidopsis thaliana] >gi|25406675|pir||A96838 hypothetical
  misc_feature (2)..(168): Homolog of NCBI NO: 13506735 NR Description: WRKY DNA-binding protein 62 [Arabidopsis thaliana]
  misc_feature (2)..(168): Homolog of NCBI NO: 30679452 NR Description: WRKY family transcription factor [Arabidopsis >gi|29839652|sp|Q9LZV6|WR62_ARATH Probable WRKY transcription
  misc_feature (10)..(168): Homolog of NCBI NO: 11358138 NR Description: hypothetical protein T20L15.170 - Arabidopsis >gi|7329663|emb|CAB82760.1| putative protein [Arabidopsis
  misc_feature (1)..(244): Homolog of NCBI NO: 30688540 NR Description: WRKY family transcription factor [Arabidopsis >gi|29839548|sp|Q8GWF1|WR38_ARATH Probable WRKY transcription
  misc_feature (4)..(244): Homolog of NCBI NO: 9758663 NR Description: contains similarity to DNA-binding [Arabidopsis thaliana] >gi|17064162|gb|AAL35288.1|AF442395_1 WRKY
MVSNIDHKAMEALLRGQGCANNLKILLENGEISSVSTEPLIHTILDSFSLALSFMDSPNHPPYHESSSHNMASHMSRRSSKQVQHRRKLCVAEGLVNYNHDSRTMCPNDGFTWRKYGQKTIKASAHKRCYYRCTYAKDQNCNATKRVQKIKDNPPVYRTTYLGKHVCKAFAVHDDTYSSTMIRFDQVVPEPIMPQLTTIDHQVITVEENSAEHIMNQECDINDYLVDDDPFWASQFPPFPSSDTMFLENISAFD

SEQ ID NO: 90024 - protein, 245 aa, Arabidopsis thaliana
  peptide (1)..(245): Ceres Seq. ID no. 12721832
  misc_feature (1)..(245): Homolog of NCBI NO: 18408541 NR Description: WRKY family transcription factor; protein id: supported by cDNA: gi_15991731 [Arabidopsis thaliana]
  misc_feature (1)..(245): Homolog of NCBI NO: 25404630 NR Description: probable wrky-type DNA binding protein F28G11.3
  misc_feature (1)..(245): Homolog of NCBI NO: 15219685 NR Description: WRKY family transcription factor; protein id: supported by cDNA: gi_18252118 [Arabidopsis thaliana]
  misc_feature (1)..(236): Homolog of NCBI NO: 15219706 NR Description: hypothetical protein; protein id: At1g66600.1, by cDNA: gi_17980953 [Arabidopsis thaliana]
  misc_feature (58)..(222): Homolog of NCBI NO: 15220174 NR Description: WRKY family transcription factor; protein id: [Arabidopsis thaliana] >gi|25406675|pir||A96838 hypothetical
  misc_feature (1)..(159): Homolog of NCBI NO: 13506735 NR Description: WRKY DNA-binding protein 62 [Arabidopsis thaliana]
  misc_feature (1)..(159): Homolog of NCBI NO: 30679452 NR Description: WRKY family transcription factor [Arabidopsis >gi|29839652|sp|Q9LZV6|WR62_ARATH Probable WRKY transcription
  misc_feature (1)..(159): Homolog of NCBI NO: 11358138 NR Description: hypothetical protein T20L15.170 - Arabidopsis >gi|7329663|emb|CAB82760.1| putative protein [Arabidopsis
  misc_feature (1)..(235): Homolog of NCBI NO: 30688540 NR Description: WRKY family transcription factor [Arabidopsis >gi|29839548|sp|Q8GWF1|WR38_ARATH Probable WRKY transcription
  misc_feature (1)..(235): Homolog of NCBI NO: 9758663 NR Description: contains similarity to DNA-binding [Arabidopsis thaliana] >gi|17064162|gb|AAL35288.1|AF442395_1 WRKY
MEALLRGQGCANNLKILLENGEISSVSTEPLIHTILDSFSLALSFMDSPNHPPYHESSSHNMASHMSRRSSKQVQHRRKLCVAEGLVNYNHDSRTMCPNDGFTWRKYGQKTIKASAHKRCYYRCTYAKDQNCNATKRVQKIKDNPPVYRTTYLGKHVCKAFAVHDDTYSSTMIRFDQVVPEPIMPQLTTIDHQVITVEENSAEHIMNQECDINDYLVDDDPFWASQFPPFPSSDTMFLENISAFD

SEQ ID NO: 90025 - protein, 200 aa, Arabidopsis thaliana
  peptide (1)..(200): Ceres Seq. ID no. 12721833
  misc_feature (1)..(200): Homolog of NCBI NO: 18408541 NR Description: WRKY family transcription factor; protein id: supported by cDNA: gi_15991731 [Arabidopsis thaliana]
  misc_feature (1)..(200): Homolog of NCBI NO: 25404630 NR Description: probable wrky-type DNA binding protein F28G11.3
  misc_feature (1)..(200): Homolog of NCBI NO: 15219685 NR Description: WRKY family transcription factor; protein id: supported by cDNA: gi_18252118 [Arabidopsis thaliana]
  misc_feature (1)..(191): Homolog of NCBI NO: 15219706 NR Description: hypothetical protein; protein id: At1g66600.1, by cDNA: gi_17980953 [Arabidopsis thaliana]
  misc_feature (13)..(177): Homolog of NCBI NO: 15220174 NR Description: WRKY family transcription factor; protein id: [Arabidopsis thaliana] >gi|25406675|pir||A96838 hypothetical
  misc_feature (1)..(114): Homolog of NCBI NO: 13506735 NR Description: WRKY DNA-binding protein 62 [Arabidopsis thaliana]
  misc_feature (1)..(114): Homolog of NCBI NO: 30679452 NR Description: WRKY family transcription factor [Arabidopsis >gi|29839652|sp|Q9LZV6|WR62_ARATH Probable WRKY transcription
  misc_feature (1)..(114): Homolog of NCBI NO: 11358138 NR Description: hypothetical protein T20L15.170 - Arabidopsis >gi|7329663|emb|CAB82760.1| putative protein [Arabidopsis
  misc_feature (1)..(190): Homolog of NCBI NO: 30688540 NR Description: WRKY family transcription factor [Arabidopsis >gi|29839548|sp|Q8GWF1|WR38_ARATH Probable WRKY transcription
  misc_feature (1)..(190): Homolog of NCBI NO: 9758663 NR Description: contains similarity to DNA-binding [Arabidopsis thaliana] >gi|17064162|gb|AAL35288.1|AF442395_1 WRKY
MDSPNHPPYHESSSHNMASHMSRRSSKQVQHRRKLCVAEGLVNYNHDSRTMCPNDGFTWRKYGQKTIKASAHKRCYYRCTYAKDQNCNATKRVQKIKDNPPVYRTTYLGKHVCKAFAVHDDTYSSTMIRFDQVVPEPIMPQLTTIDHQVITVEENSAEHIMNQECDINDYLVDDDPFWASQFPPFPSSDTMFLENISAFD

SEQ ID NO: 90026 - DNA, 1476 bp, Arabidopsis thaliana
  misc_feature (1)..(1476): Ceres Seq. ID no. 12721837
  misc_feature: MA Experiment ID: 20000314 Result: Down-regulated in Transcription
  misc_feature: MA Experiment 20000314 PARAMETER Experiment Name: At_14day_Shoots-Roots_Sub_P Parameter: Age (day) Value: 14
  misc_feature: MA Experiment 20000314 PARAMETER Experiment Name: At_14day_Shoots-Roots_Sub_P Parameter: Organism Value: A. thaliana
  misc_feature: MA Experiment 20000314 PARAMETER Experiment Name: At_14day_Shoots-Roots_Sub_P Parameter: Plant Line Value: WS
  misc_feature: MA Experiment 20000314 PARAMETER Experiment Name: At_14day_Shoots-Roots_Sub_P Parameter: Tissue Value: Roots vs. Whole Plant
  misc_feature: MA Experiment ID: 20000346 Result: Up-regulated in Transcription
  misc_feature: MA Experiment 20000346 PARAMETER Experiment Name: At_2mM_SA_Sub_P Parameter: Age (day) Value: 14
  misc_feature: MA Experiment 20000346 PARAMETER Experiment Name: At_2mM_SA_Sub_P Parameter: Organism Value: A. thaliana
  misc_feature: MA Experiment 20000346 PARAMETER Experiment Name: At_2mM_SA_Sub_P Parameter: Plant Line Value: WS
  misc_feature: MA Experiment 20000346 PARAMETER Experiment Name: At_2mM_SA_Sub_P Parameter: Timepoint (hr) Value: 1
  misc_feature: MA Experiment 20000346 PARAMETER Experiment Name: At_2mM_SA_Sub_P Parameter: Tissue Value: Aerial
  misc_feature: MA Experiment 20000346 PARAMETER Experiment Name: At_2mM_SA_Sub_P Parameter: Treatment Value: 2mM SA vs. No Treatment
  misc_feature: MA Experiment ID: 20000347 Result: Up-regulated in Transcription
  misc_feature: MA Experiment 20000347 PARAMETER Experiment Name: At_2mM_SA_Sub_P Parameter: Age (day) Value: 14
  misc_feature: MA Experiment 20000347 PARAMETER Experiment Name: At_2mM_SA_Sub_P Parameter: Organism Value: A. thaliana
  misc_feature: MA Experiment 20000347 PARAMETER Experiment Name: At_2mM_SA_Sub_P Parameter: Plant Line Value: WS
  misc_feature: MA Experiment 20000347 PARAMETER Experiment Name: At_2mM_SA_Sub_P Parameter: Timepoint (hr) Value: 6
  misc_feature: MA Experiment 20000347 PARAMETER Experiment Name: At_2mM_SA_Sub_P Parameter: Tissue Value: Aerial
  misc_feature: MA Experiment 20000347 PARAMETER Experiment Name: At_2mM_SA_Sub_P Parameter: Treatment Value: 2mM SA vs. No Treatment
  misc_feature: MA Experiment ID: 20000348 Result: Up-regulated in Transcription
  misc_feature: MA Experiment 20000348 PARAMETER Experiment Name: At_100uM_ABA_Sub_P Parameter: Age (day) Value: 14
  misc_feature: MA Experiment 20000348 PARAMETER Experiment Name: At_100uM_ABA_Sub_P Parameter: Organism Value: A. thaliana
  misc_feature: MA Experiment 20000348 PARAMETER Experiment Name: At_100uM_ABA_Sub_P Parameter: Plant Line Value: WS
  misc_feature: MA Experiment 20000348 PARAMETER Experiment Name: At_100uM_ABA_Sub_P Parameter: Timepoint (hr) Value: 1
  misc_feature: MA Experiment 20000348 PARAMETER Experiment Name: At_100uM_ABA_Sub_P Parameter: Tissue Value: Aerial
  misc_feature: MA Experiment 20000348 PARAMETER Experiment Name: At_100uM_ABA_Sub_P Parameter: Treatment Value: 100uM ABA vs. No Treatment
atgagtgacctccaagcaaacaaagatgagacgactgtggatagacagtcttcctcgtcggtggatcttgatgggccatctccgctgagaaagatgatatcggtggcttctattgctgccggtattcagtttggttgggctcttcaactgtctctgcttactccatacgtgcagcttcttggagtcccacacaaatggccatctttcatttggctttgcggtcctgtctccggcttgcttgtccagccatcagtcggttacttcagcgaccgatgcacgtcaagattcggacgtcgtcgtcctttcatcgccacgggtgctttgctggtcgctgtttctgttgtactaatcggatatgcggctgatttcggccacagcatgggagacaaaatcgacaaacctgtcaagatgcgagccgttgttatcttcgctctcgggttctggatccttgacgtggctaacaacactctccaaggaccatgccgtgcttttcttggtgatttagcagctggagacgctcagaaaacgcgaacggcaaacgcgtttttctctttcttcatggccgttggaaacgttttgggatatgcggcaggatcgtacactaacctctacaagatcttccctttcacaatgactaaagcgtgcgacatatattgcgcaaatctcaagagttgtttcttcctttccatcactctcctcctagtcgtcaccatcatagctctatggtacgtggaagacaagcaatggtcgcctaaggcagactccgacaacgagaaaactccgttcttcggtgagatctttggagctttcaaggtaatgaaacgtccaatgtggatgctactaatcgtcacggccttgaactggatcgcatggttcccttttcttttatacgatactgattggatgggtcgtgaagtgtatggtggagactcaaaaggagatgacaaaatgaagaaactatacaaccaaggaattcatgttggtgcattgggattgatgcttaactctatcgttcttggagtcatgtcacttggtattgaaggtattagtaggaagatgggaggagctaaaaggctttggggagctgtgaatattattctcgccgtgtgtttggcaatgacggttttggttactaaaaaggcggaggagcaccggagaatcgccggtccaatggcccttcctaccgatggcatcagagctggagcattgactctctttgctcttcttggaattcctcttgctattacattcagtattccgttcgcactagcttctataatatcaagcagctccggcgccggtcaaagactttctctaggagttttaaacatggcaattgtcataccacaaatgattgtatcgtttggagttggtcctattgatgcgttatttggagatggaaacttaccaggatttgtggtcggagctattgcagcggcagtcagcagtattgtggcatttaccgttttaccttaa

SEQ ID NO: 90027 - protein, 491 aa, Arabidopsis thaliana
  peptide (1)..(491): Ceres Seq. ID no. 12721838
  misc_feature (32)..(467): Pfam Name: Sugar (and other) transporter Pfam Description: Sugar (and other) transporter
  misc_feature (1)..(491): Homolog of NCBI NO: 15219686 NR Description: sucrose-proton symporter, putative; protein id:
  misc_feature (1)..(491): Homolog of NCBI NO: 15225986 NR Description: putative sucrose-proton symporter; protein id:
  misc_feature (1)..(491): Homolog of NCBI NO: 15239921 NR Description: sucrose transporter protein; protein id: [Arabidopsis thaliana] >gi|10178200|dbj|BAB11624.1| sucrose
  misc_feature (1)..(491): Homolog of NCBI NO: 15239949 NR Description: sucrose transporter protein; protein id: [Arabidopsis thaliana] >gi|9759315|dbj|BAB09682.1| sucrose
  misc_feature (8)..(491): Homolog of NCBI NO: 18091779 NR Description: sucrose transporter SUC1 [Brassica oleracea]
  misc_feature (8)..(491): Homolog of NCBI NO: 15217601 NR Description: sucrose transport protein SUC1; protein id: supported by cDNA: gi_15146267 [Arabidopsis thaliana]
  misc_feature (5)..(491): Homolog of NCBI NO: 12057172 NR Description: sucrose trasporter [Arabidopsis thaliana]
  misc_feature (5)..(491): Homolog of NCBI NO: 15217602 NR Description: putative sucrose transport protein; protein id: [Arabidopsis thaliana] >gi|25344713|pir||F96741 probable sucrose
  misc_feature (22)..(491): Homolog of NCBI NO: 15219938 NR Description: putative sucrose transport protein, SUC2; protein At1g22710.1, supported by cDNA: 7894., supported by cDNA: supported by cDNA: gi_15293104, supported by cDNA: gi_20147212,
  misc_feature (22)..(491): Homolog of NCBI NO: 18091781 NR Description: sucrose transporter SUC2 [Brassica oleracea]
MSDLQANKDETTVDRQSSSSVDLDGPSPLRKMISVASIAAGIQFGWALQLSLLTPYVQLLGVPHKWPSFIWLCGPVSGLLVQPSVGYFSDRCTSRFGRRRPFIATGALLVAVSVVLIGYAADFGHSMGDKIDKPVKMRAVVIFALGFWILDVANNTLQGPCRAFLGDLAAGDAQKTRTANAFFSFFMAVGNVLGYAAGSYTNLYKIFPFTMTKACDIYCANLKSCFFLSITLLLVVTIIALWYVEDKQWSPKADSDNEKTPFFGEIFGAFKVMKRPMWMLLIVTALNWIAWFPFLLYDTDWMGREVYGGDSKGDDKMKKLYNQGIHVGALGLMLNSIVLGVMSLGIEGISRKMGGAKRLWGAVNIILAVCLAMTVLVTKKAEEHRRIAGPMALPTDGIRAGALTLFALLGIPLAITFSIPFALASIISSSSGAGQRLSLGVLNMAIVIPQMIVSFGVGPIDALFGDGNLPGFVVGAIAAAVSSIVAFTVLP

SEQ ID NO: 90028 - protein, 460 aa, Arabidopsis thaliana
  peptide (1)..(460): Ceres Seq. ID no. 12721839
  misc_feature (1)..(436): Pfam Name: Sugar (and other) transporter Pfam Description: Sugar (and other) transporter
  misc_feature (1)..(460): Homolog of NCBI NO: 15219686 NR Description: sucrose-proton symporter, putative; protein id:
  misc_feature (1)..(460): Homolog of NCBI NO: 15225986 NR Description: putative sucrose-proton symporter; protein id:
  misc_feature (1)..(460): Homolog of NCBI NO: 15239921 NR Description: sucrose transporter protein; protein id: [Arabidopsis thaliana] >gi|10178200|dbj|BAB11624.1| sucrose
  misc_feature (1)..(460): Homolog of NCBI NO: 15239949 NR Description: sucrose transporter protein; protein id: [Arabidopsis thaliana] >gi|9759315|dbj|BAB09682.1| sucrose
  misc_feature (1)..(460): Homolog of NCBI NO: 18091779 NR Description: sucrose transporter SUC1 [Brassica oleracea]
  misc_feature (1)..(460): Homolog of NCBI NO: 15217601 NR Description: sucrose transport protein SUC1; protein id: supported by cDNA: gi_15146267 [Arabidopsis thaliana]
  misc_feature (1)..(460): Homolog of NCBI NO: 12057172 NR Description: sucrose trasporter [Arabidopsis thaliana]
  misc_feature (1)..(460): Homolog of NCBI NO: 15217602 NR Description: putative sucrose transport protein; protein id: [Arabidopsis thaliana] >gi|25344713|pir||F96741 probable sucrose
  misc_feature (1)..(460): Homolog of NCBI NO: 15219938 NR Description: putative sucrose transport protein, SUC2; protein At1g22710.1, supported by cDNA: 7894., supported by cDNA: supported by cDNA: gi_15293104, supported by cDNA: gi_20147212,
  misc_feature (1)..(460): Homolog of NCBI NO: 18091781 NR Description: sucrose transporter SUC2 [Brassica oleracea]
MISVASIAAGIQFGWALQLSLLTPYVQLLGVPHKWPSFIWLCGPVSGLLVQPSVGYFSDRCTSRFGRRRPFIATGALLVAVSVVLIGYAADFGHSMGDKIDKPVKMRAVVIFALGFWILDVANNTLQGPCRAFLGDLAAGDAQKTRTANAFFSFFMAVGNVLGYAAGSYTNLYKIFPFTMTKACDIYCANLKSCFFLSITLLLVVTIIALWYVEDKQWSPKADSDNEKTPFFGEIFGAFKVMKRPMWMLLIVTALNWIAWFPFLLYDTDWMGREVYGGDSKGDDKMKKLYNQGIHVGALGLMLNSIVLGVMSLGIEGISRKMGGAKRLWGAVNIILAVCLAMTVLVTKKAEEHRRIAGPMALPTDGIRAGALTLFALLGIPLAITFSIPFALASIISSSSGAGQRLSLGVLNMAIVIPQMIVSFGVGPIDALFGDGNLPGFVVGAIAAAVSSIVAFTVLP

SEQ ID NO: 90029 - protein, 365 aa, Arabidopsis thaliana
  peptide (1)..(365): Ceres Seq. ID no. 12721840
  misc_feature (1)..(341): Pfam Name: Sugar (and other) transporter Pfam Description: Sugar (and other) transporter
  misc_feature (1)..(365): Homolog of NCBI NO: 15219686 NR Description: sucrose-proton symporter, putative; protein id:
  misc_feature (1)..(365): Homolog of NCBI NO: 15225986 NR Description: putative sucrose-proton symporter; protein id:
  misc_feature (1)..(365): Homolog of NCBI NO: 15239921 NR Description: sucrose transporter protein; protein id: [Arabidopsis thaliana] >gi|10178200|dbj|BAB11624.1| sucrose
  misc_feature (1)..(365): Homolog of NCBI NO: 15239949 NR Description: sucrose transporter protein; protein id: [Arabidopsis thaliana] >gi|9759315|dbj|BAB09682.1| sucrose
  misc_feature (1)..(365): Homolog of NCBI NO: 18091779 NR Description: sucrose transporter SUC1 [Brassica oleracea]
  misc_feature (1)..(365): Homolog of NCBI NO: 15217601 NR Description: sucrose transport protein SUC1; protein id: supported by cDNA: gi_15146267 [Arabidopsis thaliana]
  misc_feature (1)..(365): Homolog of NCBI NO: 12057172 NR Description: sucrose trasporter [Arabidopsis thaliana]
  misc_feature (1)..(365): Homolog of NCBI NO: 15217602 NR Description: putative sucrose transport protein; protein id: [Arabidopsis thaliana] >gi|25344713|pir||F96741 probable sucrose
  misc_feature (1)..(365): Homolog of NCBI NO: 15219938 NR Description: putative sucrose transport protein, SUC2; protein At1g22710.1, supported by cDNA: 7894., supported by cDNA: supported by cDNA: gi_15293104, supported by cDNA: gi_20147212,
  misc_feature (1)..(365): Homolog of NCBI NO: 18091781 NR Description: sucrose transporter SUC2 [Brassica oleracea]
MGDKIDKPVKMRAVVIFALGFWILDVANNTLQGPCRAFLGDLAAGDAQKTRTANAFFSFFMAVGNVLGYAAGSYTNLYKIFPFTMTKACDIYCANLKSCFFLSITLLLVVTIIALWYVEDKQWSPKADSDNEKTPFFGEIFGAFKVMKRPMWMLLIVTALNWIAWFPFLLYDTDWMGREVYGGDSKGDDKMKKLYNQGIHVGALGLMLNSIVLGVMSLGIEGISRKMGGAKRLWGAVNIILAVCLAMTVLVTKKAEEHRRIAGPMALPTDGIRAGALTLFALLGIPLAITFSIPFALASIISSSSGAGQRLSLGVLNMAIVIPQMIVSFGVGPIDALFGDGNLPGFVVGAIAAAVSSIVAFTVLP

SEQ ID NO: 90030 - DNA, 726 bp, Arabidopsis thaliana
  misc_feature (1)..(726): Ceres Seq. ID no. 12721845
  misc_feature: MA Experiment ID: 20000315 Result: Down-regulated in Transcription
  misc_feature: MA Experiment 20000315 PARAMETER Experiment Name: At_14day_Shoots-Roots_Sub_P Parameter: Age (day) Value: 14
  misc_feature: MA Experiment 20000315 PARAMETER Experiment Name: At_14day_Shoots-Roots_Sub_P Parameter: Organism Value: A. thaliana
  misc_feature: MA Experiment 20000315 PARAMETER Experiment Name: At_14day_Shoots-Roots_Sub_P Parameter: Plant Line Value: WS
  misc_feature: MA Experiment 20000315 PARAMETER Experiment Name: At_14day_Shoots-Roots_Sub_P Parameter: Tissue Value: Shoots vs. Whole Plant
  misc_feature: MA Experiment ID: 20000347 Result: Up-regulated in Transcription
  misc_feature: MA Experiment 20000347 PARAMETER Experiment Name: At_2mM_SA_Sub_P Parameter: Age (day) Value: 14
  misc_feature: MA Experiment 20000347 PARAMETER Experiment Name: At_2mM_SA_Sub_P Parameter: Organism Value: A. thaliana
  misc_feature: MA Experiment 20000347 PARAMETER Experiment Name: At_2mM_SA_Sub_P Parameter: Plant Line Value: WS
  misc_feature: MA Experiment 20000347 PARAMETER Experiment Name: At_2mM_SA_Sub_P Parameter: Timepoint (hr) Value: 6
  misc_feature: MA Experiment 20000347 PARAMETER Experiment Name: At_2mM_SA_Sub_P Parameter: Tissue Value: Aerial
  misc_feature: MA Experiment 20000347 PARAMETER Experiment Name: At_2mM_SA_Sub_P Parameter: Treatment Value: 2mM SA vs. No Treatment
  misc_feature: MA Experiment ID: 20000440 Result: Down-regulated in Transcription
  misc_feature: MA Experiment 20000440 PARAMETER Experiment Name: At_Closed-Flower__Sub_P Parameter: Tissue Value: Closed Flower vs. Whole Plant
atgttttcaaacatcgatcacaaggctgtggcagcactccttcatggccagggatgcgctaacatcctcaagacggtcctcgacaactgtaaagttagctctgtttcaacagaacctctcattaacaccattcttgattccttttcactagctctatcttctgtgaattctcctaatcgtcaaccacaccatgagtcttcttctcgagacatggcaggtcttgtgcctcaaagatcatcaaagaagaagatttgcggagtaaaaggtttagagatttacagagatgattcccccaatccccgccttgatgacggcttcacctggaggaaatatggacaaaaaaccatcaaaacctctttgtaccaaaggtgttactatcgttgtgcctatgcaaaagaccaaaactgctatgctacaaagcgggtgcagatgatccaagacagtcctccagtttacagaaccacttatttgggacaacatacatgtaaagcctttggggtgcatgataatacgtatggctctgaaatgataaacttcgaccaagttgtatctgaatcggttatgcgtcaacttgcaacaattggtgaacaagctgttctcatggaggacgaagctaaccatatcatgaaccaagaatatgatattaatgattatttggtggatgatgaagtcttttgggggaatgaatttcctctattttcatcggaagacctgatgttgttttga

SEQ ID NO: 90031 - protein, 241 aa, Arabidopsis thaliana
  peptide (1)..(241): Ceres Seq. ID no. 12721846
  misc_feature (102)..(164): Pfam Name: WRKY DNA -binding domain Pfam Description: WRKY DNA -binding domain
  misc_feature (1)..(241): Homolog of NCBI NO: 15219706 NR Description: hypothetical protein; protein id: At1g66600.1, by cDNA: gi_17980953 [Arabidopsis thaliana]
  misc_feature (1)..(241): Homolog of NCBI NO: 15219685 NR Description: WRKY family transcription factor; protein id: supported by cDNA: gi_18252118 [Arabidopsis thaliana]
  misc_feature (1)..(239): Homolog of NCBI NO: 25404630 NR Description: probable wrky-type DNA binding protein F28G11.3
  misc_feature (1)..(239): Homolog of NCBI NO: 18408541 NR Description: WRKY family transcription factor; protein id: supported by cDNA: gi_15991731 [Arabidopsis thaliana]
  misc_feature (67)..(231): Homolog of NCBI NO: 15220174 NR Description: WRKY family transcription factor; protein id: [Arabidopsis thaliana] >gi|25406675|pir||A96838 hypothetical
  misc_feature (1)..(163): Homolog of NCBI NO: 30688540 NR Description: WRKY family transcription factor [Arabidopsis >gi|29839548|sp|Q8GWF1|WR38_ARATH Probable WRKY transcription
  misc_feature (4)..(163): Homolog of NCBI NO: 9758663 NR Description: contains similarity to DNA-binding [Arabidopsis thaliana] >gi|17064162|gb|AAL35288.1|AF442395_1 WRKY
  misc_feature (3)..(189): Homolog of NCBI NO: 13506735 NR Description: WRKY DNA-binding protein 62 [Arabidopsis thaliana]
  misc_feature (3)..(189): Homolog of NCBI NO: 30679452 NR Description: WRKY family transcription factor [Arabidopsis >gi|29839652|sp|Q9LZV6|WR62_ARATH Probable WRKY transcription
  misc_feature (13)..(189): Homolog of NCBI NO: 11358138 NR Description: hypothetical protein T20L15.170 - Arabidopsis >gi|7329663|emb|CAB82760.1| putative protein [Arabidopsis
MFSNIDHKAVAALLHGQGCANILKTVLDNCKVSSVSTEPLINTILDSFSLALSSVNSPNRQPHHESSSRDMAGLVPQRSSKKKICGVKGLEIYRDDSPNPRLDDGFTWRKYGQKTIKTSLYQRCYYRCAYAKDQNCYATKRVQMIQDSPPVYRTTYLGQHTCKAFGVHDNTYGSEMINFDQVVSESVMRQLATIGEQAVLMEDEANHIMNQEYDINDYLVDDEVFWGNEFPLFSSEDLMLF

SEQ ID NO: 90032 - protein, 171 aa, Arabidopsis thaliana
  peptide (1)..(171): Ceres Seq. ID no. 12721847
  misc_feature (32)..(94): Pfam Name: WRKY DNA -binding domain Pfam Description: WRKY DNA -binding domain
  misc_feature (1)..(171): Homolog of NCBI NO: 15219706 NR Description: hypothetical protein; protein id: At1g66600.1, by cDNA: gi_17980953 [Arabidopsis thaliana]
  misc_feature (1)..(171): Homolog of NCBI NO: 15219685 NR Description: WRKY family transcription factor; protein id: supported by cDNA: gi_18252118 [Arabidopsis thaliana]
  misc_feature (1)..(169): Homolog of NCBI NO: 25404630 NR Description: probable wrky-type DNA binding protein F28G11.3
  misc_feature (1)..(169): Homolog of NCBI NO: 18408541 NR Description: WRKY family transcription factor; protein id: supported by cDNA: gi_15991731 [Arabidopsis thaliana]
  misc_feature (1)..(161): Homolog of NCBI NO: 15220174 NR Description: WRKY family transcription factor; protein id: [Arabidopsis thaliana] >gi|25406675|pir||A96838 hypothetical
  misc_feature (1)..(93): Homolog of NCBI NO: 30688540 NR Description: WRKY family transcription factor [Arabidopsis >gi|29839548|sp|Q8GWF1|WR38_ARATH Probable WRKY transcription
  misc_feature (1)..(93): Homolog of NCBI NO: 9758663 NR Description: contains similarity to DNA-binding [Arabidopsis thaliana] >gi|17064162|gb|AAL35288.1|AF442395_1 WRKY
  misc_feature (1)..(119): Homolog of NCBI NO: 13506735 NR Description: WRKY DNA-binding protein 62 [Arabidopsis thaliana]
  misc_feature (1)..(119): Homolog of NCBI NO: 30679452 NR Description: WRKY family transcription factor [Arabidopsis >gi|29839652|sp|Q9LZV6|WR62_ARATH Probable WRKY transcription
  misc_feature (1)..(119): Homolog of NCBI NO: 11358138 NR Description: hypothetical protein T20L15.170 - Arabidopsis >gi|7329663|emb|CAB82760.1| putative protein [Arabidopsis
MAGLVPQRSSKKKICGVKGLEIYRDDSPNPRLDDGFTWRKYGQKTIKTSLYQRCYYRCAYAKDQNCYATKRVQMIQDSPPVYRTTYLGQHTCKAFGVHDNTYGSEMINFDQVVSESVMRQLATIGEQAVLMEDEANHIMNQEYDINDYLVDDEVFWGNEFPLFSSEDLMLF

SEQ ID NO: 90033 - DNA, 1190 bp, Arabidopsis thaliana
  misc_feature (1)..(1190): Ceres Seq. ID no. 12721862
  misc_feature: MA Experiment ID: 108595 Result: Down-regulated in Transcription
  misc_feature: MA Experiment 108595 PARAMETER Experiment Name: At_Ler-pi_Ovule_cDNA_P Parameter: Plant Line Value: null
  misc_feature: MA Experiment ID: 20000184 Result: Down-regulated in Transcription
  misc_feature: MA Experiment 20000184 PARAMETER Experiment Name: At_Shoots__P Parameter: Age (day) Value: 7
  misc_feature: MA Experiment 20000184 PARAMETER Experiment Name: At_Shoots__P Parameter: Tissue Value: Shoots vs. Whole Plant
  misc_feature: MA Experiment ID: 20000185 Result: Down-regulated in Transcription
  misc_feature: MA Experiment 20000185 PARAMETER Experiment Name: At_Roots__P Parameter: Age (day) Value: 7 vs. 21
  misc_feature: MA Experiment 20000185 PARAMETER Experiment Name: At_Roots__P Parameter: Organism Value: A. thaliana
  misc_feature: MA Experiment 20000185 PARAMETER Experiment Name: At_Roots__P Parameter: Tissue Value: Roots vs. Whole Plant
  misc_feature: MA Experiment ID: 20000224 Result: Up-regulated in Transcription
  misc_feature: MA Experiment ID: 20000438 Result: Down-regulated in Transcription
  misc_feature: MA Experiment 20000438 PARAMETER Experiment Name: At_Shoots__P Parameter: Age (day) Value: 14
  misc_feature: MA Experiment 20000438 PARAMETER Experiment Name: At_Shoots__P Parameter: Tissue Value: Shoots vs. Whole Plant
  misc_feature: MA Experiment ID: 20000439 Result: Down-regulated in Transcription
  misc_feature: MA Experiment 20000439 PARAMETER Experiment Name: At_Roots__P Parameter: Age (day) Value: 14 vs. 21
  misc_feature: MA Experiment 20000439 PARAMETER Experiment Name: At_Roots__P Parameter: Organism Value: A. thaliana
  misc_feature: MA Experiment 20000439 PARAMETER Experiment Name: At_Roots__P Parameter: Tissue Value: Roots vs. Whole Plant
  misc_feature: MA Experiment ID: 20001247 Result: Down-regulated in Transcription
  misc_feature: MA Experiment 20001247 PARAMETER Experiment Name: At_Far-red-induction_P Parameter: Age (day) Value: 7
  misc_feature: MA Experiment 20001247 PARAMETER Experiment Name: At_Far-red-induction_P Parameter: Light Value: Far-red vs. White
  misc_feature: MA Experiment 20001247 PARAMETER Experiment Name: At_Far-red-induction_P Parameter: Organism Value: A. thaliana
  misc_feature: MA Experiment 20001247 PARAMETER Experiment Name: At_Far-red-induction_P Parameter: Plant Line Value: Columbia
  misc_feature: MA Experiment 20001247 PARAMETER Experiment Name: At_Far-red-induction_P Parameter: Timepoint (hr) Value: 1
  misc_feature: MA Experiment 20001247 PARAMETER Experiment Name: At_Far-red-induction_P Parameter: Tissue Value: Whole Plant
ctctttagcaaaaaatctcagaactcaaaaaaaaaacatccaacaccaaagacaatggagatgagtttgcgtctcgcttcatcttcaacctcaaacccaatttgtctactaaaccctggaaaaaaccttaatttcccaatccgaaaccatagaatccctaaaacttcgaaacccttttgcgttaggtcttcaatgagcttgtctaaaccacccagacaaaccttatctagtaactgggatgtatctagcttctccattgattccgttgctcaatctccttcaagactcccaagtttcgaagaactcgataccaccaacatgttgctccgtcaaagaatcgtctttttgggttctcaggttgatgatatgacggcggatttggttataagtcagctattgttactagatgctgaggactcagaaagagacattacgctttttatcaattcacccggtggatctattactgctgggatgggaatatatgatgcaatgaaacaatgtaaggcggatgtatctactgtttgcttagggttagctgcatctatgggtgcgtttcttcttgcttctggttcaaaagggaaacggtattgtatgcctaactctaaagttatgatccatcagccacttggtactgctggaggcaaagcaacggaaatgagcatacgtataagagaaatgatgtaccacaagattaaacttaacaaaatcttctctagaatcactgggaagcctgaatcagagatcgaaagtgacacagaccgtgataacttcttgaatccatgggaggcgaaagaatatggtttgatcgacgctgtaatcgatgatgggaaaccgggactaatcgctccaattggagatggtactcctcctcctaaaaccaaagtctgggatctttggaaagtcgaaggaaccaagaaagacaacactaacttgccatctgagcgctccatgacacagaatggttatgccgccattgaatagaactgttgttgcagcgtttacgccttttatatgttattctggtggtacctgtaaccatataacgttgcatttcctgtgtttgtaccatttctctgatagatttttggaataatttgaaggcaaaagatagattatttgttgtagaagaagctacaaaatttaatgattaaattgaatcatcaagccatgagaagctttttgttttc

SEQ ID NO: 90034 - protein, 327 aa, Arabidopsis thaliana; identical to SEQ ID NO: 22751
  peptide (1)..(327): Ceres Seq. ID no. 12721863
  misc_feature (98)..(277): Pfam Name: Clp protease Pfam Description: Clp protease
  misc_feature (19)..(327): Homolog of NCBI NO: 18408572 NR Description: ATP-dependent Clp protease proteolytic subunit protein id: At1g66670.1, supported by cDNA: 34480., supported by gi_13899066, supported by cDNA: gi_18377549, supported by cDNA:
  misc_feature (19)..(327): Homolog of NCBI NO: 13899067 NR Description: ATP-dependent Clp protease; nClpP3 [Arabidopsis
  misc_feature (23)..(327): Homolog of NCBI NO: 25456012 NR Description: probable ATP-dependent clp proteinase (EC
  misc_feature (19)..(327): Homolog of NCBI NO: 15864561 NR Description: ClpP putative protein [Brassica napus]
  misc_feature (19)..(327): Homolog of NCBI NO: 7657879 NR Description: ClpP [Brassica napus var. napus]
  misc_feature (21)..(327): Homolog of NCBI NO: 6069464 NR Description: S-locus protein 2 [Brassica rapa]
  misc_feature (52)..(327): Homolog of NCBI NO: 17028170 NR Description: ClpP [Brassica oleracea]
  misc_feature (61)..(322): Homolog of NCBI NO: 34914540 NR Description: putative ATP-dependent Clp protease [Oryza sativa
  misc_feature (159)..(322): Homolog of NCBI NO: 21449427 NR Description: ATP-dependent Clp protease [Oryza sativa (indica
  misc_feature (4)..(274): Homolog of NCBI NO: 25019682 NR Description: ClpP2 [Synechococcus sp. PCC 7942]

SEQ ID NO: 90035 - protein, 309 aa, Arabidopsis thaliana; identical to SEQ ID NO: 22752
  peptide (1)..(309): Ceres Seq. ID no. 12721864
  misc_feature (80)..(259): Pfam Name: Clp protease Pfam Description: Clp protease
  misc_feature (1)..(309): Homolog of NCBI NO: 18408572 NR Description: ATP-dependent Clp protease proteolytic subunit protein id: At1g66670.1, supported by cDNA: 34480., supported by gi_13899066, supported by cDNA: gi_18377549, supported by cDNA:
  misc_feature (1)..(309): Homolog of NCBI NO: 13899067 NR Description: ATP-dependent Clp protease; nClpP3 [Arabidopsis
  misc_feature (5)..(309): Homolog of NCBI NO: 25456012 NR Description: probable ATP-dependent clp proteinase (EC
  misc_feature (1)..(309): Homolog of NCBI NO: 15864561 NR Description: ClpP putative protein [Brassica napus]
  misc_feature (1)..(309): Homolog of NCBI NO: 7657879 NR Description: ClpP [Brassica napus var. napus]
  misc_feature (3)..(309): Homolog of NCBI NO: 6069464 NR Description: S-locus protein 2 [Brassica rapa]
  misc_feature (34)..(309): Homolog of NCBI NO: 17028170 NR Description: ClpP [Brassica oleracea]
  misc_feature (43)..(304): Homolog of NCBI NO: 34914540 NR Description: putative ATP-dependent Clp protease [Oryza sativa
  misc_feature (141)..(304): Homolog of NCBI NO: 21449427 NR Description: ATP-dependent Clp protease [Oryza sativa (indica
  misc_feature (1)..(256): Homolog of NCBI NO: 25019682 NR Description: ClpP2 [Synechococcus sp. PCC 7942]

SEQ ID NO: 90036 - protein, 307 aa, Arabidopsis thaliana; identical to SEQ ID NO: 22753
  peptide (1)..(307): Ceres Seq. ID no. 12721865
  misc_feature (78)..(257): Pfam Name: Clp protease Pfam Description: Clp protease
  misc_feature (1)..(307): Homolog of NCBI NO: 18408572 NR Description: ATP-dependent Clp protease proteolytic subunit protein id: At1g66670.1, supported by cDNA: 34480., supported by gi_13899066, supported by cDNA: gi_18377549, supported by cDNA:
  misc_feature (1)..(307): Homolog of NCBI NO: 13899067 NR Description: ATP-dependent Clp protease; nClpP3 [Arabidopsis
  misc_feature (3)..(307): Homolog of NCBI NO: 25456012 NR Description: probable ATP-dependent clp proteinase (EC
  misc_feature (1)..(307): Homolog of NCBI NO: 15864561 NR Description: ClpP putative protein [Brassica napus]
  misc_feature (1)..(307): Homolog of NCBI NO: 7657879 NR Description: ClpP [Brassica napus var. napus]
  misc_feature (1)..(307): Homolog of NCBI NO: 6069464 NR Description: S-locus protein 2 [Brassica rapa]
  misc_feature (32)..(307): Homolog of NCBI NO: 17028170 NR Description: ClpP [Brassica oleracea]
  misc_feature (41)..(302): Homolog of NCBI NO: 34914540 NR Description: putative ATP-dependent Clp protease [Oryza sativa
  misc_feature (139)..(302): Homolog of NCBI NO: 21449427 NR Description: ATP-dependent Clp protease [Oryza sativa (indica
  misc_feature (1)..(254): Homolog of NCBI NO: 25019682 NR Description: ClpP2 [Synechococcus sp. PCC 7942]

SEQ ID NO: 90037 - DNA, 1482 bp, Arabidopsis thaliana
  misc_feature (1)..(1482): Ceres Seq. ID no. 12721920
  misc_feature: MA Experiment ID: 20000166 Result: Up-regulated in Transcription
  misc_feature: MA Experiment 20000166 PARAMETER Experiment Name: At_100uM_ABA_P Parameter: Age (day) Value: 14
  misc_feature: MA Experiment 20000166 PARAMETER Experiment Name: At_100uM_ABA_P Parameter: Organism Value: A. thaliana
  misc_feature: MA Experiment 20000166 PARAMETER Experiment Name: At_100uM_ABA_P Parameter: Plant Line Value: WS
  misc_feature: MA Experiment 20000166 PARAMETER Experiment Name: At_100uM_ABA_P Parameter: Timepoint (hr) Value: 1
  misc_feature: MA Experiment 20000166 PARAMETER Experiment Name: At_100uM_ABA_P Parameter: Tissue Value: Aerial
  misc_feature: MA Experiment 20000166 PARAMETER Experiment Name: At_100uM_ABA_P Parameter: Treatment Value: 100uM ABA vs. No Treatment
  misc_feature: MA Experiment ID: 20000169 Result: Up-regulated in Transcription
  misc_feature: MA Experiment 20000169 PARAMETER Experiment Name: At_100uM_ABA_P Parameter: Age (day) Value: 14
  misc_feature: MA Experiment 20000169 PARAMETER Experiment Name: At_100uM_ABA_P Parameter: Organism Value: A. thaliana
  misc_feature: MA Experiment 20000169 PARAMETER Experiment Name: At_100uM_ABA_P Parameter: Plant Line Value: WS
  misc_feature: MA Experiment 20000169 PARAMETER Experiment Name: At_100uM_ABA_P Parameter: Timepoint (hr) Value: 6
  misc_feature: MA Experiment 20000169 PARAMETER Experiment Name: At_100uM_ABA_P Parameter: Tissue Value: Aerial
  misc_feature: MA Experiment 20000169 PARAMETER Experiment Name: At_100uM_ABA_P Parameter: Treatment Value: 100uM ABA vs. No Treatment
  misc_feature: MA Experiment ID: 20000179 Result: Up-regulated in Transcription
  misc_feature: MA Experiment 20000179 PARAMETER Experiment Name: At_Germinating_Seeds_P Parameter: Age (hr) Value: 6 vs. 0
  misc_feature: MA Experiment 20000179 PARAMETER Experiment Name: At_Germinating_Seeds_P Parameter: Tissue Value: Germinating Seeds
  misc_feature: MA Experiment ID: 20000184 Result: Down-regulated in Transcription
  misc_feature: MA Experiment 20000184 PARAMETER Experiment Name: At_Shoots__P Parameter: Age (day) Value: 7
  misc_feature: MA Experiment 20000184 PARAMETER Experiment Name: At_Shoots__P Parameter: Tissue Value: Shoots vs. Whole Plant
  misc_feature: MA Experiment ID: 20000227 Result: Down-regulated in Transcription
  misc_feature: MA Experiment 20000227 PARAMETER Experiment Name: At_Root-Tips-vs-Tops_P Parameter: Tissue Value: Root Tips vs. Root Tops
  misc_feature: MA Experiment ID: 20000267 Result: Up-regulated in Transcription
  misc_feature: MA Experiment 20000267 PARAMETER Experiment Name: At_Drought_P Parameter: Age (day) Value: 7
  misc_feature: MA Experiment 20000267 PARAMETER Experiment Name: At_Drought_P Parameter: Organism Value: A. thaliana
  misc_feature: MA Experiment 20000267 PARAMETER Experiment Name: At_Drought_P Parameter: Plant Line Value: WS
  misc_feature: MA Experiment 20000267 PARAMETER Experiment Name: At_Drought_P Parameter: Timepoint (hr) Value: 6
  misc_feature: MA Experiment 20000267 PARAMETER Experiment Name: At_Drought_P Parameter: Tissue Value: Whole Plant
  misc_feature: MA Experiment 20000267 PARAMETER Experiment Name: At_Drought_P Parameter: Treatment Value: Drought vs. No Drought
  misc_feature: MA Experiment ID: 20000268 Result: Up-regulated in Transcription
  misc_feature: MA Experiment 20000268 PARAMETER Experiment Name: At_100mM_NaCl__P Parameter: Age (day) Value: 14
  misc_feature: MA Experiment 20000268 PARAMETER Experiment Name: At_100mM_NaCl__P Parameter: Organism Value: A. thaliana
  misc_feature: MA Experiment 20000268 PARAMETER Experiment Name: At_100mM_NaCl__P Parameter: Plant Line Value: WS
  misc_feature: MA Experiment 20000268 PARAMETER Experiment Name: At_100mM_NaCl__P Parameter: Timepoint (hr) Value: 6
  misc_feature: MA Experiment 20000268 PARAMETER Experiment Name: At_100mM_NaCl__P Parameter: Tissue Value: Whole Plant
  misc_feature: MA Experiment 20000268 PARAMETER Experiment Name: At_100mM_NaCl__P Parameter: Treatment Value: 100mM NaCl vs. No Treatment
  misc_feature: MA Experiment ID: 20000436 Result: Up-regulated in Transcription
  misc_feature: MA Experiment 20000436 PARAMETER Experiment Name: At_Drought_P Parameter: Age (day) Value: 7
  misc_feature: MA Experiment 20000436 PARAMETER Experiment Name: At_Drought_P Parameter: Organism Value: A. thaliana
  misc_feature: MA Experiment 20000436 PARAMETER Experiment Name: At_Drought_P Parameter: Plant Line Value: WS
  misc_feature: MA Experiment 20000436 PARAMETER Experiment Name: At_Drought_P Parameter: Timepoint (hr) Value: 12
  misc_feature: MA Experiment 20000436 PARAMETER Experiment Name: At_Drought_P Parameter: Tissue Value: Whole Plant
  misc_feature: MA Experiment 20000436 PARAMETER Experiment Name: At_Drought_P Parameter: Treatment Value: Drought vs. No Drought
  misc_feature: MA Experiment ID: 20000437 Result: Up-regulated in Transcription
  misc_feature: MA Experiment 20000437 PARAMETER Experiment Name: At_Drought_P Parameter: Age (day) Value: 8
  misc_feature: MA Experiment 20000437 PARAMETER Experiment Name: At_Drought_P Parameter: Organism Value: A. thaliana
  misc_feature: MA Experiment 20000437 PARAMETER Experiment Name: At_Drought_P Parameter: Plant Line Value: WS
  misc_feature: MA Experiment 20000437 PARAMETER Experiment Name: At_Drought_P Parameter: Timepoint (hr) Value: 24
  misc_feature: MA Experiment 20000437 PARAMETER Experiment Name: At_Drought_P Parameter: Tissue Value: Whole Plant
  misc_feature: MA Experiment 20000437 PARAMETER Experiment Name: At_Drought_P Parameter: Treatment Value: Drought vs. No Drought
  misc_feature: MA Experiment ID: 20000453 Result: Up-regulated in Transcription
  misc_feature: MA Experiment 20000453 PARAMETER Experiment Name: At_100uM_ABA_P Parameter: Age (day) Value: 15
  misc_feature: MA Experiment 20000453 PARAMETER Experiment Name: At_100uM_ABA_P Parameter: Organism Value: A. thaliana
  misc_feature: MA Experiment 20000453 PARAMETER Experiment Name: At_100uM_ABA_P Parameter: Plant Line Value: WS
  misc_feature: MA Experiment 20000453 PARAMETER Experiment Name: At_100uM_ABA_P Parameter: Timepoint (hr) Value: 24
  misc_feature: MA Experiment 20000453 PARAMETER Experiment Name: At_100uM_ABA_P Parameter: Tissue Value: Aerial
  misc_feature: MA Experiment 20000453 PARAMETER Experiment Name: At_100uM_ABA_P Parameter: Treatment Value: 100uM ABA vs. No Treatment
  misc_feature: MA Experiment ID: 20001554 Result: Up-regulated in Transcription
  misc_feature: MA Experiment 20001554 PARAMETER Experiment Name: At_Drought_Soil_Dry_P Parameter: Age (day) Value: 21
  misc_feature: MA Experiment 20001554 PARAMETER Experiment Name: At_Drought_Soil_Dry_P Parameter: Organism Value: A. thaliana
  misc_feature: MA Experiment 20001554 PARAMETER Experiment Name: At_Drought_Soil_Dry_P Parameter: Plant Line Value: WS
  misc_feature: MA Experiment 20001554 PARAMETER Experiment Name: At_Drought_Soil_Dry_P Parameter: Post Timepoint (hr) Value: None
  misc_feature: MA Experiment 20001554 PARAMETER Experiment Name: At_Drought_Soil_Dry_P Parameter: Post-Treatment Value: None
  misc_feature: MA Experiment 20001554 PARAMETER Experiment Name: At_Drought_Soil_Dry_P Parameter: Timepoint (day) Value: 7
  misc_feature: MA Experiment 20001554 PARAMETER Experiment Name: At_Drought_Soil_Dry_P Parameter: Treatment Value: Drought vs. No Drought
  misc_feature: MA Experiment ID: 20001555 Result: Up-regulated in Transcription
  misc_feature: MA Experiment 20001555 PARAMETER Experiment Name: At_Drought_Soil_Dry_P Parameter: Age (day) Value: 24
  misc_feature: MA Experiment 20001555 PARAMETER Experiment Name: At_Drought_Soil_Dry_P Parameter: Organism Value: A. thaliana
  misc_feature: MA Experiment 20001555 PARAMETER Experiment Name: At_Drought_Soil_Dry_P Parameter: Plant Line Value: WS
  misc_feature: MA Experiment 20001555 PARAMETER Experiment Name: At_Drought_Soil_Dry_P Parameter: Post Timepoint (hr) Value: None
  misc_feature: MA Experiment 20001555 PARAMETER Experiment Name: At_Drought_Soil_Dry_P Parameter: Post-Treatment Value: None
  misc_feature: MA Experiment 20001555 PARAMETER Experiment Name: At_Drought_Soil_Dry_P Parameter: Timepoint (day) Value: 10
  misc_feature: MA Experiment 20001555 PARAMETER Experiment Name: At_Drought_Soil_Dry_P Parameter: Treatment Value: Drought vs. No Drought
  misc_feature: MA Experiment ID: 20001556 Result: Up-regulated in Transcription
  misc_feature: MA Experiment 20001556 PARAMETER Experiment Name: At_Drought_Soil_Dry_P Parameter: Age (day) Value: 26
  misc_feature: MA Experiment 20001556 PARAMETER Experiment Name: At_Drought_Soil_Dry_P Parameter: Organism Value: A. thaliana
  misc_feature: MA Experiment 20001556 PARAMETER Experiment Name: At_Drought_Soil_Dry_P Parameter: Plant Line Value: WS
  misc_feature: MA Experiment 20001556 PARAMETER Experiment Name: At_Drought_Soil_Dry_P Parameter: Post Timepoint (hr) Value: None
  misc_feature: MA Experiment 20001556 PARAMETER Experiment Name: At_Drought_Soil_Dry_P Parameter: Post-Treatment Value: None
  misc_feature: MA Experiment 20001556 PARAMETER Experiment Name: At_Drought_Soil_Dry_P Parameter: Timepoint (day) Value: 12
  misc_feature: MA Experiment 20001556 PARAMETER Experiment Name: At_Drought_Soil_Dry_P Parameter: Treatment Value: Drought vs. No Drought
  misc_feature: MA Experiment ID: 20001558 Result: Down-regulated in Transcription
  misc_feature: MA Experiment 20001558 PARAMETER Experiment Name: At_Drought_Soil_Dry_P Parameter: Age (day) Value: 27
  misc_feature: MA Experiment 20001558 PARAMETER Experiment Name: At_Drought_Soil_Dry_P Parameter: Organism Value: A. thaliana
  misc_feature: MA Experiment 20001558 PARAMETER Experiment Name: At_Drought_Soil_Dry_P Parameter: Plant Line Value: WS
  misc_feature: MA Experiment 20001558 PARAMETER Experiment Name: At_Drought_Soil_Dry_P Parameter: Post Timepoint (hr) Value: 6
  misc_feature: MA Experiment 20001558 PARAMETER Experiment Name: At_Drought_Soil_Dry_P Parameter: Post-Treatment Value: Re-Water vs. No Drought
  misc_feature: MA Experiment 20001558 PARAMETER Experiment Name: At_Drought_Soil_Dry_P Parameter: Timepoint (day) Value: 13
  misc_feature: MA Experiment 20001558 PARAMETER Experiment Name: At_Drought_Soil_Dry_P Parameter: Treatment Value: Drought vs. No Drought
  misc_feature: MA Experiment ID: 20001904 Result: Up-regulated in Transcription
  misc_feature: MA Experiment 20001904 PARAMETER Experiment Name: At_Drought_Reproduction_P Parameter: Age (day) Value: 37
  misc_feature: MA Experiment 20001904 PARAMETER Experiment Name: At_Drought_Reproduction_P Parameter: Organism Value: A. thaliana
  misc_feature: MA Experiment 20001904 PARAMETER Experiment Name: At_Drought_Reproduction_P Parameter: Plant Line Value: WS
  misc_feature: MA Experiment 20001904 PARAMETER Experiment Name: At_Drought_Reproduction_P Parameter: Timepoint (day) Value: 7
  misc_feature: MA Experiment 20001904 PARAMETER Experiment Name: At_Drought_Reproduction_P Parameter: Tissue Value: Rosettes
  misc_feature: MA Experiment 20001904 PARAMETER Experiment Name: At_Drought_Reproduction_P Parameter: Treatment Value: Drought vs. No Drought
  misc_feature: MA Experiment ID: 20001905 Result: Up-regulated in Transcription
  misc_feature: MA Experiment 20001905 PARAMETER Experiment Name: At_Drought_Reproduction_P Parameter: Age (day) Value: 40
  misc_feature: MA Experiment 20001905 PARAMETER Experiment Name: At_Drought_Reproduction_P Parameter: Organism Value: A. thaliana
  misc_feature: MA Experiment 20001905 PARAMETER Experiment Name: At_Drought_Reproduction_P Parameter: Plant Line Value: WS
  misc_feature: MA Experiment 20001905 PARAMETER Experiment Name: At_Drought_Reproduction_P Parameter: Timepoint (day) Value: 10
  misc_feature: MA Experiment 20001905 PARAMETER Experiment Name: At_Drought_Reproduction_P Parameter: Tissue Value: Rosettes
  misc_feature: MA Experiment 20001905 PARAMETER Experiment Name: At_Drought_Reproduction_P Parameter: Treatment Value: Drought vs. No Drought
  misc_feature: MA Experiment ID: 20001911 Result: Up-regulated in Transcription
  misc_feature: MA Experiment 20001911 PARAMETER Experiment Name: At_Drought_Reproduction_P Parameter: Age (day) Value: 40
  misc_feature: MA Experiment 20001911 PARAMETER Experiment Name: At_Drought_Reproduction_P Parameter: Organism Value: A. thaliana
  misc_feature: MA Experiment 20001911 PARAMETER Experiment Name: At_Drought_Reproduction_P Parameter: Plant Line Value: WS
  misc_feature: MA Experiment 20001911 PARAMETER Experiment Name: At_Drought_Reproduction_P Parameter: Timepoint (day) Value: 10
  misc_feature: MA Experiment 20001911 PARAMETER Experiment Name: At_Drought_Reproduction_P Parameter: Tissue Value: Flowers
  misc_feature: MA Experiment 20001911 PARAMETER Experiment Name: At_Drought_Reproduction_P Parameter: Treatment Value: Drought vs. No Drought
atgttgggattgcaacgagaaacatcctcgatgtataagagaacgtcatcgagagattattctccgatgatcgacgtcgaagacagctcaggtcttttagagaatgatgtggacaatgaaatggaaactacaaatccttcatggaagtgttctcttccgcatgttctagtggctacaatttcgtcgtttctatttggttaccatttaggagttgttaatgaacctcttgaaagcatttcgtctgatcttggttttagtggtgatacattagctgaaggtttggtggttagtgtatgtcttggtggtgcatttctcggatctttattcagtgggggagttgctgatgggtttggaagacggagagcttttcagatttgtgctttgcctatgattttgggtgcttttgtgagtggagttagcaacagcttagctgtaatgcttttgggaagattcttggttgggactggcatgggtcttggaccacctgtggcagcactctatgtgacagaggtatcaccagcttttgttaggggaacatatggaagcttcatacagatagctacatgtctgggactgatggcagctctgtttatagggatcccagtccataacatcacgggttggtggcgtgtctgtttctggctttcaacgatacctgctgcactactcgctctgggaatgttcctctgtgctgagtctccacagtggctattcaagcaagggaagatagctgaagcagaagctgagtttgagaggctgcttggagggtctcatgtgaaaacagcaatggcagaattatacaaactagatctagacaagacggatgaaccagatgttgtgagcctctctgagctgttatatggtcggcattcaagagttgtttttattggatcaaccctgtttgctttgcaacagctatctggtataaatgctgttttttatttctcttctaccgtattcaaaagtgctggagtaccatcggacctaggcaacatatttgttggagtttcaaacctcttgggatctgtaatcgcgatggtgttgatggataaagtaggaagaaagcttcttctgctttggagttttattggcatggcagcagcaatggcacttcaagttggtgctacaagttcatacttaccacatttttcggcgttgtgtttgtctgtcggtggcactcttgtgtttgtgctaacattcgccttaggagctggtccagtaccaggtttactcctccctgagatcttcccaagtcgaatcagagcaaaagcgatggctttctgcatgtctgtgcattgggtgataaatttctttgtgggtttactctttctgagattgcttgagaagcttggtcctcggctactatattcgatgttttctacgttctgtttaatggcggtgatgttcgtgaagcggaacgtgattgaaaccaaaggaaaaacacttcaagagattgagatttctctactagccaaaccatga

SEQ ID NO: 90038 - protein, 493 aa, Arabidopsis thaliana
  peptide (1)..(493): Ceres Seq. ID no. 12721921
  misc_feature (54)..(489): Pfam Name: Sugar (and other) transporter Pfam Description: Sugar (and other) transporter
  misc_feature (1)..(493): Homolog of NCBI NO: 15220399 NR Description: integral membrane protein, putative; protein id:
  misc_feature (1)..(490): Homolog of NCBI NO: 27261731 NR Description: sugar transporter [Citrus unshiu]
  misc_feature (13)..(491): Homolog of NCBI NO: 30699453 NR Description: hexose transporter, putative [Arabidopsis >gi|30699455|ref|NP_178100.3| hexose transporter, putative
  misc_feature (61)..(491): Homolog of NCBI NO: 25308946 NR Description: probable sugar transporter, 77409-81599 - Arabidopsis thaliana >gi|12324590|gb|AAG52251.1|AC011717_19
  misc_feature (61)..(491): Homolog of NCBI NO: 7715596 NR Description: F20B17.24 [Arabidopsis thaliana]
  misc_feature (130)..(491): Homolog of NCBI NO: 19347894 NR Description: putative hexose transporter protein [Arabidopsis
  misc_feature (52)..(489): Homolog of NCBI NO: 8347246 NR Description: hexose transporter [Solanum tuberosum]
  misc_feature (52)..(489): Homolog of NCBI NO: 9858106 NR Description: putative glucose translocator [Mesembryanthemum
  misc_feature (52)..(489): Homolog of NCBI NO: 8347242 NR Description: hexose transporter [Spinacia oleracea]
  misc_feature (2)..(489): Homolog of NCBI NO: 8347244 NR Description: hexose transporter [Nicotiana tabacum]
MLGLQRETSSMYKRTSSRDYSPMIDVEDSSGLLENDVDNEMETTNPSWKCSLPHVLVATISSFLFGYHLGVVNEPLESISSDLGFSGDTLAEGLVVSVCLGGAFLGSLFSGGVADGFGRRRAFQICALPMILGAFVSGVSNSLAVMLLGRFLVGTGMGLGPPVAALYVTEVSPAFVRGTYGSFIQIATCLGLMAALFIGIPVHNITGWWRVCFWLSTIPAALLALGMFLCAESPQWLFKQGKIAEAEAEFERLLGGSHVKTAMAELYKLDLDKTDEPDVVSLSELLYGRHSRVVFIGSTLFALQQLSGINAVFYFSSTVFKSAGVPSDLGNIFVGVSNLLGSVIAMVLMDKVGRKLLLLWSFIGMAAAMALQVGATSSYLPHFSALCLSVGGTLVFVLTFALGAGPVPGLLLPEIFPSRIRAKAMAFCMSVHWVINFFVGLLFLRLLEKLGPRLLYSMFSTFCLMAVMFVKRNVIETKGKTLQEIEISLLAKP

SEQ ID NO: 90039 - protein, 483 aa, Arabidopsis thaliana
  peptide (1)..(483): Ceres Seq. ID no. 12721922
  misc_feature (44)..(479): Pfam Name: Sugar (and other) transporter Pfam Description: Sugar (and other) transporter
  misc_feature (1)..(483): Homolog of NCBI NO: 15220399 NR Description: integral membrane protein, putative; protein id:
  misc_feature (1)..(480): Homolog of NCBI NO: 27261731 NR Description: sugar transporter [Citrus unshiu]
  misc_feature (3)..(481): Homolog of NCBI NO: 30699453 NR Description: hexose transporter, putative [Arabidopsis >gi|30699455|ref|NP_178100.3| hexose transporter, putative
  misc_feature (51)..(481): Homolog of NCBI NO: 25308946 NR Description: probable sugar transporter, 77409-81599 - Arabidopsis thaliana >gi|12324590|gb|AAG52251.1|AC011717_19
  misc_feature (51)..(481): Homolog of NCBI NO: 7715596 NR Description: F20B17.24 [Arabidopsis thaliana]
  misc_feature (120)..(481): Homolog of NCBI NO: 19347894 NR Description: putative hexose transporter protein [Arabidopsis
  misc_feature (42)..(479): Homolog of NCBI NO: 8347246 NR Description: hexose transporter [Solanum tuberosum]
  misc_feature (42)..(479): Homolog of NCBI NO: 9858106 NR Description: putative glucose translocator [Mesembryanthemum
  misc_feature (42)..(479): Homolog of NCBI NO: 8347242 NR Description: hexose transporter [Spinacia oleracea]
  misc_feature (1)..(479): Homolog of NCBI NO: 8347244 NR Description: hexose transporter [Nicotiana tabacum]
MYKRTSSRDYSPMIDVEDSSGLLENDVDNEMETTNPSWKCSLPHVLVATISSFLFGYHLGVVNEPLESISSDLGFSGDTLAEGLVVSVCLGGAFLGSLFSGGVADGFGRRRAFQICALPMILGAFVSGVSNSLAVMLLGRFLVGTGMGLGPPVAALYVTEVSPAFVRGTYGSFIQIATCLGLMAALFIGIPVHNITGWWRVCFWLSTIPAALLALGMFLCAESPQWLFKQGKIAEAEAEFERLLGGSHVKTAMAELYKLDLDKTDEPDVVSLSELLYGRHSRVVFIGSTLFALQQLSGINAVFYFSSTVFKSAGVPSDLGNIFVGVSNLLGSVIAMVLMDKVGRKLLLLWSFIGMAAAMALQVGATSSYLPHFSALCLSVGGTLVFVLTFALGAGPVPGLLLPEIFPSRIRAKAMAFCMSVHWVINFFVGLLFLRLLEKLGPRLLYSMFSTFCLMAVMFVKRNVIETKGKTLQEIEISLLAKP

SEQ ID NO: 90040 - protein, 471 aa, Arabidopsis thaliana
  peptide (1)..(471): Ceres Seq. ID no. 12721923
  misc_feature (32)..(467): Pfam Name: Sugar (and other) transporter Pfam Description: Sugar (and other) transporter
  misc_feature (1)..(471): Homolog of NCBI NO: 15220399 NR Description: integral membrane protein, putative; protein id:
  misc_feature (1)..(468): Homolog of NCBI NO: 27261731 NR Description: sugar transporter [Citrus unshiu]
  misc_feature (1)..(469): Homolog of NCBI NO: 30699453 NR Description: hexose transporter, putative [Arabidopsis >gi|30699455|ref|NP_178100.3| hexose transporter, putative
  misc_feature (39)..(469): Homolog of NCBI NO: 25308946 NR Description: probable sugar transporter, 77409-81599 - Arabidopsis thaliana >gi|12324590|gb|AAG52251.1|AC011717_19
  misc_feature (39)..(469): Homolog of NCBI NO: 7715596 NR Description: F20B17.24 [Arabidopsis thaliana]
  misc_feature (108)..(469): Homolog of NCBI NO: 19347894 NR Description: putative hexose transporter protein [Arabidopsis
  misc_feature (30)..(467): Homolog of NCBI NO: 8347246 NR Description: hexose transporter [Solanum tuberosum]
  misc_feature (30)..(467): Homolog of NCBI NO: 9858106 NR Description: putative glucose translocator [Mesembryanthemum
  misc_feature (30)..(467): Homolog of NCBI NO: 8347242 NR Description: hexose transporter [Spinacia oleracea]
  misc_feature (1)..(467): Homolog of NCBI NO: 8347244 NR Description: hexose transporter [Nicotiana tabacum]
MIDVEDSSGLLENDVDNEMETTNPSWKCSLPHVLVATISSFLFGYHLGVVNEPLESISSDLGFSGDTLAEGLVVSVCLGGAFLGSLFSGGVADGFGRRRAFQICALPMILGAFVSGVSNSLAVMLLGRFLVGTGMGLGPPVAALYVTEVSPAFVRGTYGSFIQIATCLGLMAALFIGIPVHNITGWWRVCFWLSTIPAALLALGMFLCAESPQWLFKQGKIAEAEAEFERLLGGSHVKTAMAELYKLDLDKTDEPDVVSLSELLYGRHSRVVFIGSTLFALQQLSGINAVFYFSSTVFKSAGVPSDLGNIFVGVSNLLGSVIAMVLMDKVGRKLLLLWSFIGMAAAMALQVGATSSYLPHFSALCLSVGGTLVFVLTFALGAGPVPGLLLPEIFPSRIRAKAMAFCMSVHWVINFFVGLLFLRLLEKLGPRLLYSMFSTFCLMAVMFVKRNVIETKGKTLQEIEISLLAKP

SEQ ID NO: 90041 - DNA, 2061 bp, Arabidopsis thaliana
  misc_feature (1)..(2061): Ceres Seq. ID no. 12721956
  misc_feature: MA Experiment ID: 20000234 Result: Up-regulated in Transcription
  misc_feature: MA Experiment 20000234 PARAMETER Experiment Name: At_Siliques_P Parameter: Age (day) Value: 21
  misc_feature: MA Experiment 20000234 PARAMETER Experiment Name: At_Siliques_P Parameter: Organism Value: A. thaliana
  misc_feature: MA Experiment 20000234 PARAMETER Experiment Name: At_Siliques_P Parameter: Plant Line Value: WS
  misc_feature: MA Experiment 20000234 PARAMETER Experiment Name: At_Siliques_P Parameter: Tissue Value: Less Than 5mm Siliques vs. Whole Plant
  misc_feature: MA Experiment ID: 20000439 Result: Up-regulated in Transcription
  misc_feature: MA Experiment 20000439 PARAMETER Experiment Name: At_Roots__P Parameter: Age (day) Value: 14 vs. 21
  misc_feature: MA Experiment 20000439 PARAMETER Experiment Name: At_Roots__P Parameter: Organism Value: A. thaliana
  misc_feature: MA Experiment 20000439 PARAMETER Experiment Name: At_Roots__P Parameter: Tissue Value: Roots vs. Whole Plant
atgggttgtatttgctcaaaaggagtacgtactaatgatgattacatagagacgaatcatgtaagtattggtaaagagaatcctaaagcttctaagaaacaatctgattcagaggaaactagtgttaatggaaacgaagctacattgaggttaatacctgatgatgtcaaggacactttctctgatgaggaagtggaggagctggaggagaagaaagagagtagctttgagatgaaatcttgtgaatctgtgttgcaaaaaggaaatgttttggagatagttgataatgtaggaccgttgcagcctaggatgagtaggattggtagtgttagtaatggagatagagcagctaaagttattgctggttggccttcatggttagtttcagttgctggtgaagctattaatggatggattcctcgtagtgctgattcgttcgagaagttggagatgattgggcaggggacgtatagtagtgtgtacagagctcgtgatctcgaaacaaaccagattgttgcacttaagaaggttcggtttgctaatatggatcctgagagtgtgaggtttatggcaagagaaattatcattctacgtaggcttaaccatccaaacgttatgaaactcgaagggctgatcatttcaaaagcttcgggaagtatgtatcttatatttgaatatatggatcatgatctcgcaggccttgcttcgacccctgggattaagttctctcaggcacagcaattgttgcttgggttagaacattgccatagttgtggtgtgttgcaccgtgacatcaagtgctcaaatcttctgcttgatcgtaacaataatctcaagattggtgattttggtctttctaatttttaccggggccaacgaaagcagcctctgactagccgtgttgtgacattgtggtaccgcccacctgaacttctgcttgggtcaactgactatggagttacggttgatctatggagcacaggatgcatacttgctgaactctttactggaaagcctcttctacccggaagaaccgaggtagaacaaatgcacaagatctttaaactctgcggatcaccttctgaggagtattggagaagatcacggttgcggcatgcaaccatctttaaacctcaacatccctacaagcgatgtgtagctgatacatttaaggatcttccttcttcagctttggccctccttgaggttcttctagctgtagaaccagatgcacgtggaaccgcatcttcggcccttcaaagcgagttctttacgacaaaaccttttccaagtgagccatcaagtttaccgagatatcagccaaggaaagaatttgatgccaagcttcgagaagaggaagcaagacgacggaaaggttcgagcagtaaacagaatgaacagaagcggttggctagagagtccaaagctgtaccggctcctagtgccaatgccgagttactggcatcaatacagaaacgtctaggggagactaaccggacaagcattagtgagaagtttaatcctgagggagattctggcaatggcttccggatcgaaccactgaagggcaataccgcacaaaatccctacccaatctacacaaacggagacaaccatcctaacggatcaagccaactgagaacacaaaggtcctatgtccaacgcgggtctggccaattgtcaagattctcaaactcaatggcacctactagagatggatcacagtttggaagtatgagagacgctatagtgaaccaacgctggcttgaagatggttcagagaatttcaatttgtcccaaagattgttggagaaacctaatggtattaggaaagatgacccttcatcctctagcaaagagtcaataatgggctatgatggtgagaagagagggaggattcagtactcaggaccattgattccaggagaaggaaacttggatgaaatgttgaaagaacatgaaagacagatcttgttggctgtacgacgagctcaagccgataaggctaagagagacgataaccgacaggctcaaaccttgtttccagctaatggaaggtga

SEQ ID NO: 90042 - protein, 686 aa, Arabidopsis thaliana
  peptide (1)..(686): Ceres Seq. ID no. 12721957
  misc_feature (146)..(424): Pfam Name: Protein kinase domain Pfam Description: Protein kinase domain
  misc_feature (25)..(686): Homolog of NCBI NO: 15217565 NR Description: putative protein kinase; protein id: At1g09600.1
  misc_feature (25)..(686): Homolog of NCBI NO: 25402555 NR Description: hypothetical protein [imported] - Arabidopsis >gi|3482933|gb|AAC33218.1| Similar to cdc2 protein kinases
  misc_feature (1)..(670): Homolog of NCBI NO: 15219169 NR Description: cell division-related protein, putative; protein At1g53050.1 [Arabidopsis thaliana] >gi|25405618|pir||A96571
  misc_feature (1)..(670): Homolog of NCBI NO: 28393523 NR Description: putative cell division-related protein
  misc_feature (99)..(585): Homolog of NCBI NO: 15217521 NR Description: putative protein kinase; protein id: At1g71530.1
  misc_feature (629)..(679): Homolog of NCBI NO: 15217521 NR Description: putative protein kinase; protein id: At1g71530.1
  misc_feature (118)..(681): Homolog of NCBI NO: 34903662 NR Description: putative CRK1 protein [Oryza sativa (japonica group)] >gi|20804521|dbj|BAB92215.1| putative CRK1 protein [Oryza
  misc_feature (1)..(541): Homolog of NCBI NO: 7488162 NR Description: probable protein kinase T5L19.140 (EC 2.7.1.-) - thaliana >gi|4539004|emb|CAB39625.1| putative protein kinase thaliana] >gi|7267697|emb|CAB78124.1| putative protein kinase
  misc_feature (555)..(675): Homolog of NCBI NO: 7488162 NR Description: probable protein kinase T5L19.140 (EC 2.7.1.-) - thaliana >gi|4539004|emb|CAB39625.1| putative protein kinase thaliana] >gi|7267697|emb|CAB78124.1| putative protein kinase
  misc_feature (1)..(524): Homolog of NCBI NO: 15217643 NR Description: protein kinase, putative; protein id: At1g33770.1
MGCICSKGVRTNDDYIETNHVSIGKENPKASKKQSDSEETSVNGNEATLRLIPDDVKDTFSDEEVEELEEKKESSFEMKSCESVLQKGNVLEIVDNVGPLQPRMSRIGSVSNGDRAAKVIAGWPSWLVSVAGEAINGWIPRSADSFEKLEMIGQGTYSSVYRARDLETNQIVALKKVRFANMDPESVRFMAREIIILRRLNHPNVMKLEGLIISKASGSMYLIFEYMDHDLAGLASTPGIKFSQAQQLLLGLEHCHSCGVLHRDIKCSNLLLDRNNNLKIGDFGLSNFYRGQRKQPLTSRVVTLWYRPPELLLGSTDYGVTVDLWSTGCILAELFTGKPLLPGRTEVEQMHKIFKLCGSPSEEYWRRSRLRHATIFKPQHPYKRCVADTFKDLPSSALALLEVLLAVEPDARGTASSALQSEFFTTKPFPSEPSSLPRYQPRKEFDAKLREEEARRRKGSSSKQNEQKRLARESKAVPAPSANAELLASIQKRLGETNRTSISEKFNPEGDSGNGFRIEPLKGNTAQNPYPIYTNGDNHPNGSSQLRTQRSYVQRGSGQLSRFSNSMAPTRDGSQFGSMRDAIVNQRWLEDGSENFNLSQRLLEKPNGIRKDDPSSSSKESIMGYDGEKRGRIQYSGPLIPGEGNLDEMLKEHERQILLAVRRAQADKAKRDDNRQAQTLFPANGR

SEQ ID NO: 90043 - protein, 609 aa, Arabidopsis thaliana
  peptide (1)..(609): Ceres Seq. ID no. 12721958
  misc_feature (69)..(347): Pfam Name: Protein kinase domain Pfam Description: Protein kinase domain
  misc_feature (1)..(609): Homolog of NCBI NO: 15217565 NR Description: putative protein kinase; protein id: At1g09600.1
  misc_feature (1)..(609): Homolog of NCBI NO: 25402555 NR Description: hypothetical protein [imported] - Arabidopsis >gi|3482933|gb|AAC33218.1| Similar to cdc2 protein kinases
  misc_feature (1)..(593): Homolog of NCBI NO: 15219169 NR Description: cell division-related protein, putative; protein At1g53050.1 [Arabidopsis thaliana] >gi|25405618|pir||A96571
  misc_feature (1)..(593): Homolog of NCBI NO: 28393523 NR Description: putative cell division-related protein
  misc_feature (22)..(508): Homolog of NCBI NO: 15217521 NR Description: putative protein kinase; protein id: At1g71530.1
  misc_feature (552)..(602): Homolog of NCBI NO: 15217521 NR Description: putative protein kinase; protein id: At1g71530.1
  misc_feature (41)..(604): Homolog of NCBI NO: 34903662 NR Description: putative CRK1 protein [Oryza sativa (japonica group)] >gi|20804521|dbj|BAB92215.1| putative CRK1 protein [Oryza
  misc_feature (1)..(464): Homolog of NCBI NO: 7488162 NR Description: probable protein kinase T5L19.140 (EC 2.7.1.-) - thaliana >gi|4539004|emb|CAB39625.1| putative protein kinase thaliana] >gi|7267697|emb|CAB78124.1| putative protein kinase
  misc_feature (478)..(598): Homolog of NCBI NO: 7488162 NR Description: probable protein kinase T5L19.140 (EC 2.7.1.-) - thaliana >gi|4539004|emb|CAB39625.1| putative protein kinase thaliana] >gi|7267697|emb|CAB78124.1| putative protein kinase
  misc_feature (1)..(447): Homolog of NCBI NO: 15217643 NR Description: protein kinase, putative; protein id: At1g33770.1
MKSCESVLQKGNVLEIVDNVGPLQPRMSRIGSVSNGDRAAKVIAGWPSWLVSVAGEAINGWIPRSADSFEKLEMIGQGTYSSVYRARDLETNQIVALKKVRFANMDPESVRFMAREIIILRRLNHPNVMKLEGLIISKASGSMYLIFEYMDHDLAGLASTPGIKFSQAQQLLLGLEHCHSCGVLHRDIKCSNLLLDRNNNLKIGDFGLSNFYRGQRKQPLTSRVVTLWYRPPELLLGSTDYGVTVDLWSTGCILAELFTGKPLLPGRTEVEQMHKIFKLCGSPSEEYWRRSRLRHATIFKPQHPYKRCVADTFKDLPSSALALLEVLLAVEPDARGTASSALQSEFFTTKPFPSEPSSLPRYQPRKEFDAKLREEEARRRKGSSSKQNEQKRLARESKAVPAPSANAELLASIQKRLGETNRTSISEKFNPEGDSGNGFRIEPLKGNTAQNPYPIYTNGDNHPNGSSQLRTQRSYVQRGSGQLSRFSNSMAPTRDGSQFGSMRDAIVNQRWLEDGSENFNLSQRLLEKPNGIRKDDPSSSSKESIMGYDGEKRGRIQYSGPLIPGEGNLDEMLKEHERQILLAVRRAQADKAKRDDNRQAQTLFPANGR

SEQ ID NO: 90044 - protein, 583 aa, Arabidopsis thaliana
  peptide (1)..(583): Ceres Seq. ID no. 12721959
  misc_feature (43)..(321): Pfam Name: Protein kinase domain Pfam Description: Protein kinase domain
  misc_feature (1)..(583): Homolog of NCBI NO: 15217565 NR Description: putative protein kinase; protein id: At1g09600.1
  misc_feature (1)..(583): Homolog of NCBI NO: 25402555 NR Description: hypothetical protein [imported] - Arabidopsis >gi|3482933|gb|AAC33218.1| Similar to cdc2 protein kinases
  misc_feature (1)..(567): Homolog of NCBI NO: 15219169 NR Description: cell division-related protein, putative; protein At1g53050.1 [Arabidopsis thaliana] >gi|25405618|pir||A96571
  misc_feature (1)..(567): Homolog of NCBI NO: 28393523 NR Description: putative cell division-related protein
  misc_feature (1)..(482): Homolog of NCBI NO: 15217521 NR Description: putative protein kinase; protein id: At1g71530.1
  misc_feature (526)..(576): Homolog of NCBI NO: 15217521 NR Description: putative protein kinase; protein id: At1g71530.1
  misc_feature (15)..(578): Homolog of NCBI NO: 34903662 NR Description: putative CRK1 protein [Oryza sativa (japonica group)] >gi|20804521|dbj|BAB92215.1| putative CRK1 protein [Oryza
  misc_feature (1)..(438): Homolog of NCBI NO: 7488162 NR Description: probable protein kinase T5L19.140 (EC 2.7.1.-) - thaliana >gi|4539004|emb|CAB39625.1| putative protein kinase thaliana] >gi|7267697|emb|CAB78124.1| putative protein kinase
  misc_feature (452)..(572): Homolog of NCBI NO: 7488162 NR Description: probable protein kinase T5L19.140 (EC 2.7.1.-) - thaliana >gi|4539004|emb|CAB39625.1| putative protein kinase thaliana] >gi|7267697|emb|CAB78124.1| putative protein kinase
  misc_feature (1)..(421): Homolog of NCBI NO: 15217643 NR Description: protein kinase, putative; protein id: At1g33770.1
MSRIGSVSNGDRAAKVIAGWPSWLVSVAGEAINGWIPRSADSFEKLEMIGQGTYSSVYRARDLETNQIVALKKVRFANMDPESVRFMAREIIILRRLNHPNVMKLEGLIISKASGSMYLIFEYMDHDLAGLASTPGIKFSQAQQLLLGLEHCHSCGVLHRDIKCSNLLLDRNNNLKIGDFGLSNFYRGQRKQPLTSRVVTLWYRPPELLLGSTDYGVTVDLWSTGCILAELFTGKPLLPGRTEVEQMHKIFKLCGSPSEEYWRRSRLRHATIFKPQHPYKRCVADTFKDLPSSALALLEVLLAVEPDARGTASSALQSEFFTTKPFPSEPSSLPRYQPRKEFDAKLREEEARRRKGSSSKQNEQKRLARESKAVPAPSANAELLASIQKRLGETNRTSISEKFNPEGDSGNGFRIEPLKGNTAQNPYPIYTNGDNHPNGSSQLRTQRSYVQRGSGQLSRFSNSMAPTRDGSQFGSMRDAIVNQRWLEDGSENFNLSQRLLEKPNGIRKDDPSSSSKESIMGYDGEKRGRIQYSGPLIPGEGNLDEMLKEHERQILLAVRRAQADKAKRDDNRQAQTLFPANGR

SEQ ID NO: 90045 - DNA, 1649 bp, Arabidopsis thaliana
  misc_feature (1)..(1649): Ceres Seq. ID no. 12721960
  misc_feature: MA Experiment ID: 108434 Result: Up-regulated in Transcription
  misc_feature: MA Experiment 108434 PARAMETER Experiment Name: At_Root_Tips_cDNA_P Parameter: Tissue Value: Root Tips
  misc_feature: MA Experiment ID: 108462 Result: Down-regulated in Transcription
  misc_feature: MA Experiment 108462 PARAMETER Experiment Name: At_Germinating_Seeds_cDNA_P Parameter: Age (day) Value: 2 vs. 0
  misc_feature: MA Experiment 108462 PARAMETER Experiment Name: At_Germinating_Seeds_cDNA_P Parameter: Tissue Value: Germinating Seeds
  misc_feature: MA Experiment ID: 108463 Result: Down-regulated in Transcription
  misc_feature: MA Experiment 108463 PARAMETER Experiment Name: At_Germinating_Seeds_cDNA_P Parameter: Age (day) Value: 3 vs. 0
  misc_feature: MA Experiment 108463 PARAMETER Experiment Name: At_Germinating_Seeds_cDNA_P Parameter: Tissue Value: Germinating Seeds
  misc_feature: MA Experiment ID: 108464 Result: Down-regulated in Transcription
  misc_feature: MA Experiment 108464 PARAMETER Experiment Name: At_Germinating_Seeds_cDNA_P Parameter: Age (day) Value: 4 vs. 0
  misc_feature: MA Experiment 108464 PARAMETER Experiment Name: At_Germinating_Seeds_cDNA_P Parameter: Tissue Value: Germinating Seeds
  misc_feature: MA Experiment ID: 20000111 Result: Up-regulated in Transcription
  misc_feature: MA Experiment 20000111 PARAMETER Experiment Name: At_42deg_Heat_cDNA_P Parameter: Temperature (deg C) Value: 42 vs. 22
  misc_feature: MA Experiment 20000111 PARAMETER Experiment Name: At_42deg_Heat_cDNA_P Parameter: Timepoint (hr) Value: 6
  misc_feature: MA Experiment 20000111 PARAMETER Experiment Name: At_42deg_Heat_cDNA_P Parameter: Tissue Value: Aerial
  misc_feature: MA Experiment ID: 20000227 Result: Up-regulated in Transcription
  misc_feature: MA Experiment 20000227 PARAMETER Experiment Name: At_Root-Tips-vs-Tops_P Parameter: Tissue Value: Root Tips vs. Root Tops
  misc_feature: MA Experiment ID: 20000794 Result: Down-regulated in Transcription
  misc_feature: MA Experiment 20000794 PARAMETER Experiment Name: At_Petals_P Parameter: Age (day) Value: 23-25 days
  misc_feature: MA Experiment 20000794 PARAMETER Experiment Name: At_Petals_P Parameter: Plant Line Value: WS
  misc_feature: MA Experiment 20000794 PARAMETER Experiment Name: At_Petals_P Parameter: Tissue Value: Petals vs. Whole plant
  misc_feature: MA Experiment ID: 20001558 Result: Up-regulated in Transcription
  misc_feature: MA Experiment 20001558 PARAMETER Experiment Name: At_Drought_Soil_Dry_P Parameter: Age (day) Value: 27
  misc_feature: MA Experiment 20001558 PARAMETER Experiment Name: At_Drought_Soil_Dry_P Parameter: Organism Value: A. thaliana
  misc_feature: MA Experiment 20001558 PARAMETER Experiment Name: At_Drought_Soil_Dry_P Parameter: Plant Line Value: WS
  misc_feature: MA Experiment 20001558 PARAMETER Experiment Name: At_Drought_Soil_Dry_P Parameter: Post Timepoint (hr) Value: 6
  misc_feature: MA Experiment 20001558 PARAMETER Experiment Name: At_Drought_Soil_Dry_P Parameter: Post-Treatment Value: Re-Water vs. No Drought
  misc_feature: MA Experiment 20001558 PARAMETER Experiment Name: At_Drought_Soil_Dry_P Parameter: Timepoint (day) Value: 13
  misc_feature: MA Experiment 20001558 PARAMETER Experiment Name: At_Drought_Soil_Dry_P Parameter: Treatment Value: Drought vs. No Drought
  misc_feature: MA Experiment ID: 20001559 Result: Up-regulated in Transcription
  misc_feature: MA Experiment 20001559 PARAMETER Experiment Name: At_Drought_Soil_Dry_P Parameter: Age (day) Value: 28
  misc_feature: MA Experiment 20001559 PARAMETER Experiment Name: At_Drought_Soil_Dry_P Parameter: Organism Value: A. thaliana
  misc_feature: MA Experiment 20001559 PARAMETER Experiment Name: At_Drought_Soil_Dry_P Parameter: Plant Line Value: WS
  misc_feature: MA Experiment 20001559 PARAMETER Experiment Name: At_Drought_Soil_Dry_P Parameter: Post Timepoint (hr) Value: 29
  misc_feature: MA Experiment 20001559 PARAMETER Experiment Name: At_Drought_Soil_Dry_P Parameter: Post-Treatment Value: Re-Water vs. No Drought
  misc_feature: MA Experiment 20001559 PARAMETER Experiment Name: At_Drought_Soil_Dry_P Parameter: Timepoint (day) Value: 14
  misc_feature: MA Experiment 20001559 PARAMETER Experiment Name: At_Drought_Soil_Dry_P Parameter: Treatment Value: Drought vs. No Drought
  misc_feature: MA Experiment ID: 20001905 Result: Down-regulated in Transcription
  misc_feature: MA Experiment 20001905 PARAMETER Experiment Name: At_Drought_Reproduction_P Parameter: Age (day) Value: 40
  misc_feature: MA Experiment 20001905 PARAMETER Experiment Name: At_Drought_Reproduction_P Parameter: Organism Value: A. thaliana
  misc_feature: MA Experiment 20001905 PARAMETER Experiment Name: At_Drought_Reproduction_P Parameter: Plant Line Value: WS
  misc_feature: MA Experiment 20001905 PARAMETER Experiment Name: At_Drought_Reproduction_P Parameter: Timepoint (day) Value: 10
  misc_feature: MA Experiment 20001905 PARAMETER Experiment Name: At_Drought_Reproduction_P Parameter: Tissue Value: Rosettes
  misc_feature: MA Experiment 20001905 PARAMETER Experiment Name: At_Drought_Reproduction_P Parameter: Treatment Value: Drought vs. No Drought
aatttccacactctaatactatttctcgccgccgcttttgtatcttcttctctctcgctttgctctctcggaattgtttttgcagaaagtctctcatctgaactcagaaaatctccgagttcgtatatcttctccgtttgagcaatggcgttggtcatgcacacatacaagggaaacaaaggtgccaataaggcacttattgctgcagagtatgcgggtgtgaagatcgaggagtccgcagactttcagatgggcgtcactaacaagtcacctgagttccttaagatgaaccctattggaaaggttcctgtgcttgagactcctgaaggtcccatatttgagagcaatgccattgcccgatatgtgagccgtaagaatggtgacaactctttgaatggatcctcccttattgaatacgctcacattgagcaatggatcgatttctcctcattggagattgatgctaacatgttgaagtggtttgctccaagaatgggctatgctcccttctctgccccagctgaggaagcggcaatttctgcattgaagagaggacttgaggctctgaacacacatctcgcctccaacactttccttgttggacactctgtcacccttgctgatattgtcacaatctgcaacttgaacttgggatttgccaccgtgatgaccaagaaatttacctctgcattccctcatgttgagagatacttctggacaatggttaaccagccagaattcaagaaggtgttgggtgatgccaaacaaaccgaagctgtccctccagttcctactaagaaagctccacagcctgctaagcccaaggaggagcccaagaaggcagcccctgtagcagaggcaccaaagcctgctgaggaggaggaagcaccaaagcctaaagccaagaatcctcttgacttgctaccaccaagcccaatggttctcgatgactggaagaggctttactcgaacaccaaatccaacttccgtgaggttgctatcaaaggattctgggacatgtatgacccggaggggtactcactatggttctgtgactataagtacaacgatgagaacatggtctcctttgttacactcaacaaggtaggagggttccttcagcgtatggacttggcacgtaaatactcctttggaaagatgcttatttgcgggtcagagggtcctttcaaggtgaagggtttatggcttttccgtggaccagagatccccaagttcataatggatgaggtgtacgacatggagctgtacgagtggactaaggttgatatctccgatgaagcacagaaggagcgtgttagccagatgattgaagacgctgagccatttgaaggcgaggctcttttggacgccaaatgctttaagtgaaaaggctctttgtatctccgtagaggtttactctgttactcgtgttttgataccttctagagagtccttaccaccttttgaatcgtactcgggtttaagaactagttgcttctcaatgttattttgacagaatattgttcttaaatacattacaacttctagttattgtttttattttgttttttattatccaaactcgtgtgtgtgacattctctctttaaattagttgcttggaagatgcaaagaatctcgtttaatgggg

SEQ ID NO: 90046 - protein, 413 aa, Arabidopsis thaliana; identical to SEQ ID NO: 42171
  peptide (1)..(413): Ceres Seq. ID no. 12721961
  misc_feature (252)..(360): Pfam Name: Elongation factor 1 gamma, conserved domain Pfam Description: Elongation factor 1 gamma, conserved domain
  misc_feature (1)..(413): Homolog of NCBI NO: 15223649 NR Description: elongation factor 1B-gamma, putative (eEF-1B protein id: At1g57720.1, supported by cDNA: 141963., supported by gi_13877602, supported by cDNA: gi_14334817, supported by cDNA:
  misc_feature (1)..(413): Homolog of NCBI NO: 14334818 NR Description: putative elongation factor 1B gamma [Arabidopsis
  misc_feature (1)..(413): Homolog of NCBI NO: 18391048 NR Description: elongation factor 1B-gamma, putative (eEF-1B protein id: At1g09640.1, supported by cDNA: 39525. [Arabidopsis >gi|13626364|sp|O04487|EF1G_ARATH Probable elongation factor
  misc_feature (1)..(413): Homolog of NCBI NO: 13626515 NR Description: Elongation factor 1-gamma (EF-1-gamma) (eEF-1B >gi|3868758|dbj|BAA34206.1| elongation factor 1B gamma [Oryza
  misc_feature (10)..(413): Homolog of NCBI NO: 29367403 NR Description: elongation factor 1 gamma-like protein [Oryza
  misc_feature (1)..(413): Homolog of NCBI NO: 13626392 NR Description: Elongation factor 1-gamma (EF-1-gamma) (eEF-1B
  misc_feature (70)..(413): Homolog of NCBI NO: 19423960 NR Description: unknown protein [Arabidopsis thaliana]

SEQ ID NO: 90047 - protein, 409 aa, Arabidopsis thaliana; identical to SEQ ID NO: 42172
  peptide (1)..(409): Ceres Seq. ID no. 12721962
  misc_feature (248)..(356): Pfam Name: Elongation factor 1 gamma, conserved domain Pfam Description: Elongation factor 1 gamma, conserved domain
  misc_feature (1)..(409): Homolog of NCBI NO: 15223649 NR Description: elongation factor 1B-gamma, putative (eEF-1B protein id: At1g57720.1, supported by cDNA: 141963., supported by gi_13877602, supported by cDNA: gi_14334817, supported by cDNA:
  misc_feature (1)..(409): Homolog of NCBI NO: 14334818 NR Description: putative elongation factor 1B gamma [Arabidopsis
  misc_feature (1)..(409): Homolog of NCBI NO: 18391048 NR Description: elongation factor 1B-gamma, putative (eEF-1B protein id: At1g09640.1, supported by cDNA: 39525. [Arabidopsis >gi|13626364|sp|O04487|EF1G_ARATH Probable elongation factor
  misc_feature (1)..(409): Homolog of NCBI NO: 13626515 NR Description: Elongation factor 1-gamma (EF-1-gamma) (eEF-1B >gi|3868758|dbj|BAA34206.1| elongation factor 1B gamma [Oryza
  misc_feature (6)..(409): Homolog of NCBI NO: 29367403 NR Description: elongation factor 1 gamma-like protein [Oryza
  misc_feature (1)..(409): Homolog of NCBI NO: 13626392 NR Description: Elongation factor 1-gamma (EF-1-gamma) (eEF-1B
  misc_feature (66)..(409): Homolog of NCBI NO: 19423960 NR Description: unknown protein [Arabidopsis thaliana]

SEQ ID NO: 90048 - protein, 378 aa, Arabidopsis thaliana; identical to SEQ ID NO: 42173
  peptide (1)..(378): Ceres Seq. ID no. 12721963
  misc_feature (217)..(325): Pfam Name: Elongation factor 1 gamma, conserved domain Pfam Description: Elongation factor 1 gamma, conserved domain
  misc_feature (1)..(378): Homolog of NCBI NO: 15223649 NR Description: elongation factor 1B-gamma, putative (eEF-1B protein id: At1g57720.1, supported by cDNA: 141963., supported by gi_13877602, supported by cDNA: gi_14334817, supported by cDNA:
  misc_feature (1)..(378): Homolog of NCBI NO: 14334818 NR Description: putative elongation factor 1B gamma [Arabidopsis
  misc_feature (1)..(378): Homolog of NCBI NO: 18391048 NR Description: elongation factor 1B-gamma, putative (eEF-1B protein id: At1g09640.1, supported by cDNA: 39525. [Arabidopsis >gi|13626364|sp|O04487|EF1G_ARATH Probable elongation factor
  misc_feature (1)..(378): Homolog of NCBI NO: 13626515 NR Description: Elongation factor 1-gamma (EF-1-gamma) (eEF-1B >gi|3868758|dbj|BAA34206.1| elongation factor 1B gamma [Oryza
  misc_feature (1)..(378): Homolog of NCBI NO: 29367403 NR Description: elongation factor 1 gamma-like protein [Oryza
  misc_feature (1)..(378): Homolog of NCBI NO: 13626392 NR Description: Elongation factor 1-gamma (EF-1-gamma) (eEF-1B
  misc_feature (35)..(378): Homolog of NCBI NO: 19423960 NR Description: unknown protein [Arabidopsis thaliana]

SEQ ID NO: 90049 - DNA, 1045 bp, Arabidopsis thaliana
  misc_feature (1)..(1045): Ceres Seq. ID no. 12722002
  misc_feature: MA Experiment ID: 20000180 Result: Up-regulated in Transcription
  misc_feature: MA Experiment 20000180 PARAMETER Experiment Name: At_Germinating_Seeds_P Parameter: Age (hr) Value: 24 vs. 0
  misc_feature: MA Experiment 20000180 PARAMETER Experiment Name: At_Germinating_Seeds_P Parameter: Tissue Value: Germinating Seeds
  misc_feature: MA Experiment ID: 20000185 Result: Up-regulated in Transcription
  misc_feature: MA Experiment 20000185 PARAMETER Experiment Name: At_Roots__P Parameter: Age (day) Value: 7 vs. 21
  misc_feature: MA Experiment 20000185 PARAMETER Experiment Name: At_Roots__P Parameter: Organism Value: A. thaliana
  misc_feature: MA Experiment 20000185 PARAMETER Experiment Name: At_Roots__P Parameter: Tissue Value: Roots vs. Whole Plant
  misc_feature: MA Experiment ID: 20000265 Result: Down-regulated in Transcription
  misc_feature: MA Experiment 20000265 PARAMETER Experiment Name: At_Open_Flower_P Parameter: Age (day) Value: 21
  misc_feature: MA Experiment 20000265 PARAMETER Experiment Name: At_Open_Flower_P Parameter: Plant Line Value: WS
  misc_feature: MA Experiment 20000265 PARAMETER Experiment Name: At_Open_Flower_P Parameter: Tissue Value: Closed Flower vs. Whole Plant
  misc_feature: MA Experiment ID: 20000286 Result: Down-regulated in Transcription
  misc_feature: MA Experiment 20000286 PARAMETER Experiment Name: At_Open_Flower_P Parameter: Age (day) Value: 21
  misc_feature: MA Experiment 20000286 PARAMETER Experiment Name: At_Open_Flower_P Parameter: Plant Line Value: WS
  misc_feature: MA Experiment 20000286 PARAMETER Experiment Name: At_Open_Flower_P Parameter: Tissue Value: Half Open vs. Whole Plant
  misc_feature: MA Experiment ID: 20000439 Result: Up-regulated in Transcription
  misc_feature: MA Experiment 20000439 PARAMETER Experiment Name: At_Roots__P Parameter: Age (day) Value: 14 vs. 21
  misc_feature: MA Experiment 20000439 PARAMETER Experiment Name: At_Roots__P Parameter: Organism Value: A. thaliana
  misc_feature: MA Experiment 20000439 PARAMETER Experiment Name: At_Roots__P Parameter: Tissue Value: Roots vs. Whole Plant
  misc_feature: MA Experiment ID: 20000495 Result: Down-regulated in Transcription
  misc_feature: MA Experiment 20000495 PARAMETER Experiment Name: At_Guard_Cells_P Parameter: Harvest Date Value: 8/2/2002
  misc_feature: MA Experiment 20000495 PARAMETER Experiment Name: At_Guard_Cells_P Parameter: Organism Value: A. thaliana
  misc_feature: MA Experiment 20000495 PARAMETER Experiment Name: At_Guard_Cells_P Parameter: Tissue Value: Guard Cells vs. Leaves
  misc_feature: MA Experiment ID: 20000496 Result: Down-regulated in Transcription
  misc_feature: MA Experiment 20000496 PARAMETER Experiment Name: At_Guard_Cells_P Parameter: Harvest Date Value: 7/19/2002
  misc_feature: MA Experiment 20000496 PARAMETER Experiment Name: At_Guard_Cells_P Parameter: Organism Value: Canola
  misc_feature: MA Experiment 20000496 PARAMETER Experiment Name: At_Guard_Cells_P Parameter: Tissue Value: Guard Cells vs. Leaves
  misc_feature: MA Experiment ID: 20000527 Result: Down-regulated in Transcription
  misc_feature: MA Experiment 20000527 PARAMETER Experiment Name: At_10percent_PEG_P Parameter: Age (day) Value: 20
  misc_feature: MA Experiment 20000527 PARAMETER Experiment Name: At_10percent_PEG_P Parameter: Organism Value: A. thaliana
  misc_feature: MA Experiment 20000527 PARAMETER Experiment Name: At_10percent_PEG_P Parameter: Plant Line Value: WS
  misc_feature: MA Experiment 20000527 PARAMETER Experiment Name: At_10percent_PEG_P Parameter: Timepoint (day) Value: 20
  misc_feature: MA Experiment 20000527 PARAMETER Experiment Name: At_10percent_PEG_P Parameter: Tissue Value: Whole Plant
  misc_feature: MA Experiment 20000527 PARAMETER Experiment Name: At_10percent_PEG_P Parameter: Treatment Value: 10percent PEG vs. No Treatment
  misc_feature: MA Experiment ID: 20000573 Result: Down-regulated in Transcription
  misc_feature: MA Experiment 20000573 PARAMETER Experiment Name: At_100uM_ABA_Mutants__P Parameter: Organism Value: A. thaliana
  misc_feature: MA Experiment 20000573 PARAMETER Experiment Name: At_100uM_ABA_Mutants__P Parameter: Plant Line Value: CS22 vs. Ler wt
  misc_feature: MA Experiment 20000573 PARAMETER Experiment Name: At_100uM_ABA_Mutants__P Parameter: Timepoint (hr) Value: N/A
  misc_feature: MA Experiment 20000573 PARAMETER Experiment Name: At_100uM_ABA_Mutants__P Parameter: Tissue Value: Whole Plant
  misc_feature: MA Experiment 20000573 PARAMETER Experiment Name: At_100uM_ABA_Mutants__P Parameter: Treatment Value: None
  misc_feature: MA Experiment ID: 20000574 Result: Down-regulated in Transcription
  misc_feature: MA Experiment 20000574 PARAMETER Experiment Name: At_100uM_ABA_Mutants__P Parameter: Organism Value: A. thaliana
  misc_feature: MA Experiment 20000574 PARAMETER Experiment Name: At_100uM_ABA_Mutants__P Parameter: Plant Line Value: CS23 vs. Ler wt
  misc_feature: MA Experiment 20000574 PARAMETER Experiment Name: At_100uM_ABA_Mutants__P Parameter: Timepoint (hr) Value: N/A
  misc_feature: MA Experiment 20000574 PARAMETER Experiment Name: At_100uM_ABA_Mutants__P Parameter: Tissue Value: Whole Plant
  misc_feature: MA Experiment 20000574 PARAMETER Experiment Name: At_100uM_ABA_Mutants__P Parameter: Treatment Value: None
  misc_feature: MA Experiment ID: 20000794 Result: Down-regulated in Transcription
  misc_feature: MA Experiment 20000794 PARAMETER Experiment Name: At_Petals_P Parameter: Age (day) Value: 23-25 days
  misc_feature: MA Experiment 20000794 PARAMETER Experiment Name: At_Petals_P Parameter: Plant Line Value: WS
  misc_feature: MA Experiment 20000794 PARAMETER Experiment Name: At_Petals_P Parameter: Tissue Value: Petals vs. Whole plant
  misc_feature: MA Experiment ID: 20001248 Result: Down-regulated in Transcription
  misc_feature: MA Experiment 20001248 PARAMETER Experiment Name: At_Far-red-induction_P Parameter: Age (day) Value: 7
  misc_feature: MA Experiment 20001248 PARAMETER Experiment Name: At_Far-red-induction_P Parameter: Light Value: Far-red vs. White
  misc_feature: MA Experiment 20001248 PARAMETER Experiment Name: At_Far-red-induction_P Parameter: Organism Value: A. thaliana
  misc_feature: MA Experiment 20001248 PARAMETER Experiment Name: At_Far-red-induction_P Parameter: Plant Line Value: Columbia
  misc_feature: MA Experiment 20001248 PARAMETER Experiment Name: At_Far-red-induction_P Parameter: Timepoint (hr) Value: 4
  misc_feature: MA Experiment 20001248 PARAMETER Experiment Name: At_Far-red-induction_P Parameter: Tissue Value: Whole Plant
  misc_feature: MA Experiment ID: 20001556 Result: Down-regulated in Transcription
  misc_feature: MA Experiment 20001556 PARAMETER Experiment Name: At_Drought_Soil_Dry_P Parameter: Age (day) Value: 26
  misc_feature: MA Experiment 20001556 PARAMETER Experiment Name: At_Drought_Soil_Dry_P Parameter: Organism Value: A. thaliana
  misc_feature: MA Experiment 20001556 PARAMETER Experiment Name: At_Drought_Soil_Dry_P Parameter: Plant Line Value: WS
  misc_feature: MA Experiment 20001556 PARAMETER Experiment Name: At_Drought_Soil_Dry_P Parameter: Post Timepoint (hr) Value: None
  misc_feature: MA Experiment 20001556 PARAMETER Experiment Name: At_Drought_Soil_Dry_P Parameter: Post-Treatment Value: None
  misc_feature: MA Experiment 20001556 PARAMETER Experiment Name: At_Drought_Soil_Dry_P Parameter: Timepoint (day) Value: 12
  misc_feature: MA Experiment 20001556 PARAMETER Experiment Name: At_Drought_Soil_Dry_P Parameter: Treatment Value: Drought vs. No Drought
  misc_feature: MA Experiment ID: 20001557 Result: Down-regulated in Transcription
  misc_feature: MA Experiment 20001557 PARAMETER Experiment Name: At_Drought_Soil_Dry_P Parameter: Age (day) Value: 27
  misc_feature: MA Experiment 20001557 PARAMETER Experiment Name: At_Drought_Soil_Dry_P Parameter: Organism Value: A. thaliana
  misc_feature: MA Experiment 20001557 PARAMETER Experiment Name: At_Drought_Soil_Dry_P Parameter: Plant Line Value: WS
  misc_feature: MA Experiment 20001557 PARAMETER Experiment Name: At_Drought_Soil_Dry_P Parameter: Post Timepoint (hr) Value: 3
  misc_feature: MA Experiment 20001557 PARAMETER Experiment Name: At_Drought_Soil_Dry_P Parameter: Post-Treatment Value: Re-Water vs. No Drought
  misc_feature: MA Experiment 20001557 PARAMETER Experiment Name: At_Drought_Soil_Dry_P Parameter: Timepoint (day) Value: 13
  misc_feature: MA Experiment 20001557 PARAMETER Experiment Name: At_Drought_Soil_Dry_P Parameter: Treatment Value: Drought vs. No Drought
  misc_feature: MA Experiment ID: 20001558 Result: Down-regulated in Transcription
  misc_feature: MA Experiment 20001558 PARAMETER Experiment Name: At_Drought_Soil_Dry_P Parameter: Age (day) Value: 27
  misc_feature: MA Experiment 20001558 PARAMETER Experiment Name: At_Drought_Soil_Dry_P Parameter: Organism Value: A. thaliana
  misc_feature: MA Experiment 20001558 PARAMETER Experiment Name: At_Drought_Soil_Dry_P Parameter: Plant Line Value: WS
  misc_feature: MA Experiment 20001558 PARAMETER Experiment Name: At_Drought_Soil_Dry_P Parameter: Post Timepoint (hr) Value: 6
  misc_feature: MA Experiment 20001558 PARAMETER Experiment Name: At_Drought_Soil_Dry_P Parameter: Post-Treatment Value: Re-Water vs. No Drought
  misc_feature: MA Experiment 20001558 PARAMETER Experiment Name: At_Drought_Soil_Dry_P Parameter: Timepoint (day) Value: 13
  misc_feature: MA Experiment 20001558 PARAMETER Experiment Name: At_Drought_Soil_Dry_P Parameter: Treatment Value: Drought vs. No Drought
  misc_feature: MA Experiment ID: 20001560 Result: Down-regulated in Transcription
  misc_feature: MA Experiment 20001560 PARAMETER Experiment Name: At_Drought_Soil_Dry_P Parameter: Age (day) Value: 28
  misc_feature: MA Experiment 20001560 PARAMETER Experiment Name: At_Drought_Soil_Dry_P Parameter: Organism Value: A. thaliana
  misc_feature: MA Experiment 20001560 PARAMETER Experiment Name: At_Drought_Soil_Dry_P Parameter: Plant Line Value: WS
  misc_feature: MA Experiment 20001560 PARAMETER Experiment Name: At_Drought_Soil_Dry_P Parameter: Post Timepoint (hr) Value: None
  misc_feature: MA Experiment 20001560 PARAMETER Experiment Name: At_Drought_Soil_Dry_P Parameter: Post-Treatment Value: None
  misc_feature: MA Experiment 20001560 PARAMETER Experiment Name: At_Drought_Soil_Dry_P Parameter: Timepoint (day) Value: 14
  misc_feature: MA Experiment 20001560 PARAMETER Experiment Name: At_Drought_Soil_Dry_P Parameter: Treatment Value: Drought vs. No Drought
atctttcctctcctcttccatcgcttagtcgcctctctcttcgttgttgcagctctcttcctgctcacgatatggagacaaaaccaagtcaaggcctttacccacttcaccgttgcaaaaccatacatctggtgagacatgctcaagggattcacaatgttgaaggagagaagaaccataaggcttacttatctgaggatctatttgatgcacatcttacacctcttggatggcaacaagttgataatttacacaagcatgttaatgcaagtggtatttccaatagaattgagttggtagtcgtatctcctctgctcaggactttgcaaacagcggtcggaacttttggtggggaaggttacaaagatggtgtaaatacacctctgcttatgaccgcaggtgctggaaacagcgatcgtcctgctatatcaaggttaaatcgtccaccgttcattgcggttgaatcctgccgagaacatttgggtgttcatccttgtgacagaagaagcaatatcaccaagtaccgcgaattattccctgcgattgatttttcattgatagaaactgatgaagatgtcttgtggaagcctgacattagagaggaggataaagatattgcgaccagaggcgtgaagttctttaactggttgagtacaaggaaagaaaaagagattgcggttgtaactcatagtgggttcttgtatcaaacattaaactcatttggaaacgattgtgatccatctgtgaaaaacgagatttctaaaaaatttgtcaactgtgaactccgttcatttgttcttgtagataaatgcatgagcagttcggatcctccaatgaccaactatcccggaacaatacttaccggagaagatgcttctagtgatattgctgatcagaagtagttatatgtattatgttaatcttatatgaatctcaaagctgtatatttctatacaatggaatagaaaatggagttagacgtaactattttatttaacgttaccgtatcctacggattcacacttaaatgttatctcgattaagc

SEQ ID NO: 90050 - protein, 299 aa, Arabidopsis thaliana
  peptide (1)..(299): Ceres Seq. ID no. 12722003
  misc_feature (39)..(269): Pfam Name: Phosphoglycerate mutase family Pfam Description: Phosphoglycerate mutase family
  misc_feature (1)..(299): Homolog of NCBI NO: 25372930 NR Description: hypothetical protein ZW10 [imported] - thaliana (fragment) >gi|6520148|dbj|BAA87937.1| ZW10 [Arabidopsis
  misc_feature (1)..(299): Homolog of NCBI NO: 25372931 NR Description: hypothetical protein F19C14.10 [imported] - thaliana >gi|8979945|gb|AAF82259.1|AC008051_10 Identical to gene from Arabidopsis thaliana gb|AB028195 and is a member of the
  misc_feature (1)..(160): Homolog of NCBI NO: 30696245 NR Description: expressed protein [Arabidopsis thaliana]
  misc_feature (161)..(299): Homolog of NCBI NO: 30696245 NR Description: expressed protein [Arabidopsis thaliana]
  misc_feature (24)..(299): Homolog of NCBI NO: 15217922 NR Description: unknown protein; protein id: At1g58280.1
LSSPLPSLSRLSLRCCSSLPAHDMETKPSQGLYPLHRCKTIHLVRHAQGIHNVEGEKNHKAYLSEDLFDAHLTPLGWQQVDNLHKHVNASGISNRIELVVVSPLLRTLQTAVGTFGGEGYKDGVNTPLLMTAGAGNSDRPAISRLNRPPFIAVESCREHLGVHPCDRRSNITKYRELFPAIDFSLIETDEDVLWKPDIREEDKDIATRGVKFFNWLSTRKEKEIAVVTHSGFLYQTLNSFGNDCDPSVKNEISKKFVNCELRSFVLVDKCMSSSDPPMTNYPGTILTGEDASSDIADQK

SEQ ID NO: 90051 - protein, 276 aa, Arabidopsis thaliana
  peptide (1)..(276): Ceres Seq. ID no. 12722004
  misc_feature (16)..(246): Pfam Name: Phosphoglycerate mutase family Pfam Description: Phosphoglycerate mutase family
  misc_feature (1)..(276): Homolog of NCBI NO: 25372930 NR Description: hypothetical protein ZW10 [imported] - thaliana (fragment) >gi|6520148|dbj|BAA87937.1| ZW10 [Arabidopsis
  misc_feature (1)..(276): Homolog of NCBI NO: 25372931 NR Description: hypothetical protein F19C14.10 [imported] - thaliana >gi|8979945|gb|AAF82259.1|AC008051_10 Identical to gene from Arabidopsis thaliana gb|AB028195 and is a member of the
  misc_feature (1)..(137): Homolog of NCBI NO: 30696245 NR Description: expressed protein [Arabidopsis thaliana]
  misc_feature (138)..(276): Homolog of NCBI NO: 30696245 NR Description: expressed protein [Arabidopsis thaliana]
  misc_feature (1)..(276): Homolog of NCBI NO: 15217922 NR Description: unknown protein; protein id: At1g58280.1
METKPSQGLYPLHRCKTIHLVRHAQGIHNVEGEKNHKAYLSEDLFDAHLTPLGWQQVDNLHKHVNASGISNRIELVVVSPLLRTLQTAVGTFGGEGYKDGVNTPLLMTAGAGNSDRPAISRLNRPPFIAVESCREHLGVHPCDRRSNITKYRELFPAIDFSLIETDEDVLWKPDIREEDKDIATRGVKFFNWLSTRKEKEIAVVTHSGFLYQTLNSFGNDCDPSVKNEISKKFVNCELRSFVLVDKCMSSSDPPMTNYPGTILTGEDASSDIADQK

SEQ ID NO: 90052 - protein, 170 aa, Arabidopsis thaliana
  peptide (1)..(170): Ceres Seq. ID no. 12722005
  misc_feature (1)..(140): Pfam Name: Phosphoglycerate mutase family Pfam Description: Phosphoglycerate mutase family
  misc_feature (1)..(170): Homolog of NCBI NO: 25372930 NR Description: hypothetical protein ZW10 [imported] - thaliana (fragment) >gi|6520148|dbj|BAA87937.1| ZW10 [Arabidopsis
  misc_feature (1)..(170): Homolog of NCBI NO: 25372931 NR Description: hypothetical protein F19C14.10 [imported] - thaliana >gi|8979945|gb|AAF82259.1|AC008051_10 Identical to gene from Arabidopsis thaliana gb|AB028195 and is a member of the
  misc_feature (1)..(31): Homolog of NCBI NO: 30696245 NR Description: expressed protein [Arabidopsis thaliana]
  misc_feature (32)..(170): Homolog of NCBI NO: 30696245 NR Description: expressed protein [Arabidopsis thaliana]
  misc_feature (1)..(170): Homolog of NCBI NO: 15217922 NR Description: unknown protein; protein id: At1g58280.1
MTAGAGNSDRPAISRLNRPPFIAVESCREHLGVHPCDRRSNITKYRELFPAIDFSLIETDEDVLWKPDIREEDKDIATRGVKFFNWLSTRKEKEIAVVTHSGFLYQTLNSFGNDCDPSVKNEISKKFVNCELRSFVLVDKCMSSSDPPMTNYPGTILTGEDASSDIADQK

SEQ ID NO: 90053 - DNA, 852 bp, Arabidopsis thaliana
  misc_feature (1)..(852): Ceres Seq. ID no. 12722006
  misc_feature: MA Experiment ID: 20000440 Result: Down-regulated in Transcription
  misc_feature: MA Experiment 20000440 PARAMETER Experiment Name: At_Closed-Flower__Sub_P Parameter: Tissue Value: Closed Flower vs. Whole Plant
atggctacatcaagacttaatgcctcttgccgctttcctgcaagcagaagacttgactgcgagagctatgtcagtctgagagctaagacagtgacaataagatatgttcggaccatagccgctcctcgtcgccatcttgtccgaagagcaaacgaagatcagactttggtggtgaatgttgtggcagcagcaggggagaagccagaaagaaggtatcctcgagaaccgaatgggtttgtggaggagatgaggttcgtggtaatgaaaattcacccaagagatcaggtaaaagaaggaaaaagtgactccaacgatcttgtatcaacatggaatttcacaatcgaagggtacttgaagtttctcgtggacagtaagcttgtgtttgagacgcttgaacgaattattaacgaatctgctatccaagcttatgccgggctcaaaaacacggggttggaaagggcagagaatttgagtagggatttggagtggttcaaggaacaaggttacgagattccagagtcaatggttcctggtaaagcatattctcagtatttaaagaatatagcagagaaagatcctccagcattcatctgtcacttctacaacattaactttgcacatagcgctggtggtcgaatgattgggacaaaggtagctgagaagatactcgacaataaagaactcgagttctacaaatgggacggccaactttccgaattgttgcagaacgtgagtgaagaattgaacaaagtggctgagttgtggacgagagaagagaagaatcattgtttggaagagacagagaaatcgttcaagttttattgggagatttttcgttacttattgtcctaa

SEQ ID NO: 90054 - protein, 283 aa, Arabidopsis thaliana
  peptide (1)..(283): Ceres Seq. ID no. 12722007
  misc_feature (83)..(279): Pfam Name: Heme oxygenase Pfam Description: Heme oxygenase
  misc_feature (1)..(283): Homolog of NCBI NO: 15217926 NR Description: plastid heme oxygenase, putative; protein id: [Arabidopsis thaliana] >gi|25370569|pir||F96616 hypothetical
  misc_feature (1)..(283): Homolog of NCBI NO: 14485565 NR Description: heme oxygenase 4 [Arabidopsis thaliana]
  misc_feature (1)..(283): Homolog of NCBI NO: 15222425 NR Description: putative heme oxygenase; protein id: At1g69720.1, by cDNA: 101223. [Arabidopsis thaliana] >gi|25370568|pir||B96719
  misc_feature (42)..(283): Homolog of NCBI NO: 15225771 NR Description: heme oxygenase 1 (HO1); protein id: At2g26670.1, by cDNA: 33692., supported by cDNA: gi_4877396 [Arabidopsis >gi|25370567|pir||T52457 heme oxygenase (decyclizing) (EC
  misc_feature (42)..(283): Homolog of NCBI NO: 21450864 NR Description: putative heme oxygenase HO1 [Arabidopsis thaliana]
  misc_feature (51)..(283): Homolog of NCBI NO: 14030647 NR Description: At2g26670/F18A8.4 [Arabidopsis thaliana]
  misc_feature (52)..(283): Homolog of NCBI NO: 14485575 NR Description: heme oxygenase 1 [Lycopersicon esculentum]
MATSRLNASCRFPASRRLDCESYVSLRAKTVTIRYVRTIAAPRRHLVRRANEDQTLVVNVVAAAGEKPERRYPREPNGFVEEMRFVVMKIHPRDQVKEGKSDSNDLVSTWNFTIEGYLKFLVDSKLVFETLERIINESAIQAYAGLKNTGLERAENLSRDLEWFKEQGYEIPESMVPGKAYSQYLKNIAEKDPPAFICHFYNINFAHSAGGRMIGTKVAEKILDNKELEFYKWDGQLSELLQNVSEELNKVAELWTREEKNHCLEETEKSFKFYWEIFRYLLS

SEQ ID NO: 90055 - protein, 201 aa, Arabidopsis thaliana
  peptide (1)..(201): Ceres Seq. ID no. 12722008
  misc_feature (1)..(197): Pfam Name: Heme oxygenase Pfam Description: Heme oxygenase
  misc_feature (1)..(201): Homolog of NCBI NO: 15217926 NR Description: plastid heme oxygenase, putative; protein id: [Arabidopsis thaliana] >gi|25370569|pir||F96616 hypothetical
  misc_feature (1)..(201): Homolog of NCBI NO: 14485565 NR Description: heme oxygenase 4 [Arabidopsis thaliana]
  misc_feature (1)..(201): Homolog of NCBI NO: 15222425 NR Description: putative heme oxygenase; protein id: At1g69720.1, by cDNA: 101223. [Arabidopsis thaliana] >gi|25370568|pir||B96719
  misc_feature (1)..(201): Homolog of NCBI NO: 15225771 NR Description: heme oxygenase 1 (HO1); protein id: At2g26670.1, by cDNA: 33692., supported by cDNA: gi_4877396 [Arabidopsis >gi|25370567|pir||T52457 heme oxygenase (decyclizing) (EC
  misc_feature (1)..(201): Homolog of NCBI NO: 21450864 NR Description: putative heme oxygenase HO1 [Arabidopsis thaliana]
  misc_feature (1)..(201): Homolog of NCBI NO: 14030647 NR Description: At2g26670/F18A8.4 [Arabidopsis thaliana]
  misc_feature (1)..(201): Homolog of NCBI NO: 14485575 NR Description: heme oxygenase 1 [Lycopersicon esculentum]
MRFVVMKIHPRDQVKEGKSDSNDLVSTWNFTIEGYLKFLVDSKLVFETLERIINESAIQAYAGLKNTGLERAENLSRDLEWFKEQGYEIPESMVPGKAYSQYLKNIAEKDPPAFICHFYNINFAHSAGGRMIGTKVAEKILDNKELEFYKWDGQLSELLQNVSEELNKVAELWTREEKNHCLEETEKSFKFYWEIFRYLLS

SEQ ID NO: 90056 - protein, 196 aa, Arabidopsis thaliana
  peptide (1)..(196): Ceres Seq. ID no. 12722009
  misc_feature (1)..(192): Pfam Name: Heme oxygenase Pfam Description: Heme oxygenase
  misc_feature (1)..(196): Homolog of NCBI NO: 15217926 NR Description: plastid heme oxygenase, putative; protein id: [Arabidopsis thaliana] >gi|25370569|pir||F96616 hypothetical
  misc_feature (1)..(196): Homolog of NCBI NO: 14485565 NR Description: heme oxygenase 4 [Arabidopsis thaliana]
  misc_feature (1)..(196): Homolog of NCBI NO: 15222425 NR Description: putative heme oxygenase; protein id: At1g69720.1, by cDNA: 101223. [Arabidopsis thaliana] >gi|25370568|pir||B96719
  misc_feature (1)..(196): Homolog of NCBI NO: 15225771 NR Description: heme oxygenase 1 (HO1); protein id: At2g26670.1, by cDNA: 33692., supported by cDNA: gi_4877396 [Arabidopsis >gi|25370567|pir||T52457 heme oxygenase (decyclizing) (EC
  misc_feature (1)..(196): Homolog of NCBI NO: 21450864 NR Description: putative heme oxygenase HO1 [Arabidopsis thaliana]
  misc_feature (1)..(196): Homolog of NCBI NO: 14030647 NR Description: At2g26670/F18A8.4 [Arabidopsis thaliana]
  misc_feature (1)..(196): Homolog of NCBI NO: 14485575 NR Description: heme oxygenase 1 [Lycopersicon esculentum]
MKIHPRDQVKEGKSDSNDLVSTWNFTIEGYLKFLVDSKLVFETLERIINESAIQAYAGLKNTGLERAENLSRDLEWFKEQGYEIPESMVPGKAYSQYLKNIAEKDPPAFICHFYNINFAHSAGGRMIGTKVAEKILDNKELEFYKWDGQLSELLQNVSEELNKVAELWTREEKNHCLEETEKSFKFYWEIFRYLLS

SEQ ID NO: 90057 - DNA, 2057 bp, Arabidopsis thaliana
  misc_feature (1)..(2057): Ceres Seq. ID no. 12722014
  misc_feature: MA Experiment ID: 20000436 Result: Up-regulated in Transcription
  misc_feature: MA Experiment 20000436 PARAMETER Experiment Name: At_Drought_P Parameter: Age (day) Value: 7
  misc_feature: MA Experiment 20000436 PARAMETER Experiment Name: At_Drought_P Parameter: Organism Value: A. thaliana
  misc_feature: MA Experiment 20000436 PARAMETER Experiment Name: At_Drought_P Parameter: Plant Line Value: WS
  misc_feature: MA Experiment 20000436 PARAMETER Experiment Name: At_Drought_P Parameter: Timepoint (hr) Value: 12
  misc_feature: MA Experiment 20000436 PARAMETER Experiment Name: At_Drought_P Parameter: Tissue Value: Whole Plant
  misc_feature: MA Experiment 20000436 PARAMETER Experiment Name: At_Drought_P Parameter: Treatment Value: Drought vs. No Drought
  misc_feature: MA Experiment ID: 20000437 Result: Up-regulated in Transcription
  misc_feature: MA Experiment 20000437 PARAMETER Experiment Name: At_Drought_P Parameter: Age (day) Value: 8
  misc_feature: MA Experiment 20000437 PARAMETER Experiment Name: At_Drought_P Parameter: Organism Value: A. thaliana
  misc_feature: MA Experiment 20000437 PARAMETER Experiment Name: At_Drought_P Parameter: Plant Line Value: WS
  misc_feature: MA Experiment 20000437 PARAMETER Experiment Name: At_Drought_P Parameter: Timepoint (hr) Value: 24
  misc_feature: MA Experiment 20000437 PARAMETER Experiment Name: At_Drought_P Parameter: Tissue Value: Whole Plant
  misc_feature: MA Experiment 20000437 PARAMETER Experiment Name: At_Drought_P Parameter: Treatment Value: Drought vs. No Drought
  misc_feature: MA Experiment ID: 20000527 Result: Down-regulated in Transcription
  misc_feature: MA Experiment 20000527 PARAMETER Experiment Name: At_10percent_PEG_P Parameter: Age (day) Value: 20
  misc_feature: MA Experiment 20000527 PARAMETER Experiment Name: At_10percent_PEG_P Parameter: Organism Value: A. thaliana
  misc_feature: MA Experiment 20000527 PARAMETER Experiment Name: At_10percent_PEG_P Parameter: Plant Line Value: WS
  misc_feature: MA Experiment 20000527 PARAMETER Experiment Name: At_10percent_PEG_P Parameter: Timepoint (day) Value: 20
  misc_feature: MA Experiment 20000527 PARAMETER Experiment Name: At_10percent_PEG_P Parameter: Tissue Value: Whole Plant
  misc_feature: MA Experiment 20000527 PARAMETER Experiment Name: At_10percent_PEG_P Parameter: Treatment Value: 10percent PEG vs. No Treatment
  misc_feature: MA Experiment ID: 20001757 Result: Down-regulated in Transcription
  misc_feature: MA Experiment 20001757 PARAMETER Experiment Name: At_50mM_NH4NO3_L-to-H_P Parameter: Timepoint (hr) Value: 6
  misc_feature: MA Experiment 20001757 PARAMETER Experiment Name: At_50mM_NH4NO3_L-to-H_P Parameter: Tissue Value: Leaf
  misc_feature: MA Experiment 20001757 PARAMETER Experiment Name: At_50mM_NH4NO3_L-to-H_P Parameter: Treatment Value: 50mM NH4NO3 vs 100mM Mannitol
  misc_feature: MA Experiment ID: 20001904 Result: Up-regulated in Transcription
  misc_feature: MA Experiment 20001904 PARAMETER Experiment Name: At_Drought_Reproduction_P Parameter: Age (day) Value: 37
  misc_feature: MA Experiment 20001904 PARAMETER Experiment Name: At_Drought_Reproduction_P Parameter: Organism Value: A. thaliana
  misc_feature: MA Experiment 20001904 PARAMETER Experiment Name: At_Drought_Reproduction_P Parameter: Plant Line Value: WS
  misc_feature: MA Experiment 20001904 PARAMETER Experiment Name: At_Drought_Reproduction_P Parameter: Timepoint (day) Value: 7
  misc_feature: MA Experiment 20001904 PARAMETER Experiment Name: At_Drought_Reproduction_P Parameter: Tissue Value: Rosettes
  misc_feature: MA Experiment 20001904 PARAMETER Experiment Name: At_Drought_Reproduction_P Parameter: Treatment Value: Drought vs. No Drought
  misc_feature: MA Experiment ID: 20001905 Result: Up-regulated in Transcription
  misc_feature: MA Experiment 20001905 PARAMETER Experiment Name: At_Drought_Reproduction_P Parameter: Age (day) Value: 40
  misc_feature: MA Experiment 20001905 PARAMETER Experiment Name: At_Drought_Reproduction_P Parameter: Organism Value: A. thaliana
  misc_feature: MA Experiment 20001905 PARAMETER Experiment Name: At_Drought_Reproduction_P Parameter: Plant Line Value: WS
  misc_feature: MA Experiment 20001905 PARAMETER Experiment Name: At_Drought_Reproduction_P Parameter: Timepoint (day) Value: 10
  misc_feature: MA Experiment 20001905 PARAMETER Experiment Name: At_Drought_Reproduction_P Parameter: Tissue Value: Rosettes
  misc_feature: MA Experiment 20001905 PARAMETER Experiment Name: At_Drought_Reproduction_P Parameter: Treatment Value: Drought vs. No Drought
aaaatattagttcctctcggttccttttatcatttgcataaaatcgttttgcctccaaaagactaaaagctctagactttgtctctttgtccttttatctctactcccaacaaaaccagtttactcctcttaagaatcatgtgtaattcaaaaccatcttctgcttcatcttccttattatcttgtaaagacaaaacccatatctcaaaactcgaaacctgtgatacagataatcctcattattctgaattcagggatactgattctctagaccttaaaagatggccaagttttctggagggcttagaggaagtgaaggcgatcggaaaaatctctgggccgacggcgatgaccgggcttcttatgtactcaagagcgatgatatcgatgctgttcttaggctacctcggtgagcttgagttagccggaggatctctctccataggctttgccaatatcaccggctactccgtcatctccggtttgtccatggggatggaaccaatctgtggccaagcatacggagctaaacaaatgaagcttttaggactaacccttcaaagaaccgtcctcctactcctctcctgctcggtccctatctccttctcgtggctcaacatgcgccgaatcctcttatggtgcggccaagatgaagagatctcctctgttgctcaacagttccttctattcgccatccctgacctcttccttctctctctgcttcaccctcttcgaatttacctccgaacacaaaacattacattgcccgtgacttactccacggccgtgtccgttctcctccacgttcctttgaactacctcctagtggtgaaacttgagatgggagtagcgggagtcgctatagctatggttttgacaaatctcaaccttgtagtcctcttatcctcttttgtgtatttcactagcgtgcatagtgatacatgggtcccaattactattgactctcttaaaggttggtcggctttgctctcacttgccatacccacttgtgtatctgtttgtttggagtggtggtggtacgagtttatgatcattttgtgtggacttttggctaacccaagagccaccgtggcttccatgggaatcttgatccaaacgacggctttggtctacgtcttcccatcctctctcagccttggtgtctctacaagaattagcaacgagcttggggctaaacgtccggcgaaagctcgggtatccatgatcatctcactcttctgcgcgatcgccttaggcctaatggcgatggtgtttgctgtgctggttaggcaccattggggacgcttgtttaccacggatgcagagattcttcagctgacttccatcgcattacccattgtggggttatgtgagctcggaaactgtcctcaaacaaccggttgtggggttttaagaggctgtgcaagacctacacttggtgccaacataaacttgggttcattttactttgtgggcatgccagtcgctattctgtttgggtttgttttcaaacaagggtttccaggtctctggttcgggttgcttgcagctcaagcaacttgtgcttctctcatgttgtgtgcacttttgagaacagattggaaagtccaagccgagagagctgaagagctgacgtcacaaactcccggaaagtctccgccccttctccccatcgcaagctcaaagagccggtctacctccggtacagaagatatgatgagaaccatgttggtttagattgatagctattctctggaggcatttgccatcaacattgacgtacatatatgttcttgtcatcattttttggagtttatagtgctccttaatttctactttttgatttaagaacgactttgttttgtgggctttagtggtgtttgtgttatttatggttgtattggtgtgatagttctaattagctttgacttcagcagtttgtattttatgtgttcccttttgtaataactcgtggtttgattatctttatatatttgtccattttctaggagaatgtgaattttttttgttaaactaagaataaatttattttattt

SEQ ID NO: 90058 - protein, 532 aa, Arabidopsis thaliana
  peptide (1)..(532): Ceres Seq. ID no. 12722015
  misc_feature (1)..(532): Homolog of NCBI NO: 18406257 NR Description: expressed protein; protein id: At1g58340.1, by cDNA: gi_6520160 [Arabidopsis thaliana]
  misc_feature (50)..(502): Homolog of NCBI NO: 15235905 NR Description: putative protein; protein id: At4g23030.1
  misc_feature (1)..(504): Homolog of NCBI NO: 20532318 NR Description: Putative membrane protein [Oryza sativa (japonica group)] >gi|27356666|gb|AAO06955.1| Putative membrane protein
  misc_feature (58)..(499): Homolog of NCBI NO: 38567909 NR Description: OSJNBa0088I22.5 [Oryza sativa (japonica
  misc_feature (58)..(498): Homolog of NCBI NO: 37536202 NR Description: putative membrane protein [Oryza sativa (japonica group)] >gi|27311284|gb|AAO00710.1| putative membrane protein
  misc_feature (1)..(531): Homolog of NCBI NO: 15233459 NR Description: putative protein; protein id: At4g29140.1
  misc_feature (49)..(499): Homolog of NCBI NO: 15241158 NR Description: putative protein; protein id: At5g19700.1
  misc_feature (46)..(500): Homolog of NCBI NO: 15242265 NR Description: integral membrane protein-like; protein id:
  misc_feature (46)..(500): Homolog of NCBI NO: 39104576 NR Description: putative integral membrane protein [Arabidopsis
  misc_feature (57)..(506): Homolog of NCBI NO: 15224891 NR Description: hypothetical protein; protein id: At2g38510.1
MCNSKPSSASSSLLSCKDKTHISKLETCDTDNPHYSEFRDTDSLDLKRWPSFLEGLEEVKAIGKISGPTAMTGLLMYSRAMISMLFLGYLGELELAGGSLSIGFANITGYSVISGLSMGMEPICGQAYGAKQMKLLGLTLQRTVLLLLSCSVPISFSWLNMRRILLWCGQDEEISSVAQQFLLFAIPDLFLLSLLHPLRIYLRTQNITLPVTYSTAVSVLLHVPLNYLLVVKLEMGVAGVAIAMVLTNLNLVVLLSSFVYFTSVHSDTWVPITIDSLKGWSALLSLAIPTCVSVCLEWWWYEFMIILCGLLANPRATVASMGILIQTTALVYVFPSSLSLGVSTRISNELGAKRPAKARVSMIISLFCAIALGLMAMVFAVLVRHHWGRLFTTDAEILQLTSIALPIVGLCELGNCPQTTGCGVLRGCARPTLGANINLGSFYFVGMPVAILFGFVFKQGFPGLWFGLLAAQATCASLMLCALLRTDWKVQAERAEELTSQTPGKSPPLLPIASSKSRSTSGTEDMMRTMLV

SEQ ID NO: 90059 - protein, 462 aa, Arabidopsis thaliana
  peptide (1)..(462): Ceres Seq. ID no. 12722016
  misc_feature (1)..(462): Homolog of NCBI NO: 18406257 NR Description: expressed protein; protein id: At1g58340.1, by cDNA: gi_6520160 [Arabidopsis thaliana]
  misc_feature (1)..(432): Homolog of NCBI NO: 15235905 NR Description: putative protein; protein id: At4g23030.1
  misc_feature (1)..(434): Homolog of NCBI NO: 20532318 NR Description: Putative membrane protein [Oryza sativa (japonica group)] >gi|27356666|gb|AAO06955.1| Putative membrane protein
  misc_feature (1)..(429): Homolog of NCBI NO: 38567909 NR Description: OSJNBa0088I22.5 [Oryza sativa (japonica
  misc_feature (1)..(428): Homolog of NCBI NO: 37536202 NR Description: putative membrane protein [Oryza sativa (japonica group)] >gi|27311284|gb|AAO00710.1| putative membrane protein
  misc_feature (1)..(461): Homolog of NCBI NO: 15233459 NR Description: putative protein; protein id: At4g29140.1
  misc_feature (1)..(429): Homolog of NCBI NO: 15241158 NR Description: putative protein; protein id: At5g19700.1
  misc_feature (1)..(430): Homolog of NCBI NO: 15242265 NR Description: integral membrane protein-like; protein id:
  misc_feature (1)..(430): Homolog of NCBI NO: 39104576 NR Description: putative integral membrane protein [Arabidopsis
  misc_feature (1)..(436): Homolog of NCBI NO: 15224891 NR Description: hypothetical protein; protein id: At2g38510.1
MTGLLMYSRAMISMLFLGYLGELELAGGSLSIGFANITGYSVISGLSMGMEPICGQAYGAKQMKLLGLTLQRTVLLLLSCSVPISFSWLNMRRILLWCGQDEEISSVAQQFLLFAIPDLFLLSLLHPLRIYLRTQNITLPVTYSTAVSVLLHVPLNYLLVVKLEMGVAGVAIAMVLTNLNLVVLLSSFVYFTSVHSDTWVPITIDSLKGWSALLSLAIPTCVSVCLEWWWYEFMIILCGLLANPRATVASMGILIQTTALVYVFPSSLSLGVSTRISNELGAKRPAKARVSMIISLFCAIALGLMAMVFAVLVRHHWGRLFTTDAEILQLTSIALPIVGLCELGNCPQTTGCGVLRGCARPTLGANINLGSFYFVGMPVAILFGFVFKQGFPGLWFGLLAAQATCASLMLCALLRTDWKVQAERAEELTSQTPGKSPPLLPIASSKSRSTSGTEDMMRTMLV

SEQ ID NO: 90060 - protein, 457 aa, Arabidopsis thaliana
  peptide (1)..(457): Ceres Seq. ID no. 12722017
  misc_feature (1)..(457): Homolog of NCBI NO: 18406257 NR Description: expressed protein; protein id: At1g58340.1, by cDNA: gi_6520160 [Arabidopsis thaliana]
  misc_feature (1)..(427): Homolog of NCBI NO: 15235905 NR Description: putative protein; protein id: At4g23030.1
  misc_feature (1)..(429): Homolog of NCBI NO: 20532318 NR Description: Putative membrane protein [Oryza sativa (japonica group)] >gi|27356666|gb|AAO06955.1| Putative membrane protein
  misc_feature (1)..(424): Homolog of NCBI NO: 38567909 NR Description: OSJNBa0088I22.5 [Oryza sativa (japonica
  misc_feature (1)..(423): Homolog of NCBI NO: 37536202 NR Description: putative membrane protein [Oryza sativa (japonica group)] >gi|27311284|gb|AAO00710.1| putative membrane protein
  misc_feature (1)..(456): Homolog of NCBI NO: 15233459 NR Description: putative protein; protein id: At4g29140.1
  misc_feature (1)..(424): Homolog of NCBI NO: 15241158 NR Description: putative protein; protein id: At5g19700.1
  misc_feature (1)..(425): Homolog of NCBI NO: 15242265 NR Description: integral membrane protein-like; protein id:
  misc_feature (1)..(425): Homolog of NCBI NO: 39104576 NR Description: putative integral membrane protein [Arabidopsis
  misc_feature (1)..(431): Homolog of NCBI NO: 15224891 NR Description: hypothetical protein; protein id: At2g38510.1
MYSRAMISMLFLGYLGELELAGGSLSIGFANITGYSVISGLSMGMEPICGQAYGAKQMKLLGLTLQRTVLLLLSCSVPISFSWLNMRRILLWCGQDEEISSVAQQFLLFAIPDLFLLSLLHPLRIYLRTQNITLPVTYSTAVSVLLHVPLNYLLVVKLEMGVAGVAIAMVLTNLNLVVLLSSFVYFTSVHSDTWVPITIDSLKGWSALLSLAIPTCVSVCLEWWWYEFMIILCGLLANPRATVASMGILIQTTALVYVFPSSLSLGVSTRISNELGAKRPAKARVSMIISLFCAIALGLMAMVFAVLVRHHWGRLFTTDAEILQLTSIALPIVGLCELGNCPQTTGCGVLRGCARPTLGANINLGSFYFVGMPVAILFGFVFKQGFPGLWFGLLAAQATCASLMLCALLRTDWKVQAERAEELTSQTPGKSPPLLPIASSKSRSTSGTEDMMRTMLV

SEQ ID NO: 90061 - DNA, 1066 bp, Arabidopsis thaliana
  misc_feature (1)..(1066): Ceres Seq. ID no. 12722058
  misc_feature: MA Experiment ID: 20000166 Result: Up-regulated in Transcription
  misc_feature: MA Experiment 20000166 PARAMETER Experiment Name: At_100uM_ABA_P Parameter: Age (day) Value: 14
  misc_feature: MA Experiment 20000166 PARAMETER Experiment Name: At_100uM_ABA_P Parameter: Organism Value: A. thaliana
  misc_feature: MA Experiment 20000166 PARAMETER Experiment Name: At_100uM_ABA_P Parameter: Plant Line Value: WS
  misc_feature: MA Experiment 20000166 PARAMETER Experiment Name: At_100uM_ABA_P Parameter: Timepoint (hr) Value: 1
  misc_feature: MA Experiment 20000166 PARAMETER Experiment Name: At_100uM_ABA_P Parameter: Tissue Value: Aerial
  misc_feature: MA Experiment 20000166 PARAMETER Experiment Name: At_100uM_ABA_P Parameter: Treatment Value: 100uM ABA vs. No Treatment
  misc_feature: MA Experiment ID: 20000169 Result: Up-regulated in Transcription
  misc_feature: MA Experiment 20000169 PARAMETER Experiment Name: At_100uM_ABA_P Parameter: Age (day) Value: 14
  misc_feature: MA Experiment 20000169 PARAMETER Experiment Name: At_100uM_ABA_P Parameter: Organism Value: A. thaliana
  misc_feature: MA Experiment 20000169 PARAMETER Experiment Name: At_100uM_ABA_P Parameter: Plant Line Value: WS
  misc_feature: MA Experiment 20000169 PARAMETER Experiment Name: At_100uM_ABA_P Parameter: Timepoint (hr) Value: 6
  misc_feature: MA Experiment 20000169 PARAMETER Experiment Name: At_100uM_ABA_P Parameter: Tissue Value: Aerial
  misc_feature: MA Experiment 20000169 PARAMETER Experiment Name: At_100uM_ABA_P Parameter: Treatment Value: 100uM ABA vs. No Treatment
  misc_feature: MA Experiment ID: 20000182 Result: Up-regulated in Transcription
  misc_feature: MA Experiment 20000182 PARAMETER Experiment Name: At_2mM_SA_P Parameter: Age (day) Value: 14
  misc_feature: MA Experiment 20000182 PARAMETER Experiment Name: At_2mM_SA_P Parameter: Organism Value: A. thaliana
  misc_feature: MA Experiment 20000182 PARAMETER Experiment Name: At_2mM_SA_P Parameter: Plant Line Value: WS
  misc_feature: MA Experiment 20000182 PARAMETER Experiment Name: At_2mM_SA_P Parameter: Timepoint (hr) Value: 6
  misc_feature: MA Experiment 20000182 PARAMETER Experiment Name: At_2mM_SA_P Parameter: Tissue Value: Aerial
  misc_feature: MA Experiment 20000182 PARAMETER Experiment Name: At_2mM_SA_P Parameter: Treatment Value: 2mM SA vs. No Treatment
  misc_feature: MA Experiment ID: 20000184 Result: Up-regulated in Transcription
  misc_feature: MA Experiment 20000184 PARAMETER Experiment Name: At_Shoots__P Parameter: Age (day) Value: 7
  misc_feature: MA Experiment 20000184 PARAMETER Experiment Name: At_Shoots__P Parameter: Tissue Value: Shoots vs. Whole Plant
  misc_feature: MA Experiment ID: 20000185 Result: Up-regulated in Transcription
  misc_feature: MA Experiment 20000185 PARAMETER Experiment Name: At_Roots__P Parameter: Age (day) Value: 7 vs. 21
  misc_feature: MA Experiment 20000185 PARAMETER Experiment Name: At_Roots__P Parameter: Organism Value: A. thaliana
  misc_feature: MA Experiment 20000185 PARAMETER Experiment Name: At_Roots__P Parameter: Tissue Value: Roots vs. Whole Plant
  misc_feature: MA Experiment ID: 20000265 Result: Down-regulated in Transcription
  misc_feature: MA Experiment 20000265 PARAMETER Experiment Name: At_Open_Flower_P Parameter: Age (day) Value: 21
  misc_feature: MA Experiment 20000265 PARAMETER Experiment Name: At_Open_Flower_P Parameter: Plant Line Value: WS
  misc_feature: MA Experiment 20000265 PARAMETER Experiment Name: At_Open_Flower_P Parameter: Tissue Value: Closed Flower vs. Whole Plant
  misc_feature: MA Experiment ID: 20000267 Result: Up-regulated in Transcription
  misc_feature: MA Experiment 20000267 PARAMETER Experiment Name: At_Drought_P Parameter: Age (day) Value: 7
  misc_feature: MA Experiment 20000267 PARAMETER Experiment Name: At_Drought_P Parameter: Organism Value: A. thaliana
  misc_feature: MA Experiment 20000267 PARAMETER Experiment Name: At_Drought_P Parameter: Plant Line Value: WS
  misc_feature: MA Experiment 20000267 PARAMETER Experiment Name: At_Drought_P Parameter: Timepoint (hr) Value: 6
  misc_feature: MA Experiment 20000267 PARAMETER Experiment Name: At_Drought_P Parameter: Tissue Value: Whole Plant
  misc_feature: MA Experiment 20000267 PARAMETER Experiment Name: At_Drought_P Parameter: Treatment Value: Drought vs. No Drought
  misc_feature: MA Experiment ID: 20000269 Result: Down-regulated in Transcription
  misc_feature: MA Experiment 20000269 PARAMETER Experiment Name: At_1mM_KNO3_L-vs-H_Roots_P Parameter: Age (day) Value: 7,10,12
  misc_feature: MA Experiment 20000269 PARAMETER Experiment Name: At_1mM_KNO3_L-vs-H_Roots_P Parameter: Organism Value: A. thaliana
  misc_feature: MA Experiment 20000269 PARAMETER Experiment Name: At_1mM_KNO3_L-vs-H_Roots_P Parameter: Plant Line Value: WS
  misc_feature: MA Experiment 20000269 PARAMETER Experiment Name: At_1mM_KNO3_L-vs-H_Roots_P Parameter: Timepoint (day) Value: 7,10,12
  misc_feature: MA Experiment 20000269 PARAMETER Experiment Name: At_1mM_KNO3_L-vs-H_Roots_P Parameter: Tissue Value: Roots
  misc_feature: MA Experiment 20000269 PARAMETER Experiment Name: At_1mM_KNO3_L-vs-H_Roots_P Parameter: Treatment Value: 1mM KNO3 vs. 50mM KNO3
  misc_feature: MA Experiment ID: 20000286 Result: Down-regulated in Transcription
  misc_feature: MA Experiment 20000286 PARAMETER Experiment Name: At_Open_Flower_P Parameter: Age (day) Value: 21
  misc_feature: MA Experiment 20000286 PARAMETER Experiment Name: At_Open_Flower_P Parameter: Plant Line Value: WS
  misc_feature: MA Experiment 20000286 PARAMETER Experiment Name: At_Open_Flower_P Parameter: Tissue Value: Half Open vs. Whole Plant
  misc_feature: MA Experiment ID: 20000436 Result: Up-regulated in Transcription
  misc_feature: MA Experiment 20000436 PARAMETER Experiment Name: At_Drought_P Parameter: Age (day) Value: 7
  misc_feature: MA Experiment 20000436 PARAMETER Experiment Name: At_Drought_P Parameter: Organism Value: A. thaliana
  misc_feature: MA Experiment 20000436 PARAMETER Experiment Name: At_Drought_P Parameter: Plant Line Value: WS
  misc_feature: MA Experiment 20000436 PARAMETER Experiment Name: At_Drought_P Parameter: Timepoint (hr) Value: 12
  misc_feature: MA Experiment 20000436 PARAMETER Experiment Name: At_Drought_P Parameter: Tissue Value: Whole Plant
  misc_feature: MA Experiment 20000436 PARAMETER Experiment Name: At_Drought_P Parameter: Treatment Value: Drought vs. No Drought
  misc_feature: MA Experiment ID: 20000439 Result: Up-regulated in Transcription
  misc_feature: MA Experiment 20000439 PARAMETER Experiment Name: At_Roots__P Parameter: Age (day) Value: 14 vs. 21
  misc_feature: MA Experiment 20000439 PARAMETER Experiment Name: At_Roots__P Parameter: Organism Value: A. thaliana
  misc_feature: MA Experiment 20000439 PARAMETER Experiment Name: At_Roots__P Parameter: Tissue Value: Roots vs. Whole Plant
  misc_feature: MA Experiment ID: 20000453 Result: Up-regulated in Transcription
  misc_feature: MA Experiment 20000453 PARAMETER Experiment Name: At_100uM_ABA_P Parameter: Age (day) Value: 15
  misc_feature: MA Experiment 20000453 PARAMETER Experiment Name: At_100uM_ABA_P Parameter: Organism Value: A. thaliana
  misc_feature: MA Experiment 20000453 PARAMETER Experiment Name: At_100uM_ABA_P Parameter: Plant Line Value: WS
  misc_feature: MA Experiment 20000453 PARAMETER Experiment Name: At_100uM_ABA_P Parameter: Timepoint (hr) Value: 24
  misc_feature: MA Experiment 20000453 PARAMETER Experiment Name: At_100uM_ABA_P Parameter: Tissue Value: Aerial
  misc_feature: MA Experiment 20000453 PARAMETER Experiment Name: At_100uM_ABA_P Parameter: Treatment Value: 100uM ABA vs. No Treatment
  misc_feature: MA Experiment ID: 20000455 Result: Up-regulated in Transcription
  misc_feature: MA Experiment 20000455 PARAMETER Experiment Name: At_100uM_ABA_P Parameter: Age (day) Value: 16
  misc_feature: MA Experiment 20000455 PARAMETER Experiment Name: At_100uM_ABA_P Parameter: Organism Value: A. thaliana
  misc_feature: MA Experiment 20000455 PARAMETER Experiment Name: At_100uM_ABA_P Parameter: Plant Line Value: WS
  misc_feature: MA Experiment 20000455 PARAMETER Experiment Name: At_100uM_ABA_P Parameter: Timepoint (hr) Value: 48
  misc_feature: MA Experiment 20000455 PARAMETER Experiment Name: At_100uM_ABA_P Parameter: Tissue Value: Aerial
  misc_feature: MA Experiment 20000455 PARAMETER Experiment Name: At_100uM_ABA_P Parameter: Treatment Value: 100uM ABA vs. No Treatment
  misc_feature: MA Experiment ID: 20000527 Result: Down-regulated in Transcription
  misc_feature: MA Experiment 20000527 PARAMETER Experiment Name: At_10percent_PEG_P Parameter: Age (day) Value: 20
  misc_feature: MA Experiment 20000527 PARAMETER Experiment Name: At_10percent_PEG_P Parameter: Organism Value: A. thaliana
  misc_feature: MA Experiment 20000527 PARAMETER Experiment Name: At_10percent_PEG_P Parameter: Plant Line Value: WS
  misc_feature: MA Experiment 20000527 PARAMETER Experiment Name: At_10percent_PEG_P Parameter: Timepoint (day) Value: 20
  misc_feature: MA Experiment 20000527 PARAMETER Experiment Name: At_10percent_PEG_P Parameter: Tissue Value: Whole Plant
  misc_feature: MA Experiment 20000527 PARAMETER Experiment Name: At_10percent_PEG_P Parameter: Treatment Value: 10percent PEG vs. No Treatment
  misc_feature: MA Experiment ID: 20000573 Result: Down-regulated in Transcription
  misc_feature: MA Experiment 20000573 PARAMETER Experiment Name: At_100uM_ABA_Mutants__P Parameter: Organism Value: A. thaliana
  misc_feature: MA Experiment 20000573 PARAMETER Experiment Name: At_100uM_ABA_Mutants__P Parameter: Plant Line Value: CS22 vs. Ler wt
  misc_feature: MA Experiment 20000573 PARAMETER Experiment Name: At_100uM_ABA_Mutants__P Parameter: Timepoint (hr) Value: N/A
  misc_feature: MA Experiment 20000573 PARAMETER Experiment Name: At_100uM_ABA_Mutants__P Parameter: Tissue Value: Whole Plant
  misc_feature: MA Experiment 20000573 PARAMETER Experiment Name: At_100uM_ABA_Mutants__P Parameter: Treatment Value: None
  misc_feature: MA Experiment ID: 20000574 Result: Down-regulated in Transcription
  misc_feature: MA Experiment 20000574 PARAMETER Experiment Name: At_100uM_ABA_Mutants__P Parameter: Organism Value: A. thaliana
  misc_feature: MA Experiment 20000574 PARAMETER Experiment Name: At_100uM_ABA_Mutants__P Parameter: Plant Line Value: CS23 vs. Ler wt
  misc_feature: MA Experiment 20000574 PARAMETER Experiment Name: At_100uM_ABA_Mutants__P Parameter: Timepoint (hr) Value: N/A
  misc_feature: MA Experiment 20000574 PARAMETER Experiment Name: At_100uM_ABA_Mutants__P Parameter: Tissue Value: Whole Plant
  misc_feature: MA Experiment 20000574 PARAMETER Experiment Name: At_100uM_ABA_Mutants__P Parameter: Treatment Value: None
  misc_feature: MA Experiment ID: 20000794 Result: Up-regulated in Transcription
  misc_feature: MA Experiment 20000794 PARAMETER Experiment Name: At_Petals_P Parameter: Age (day) Value: 23-25 days
  misc_feature: MA Experiment 20000794 PARAMETER Experiment Name: At_Petals_P Parameter: Plant Line Value: WS
  misc_feature: MA Experiment 20000794 PARAMETER Experiment Name: At_Petals_P Parameter: Tissue Value: Petals vs. Whole plant
  misc_feature: MA Experiment ID: 20001555 Result: Up-regulated in Transcription
  misc_feature: MA Experiment 20001555 PARAMETER Experiment Name: At_Drought_Soil_Dry_P Parameter: Age (day) Value: 24
  misc_feature: MA Experiment 20001555 PARAMETER Experiment Name: At_Drought_Soil_Dry_P Parameter: Organism Value: A. thaliana
  misc_feature: MA Experiment 20001555 PARAMETER Experiment Name: At_Drought_Soil_Dry_P Parameter: Plant Line Value: WS
  misc_feature: MA Experiment 20001555 PARAMETER Experiment Name: At_Drought_Soil_Dry_P Parameter: Post Timepoint (hr) Value: None
  misc_feature: MA Experiment 20001555 PARAMETER Experiment Name: At_Drought_Soil_Dry_P Parameter: Post-Treatment Value: None
  misc_feature: MA Experiment 20001555 PARAMETER Experiment Name: At_Drought_Soil_Dry_P Parameter: Timepoint (day) Value: 10
  misc_feature: MA Experiment 20001555 PARAMETER Experiment Name: At_Drought_Soil_Dry_P Parameter: Treatment Value: Drought vs. No Drought
  misc_feature: MA Experiment ID: 20001905 Result: Up-regulated in Transcription
  misc_feature: MA Experiment 20001905 PARAMETER Experiment Name: At_Drought_Reproduction_P Parameter: Age (day) Value: 40
  misc_feature: MA Experiment 20001905 PARAMETER Experiment Name: At_Drought_Reproduction_P Parameter: Organism Value: A. thaliana
  misc_feature: MA Experiment 20001905 PARAMETER Experiment Name: At_Drought_Reproduction_P Parameter: Plant Line Value: WS
  misc_feature: MA Experiment 20001905 PARAMETER Experiment Name: At_Drought_Reproduction_P Parameter: Timepoint (day) Value: 10
  misc_feature: MA Experiment 20001905 PARAMETER Experiment Name: At_Drought_Reproduction_P Parameter: Tissue Value: Rosettes
  misc_feature: MA Experiment 20001905 PARAMETER Experiment Name: At_Drought_Reproduction_P Parameter: Treatment Value: Drought vs. No Drought
  misc_feature: MA Experiment ID: 20001906 Result: Up-regulated in Transcription
  misc_feature: MA Experiment 20001906 PARAMETER Experiment Name: At_Drought_Reproduction_P Parameter: Age (day) Value: 35
  misc_feature: MA Experiment 20001906 PARAMETER Experiment Name: At_Drought_Reproduction_P Parameter: Organism Value: A. thaliana
  misc_feature: MA Experiment 20001906 PARAMETER Experiment Name: At_Drought_Reproduction_P Parameter: Plant Line Value: WS
  misc_feature: MA Experiment 20001906 PARAMETER Experiment Name: At_Drought_Reproduction_P Parameter: Timepoint (day) Value: 5
  misc_feature: MA Experiment 20001906 PARAMETER Experiment Name: At_Drought_Reproduction_P Parameter: Tissue Value: Siliques
  misc_feature: MA Experiment 20001906 PARAMETER Experiment Name: At_Drought_Reproduction_P Parameter: Treatment Value: Drought vs. No Drought
  misc_feature: MA Experiment ID: 20001908 Result: Up-regulated in Transcription
  misc_feature: MA Experiment 20001908 PARAMETER Experiment Name: At_Drought_Reproduction_P Parameter: Age (day) Value: 40
  misc_feature: MA Experiment 20001908 PARAMETER Experiment Name: At_Drought_Reproduction_P Parameter: Organism Value: A. thaliana
  misc_feature: MA Experiment 20001908 PARAMETER Experiment Name: At_Drought_Reproduction_P Parameter: Plant Line Value: WS
  misc_feature: MA Experiment 20001908 PARAMETER Experiment Name: At_Drought_Reproduction_P Parameter: Timepoint (day) Value: 10
  misc_feature: MA Experiment 20001908 PARAMETER Experiment Name: At_Drought_Reproduction_P Parameter: Tissue Value: Siliques
  misc_feature: MA Experiment 20001908 PARAMETER Experiment Name: At_Drought_Reproduction_P Parameter: Treatment Value: Drought vs. No Drought
  misc_feature: MA Experiment ID: 20001910 Result: Up-regulated in Transcription
  misc_feature: MA Experiment 20001910 PARAMETER Experiment Name: At_Drought_Reproduction_P Parameter: Age (day) Value: 37
  misc_feature: MA Experiment 20001910 PARAMETER Experiment Name: At_Drought_Reproduction_P Parameter: Organism Value: A. thaliana
  misc_feature: MA Experiment 20001910 PARAMETER Experiment Name: At_Drought_Reproduction_P Parameter: Plant Line Value: WS
  misc_feature: MA Experiment 20001910 PARAMETER Experiment Name: At_Drought_Reproduction_P Parameter: Timepoint (day) Value: 7
  misc_feature: MA Experiment 20001910 PARAMETER Experiment Name: At_Drought_Reproduction_P Parameter: Tissue Value: Flowers
  misc_feature: MA Experiment 20001910 PARAMETER Experiment Name: At_Drought_Reproduction_P Parameter: Treatment Value: Drought vs. No Drought
atagaacattgaacaaaatgaagactaatctttttctctttctcatcttttcacttctcctatcattatcctcggccgagcaatgtggtcgccaagctggaggagcactctgccccaacggtctatgctgcagcgagttcggctggtgcggtaacaccgaaccatactgtaagcagcctggctgccaaagccagtgcactcccggtggtactcctcctggacccaccggcgatctttcgggcatcatttcaagttctcagttcgatgatatgcttaagcataggaatgatgccgcttgtcctgctagaggtttctacacttacaacgcctttatcaccgctgcaaagtccttccccggttttggcaccaccggagacaccgccacgaggaagaaggaggtcgccgccttcttcggccagacttcccatgaaactacaggtggatgggctacagcaccagacggaccatattcatggggctactgtttcaagcaagaacagaatcctgcttcagactactgtgaaccgagcgccacgtggccatgcgcatctggcaaacgctactacggaagaggaccaatgcaactgtcgtggaactacaattacggtctatgcggtagagcaataggagttgacttactcaacaaccctgaccttgttgccaacgacgcagtgatcgctttcaaagccgcgatttggttctggatgactgctcagcctcccaaaccgtcttgccatgccgtgatagccggccagtggcagccttcagacgccgaccgtgccgccgggagattaccgggttatggagtgattacgaacatcattaacggtggattggagtgtggacgtggccaagacgggagagtcgccgatcgtatagggttttatcagaggtattgtaacatatttggtgttaatcctggtggtaatcttgattgttacaaccaaagatccttcgttaacggcctcctcgaagctgctatttagtaacgagagtattattattataatataatacgcagctttgtattatcaaaacaataatatcagactaataaaactctttc

SEQ ID NO: 90062 - protein, 327 aa, Arabidopsis thaliana
  peptide (1)..(327): Ceres Seq. ID no. 12722059
  misc_feature (25)..(65): Pfam Name: Chitin recognition protein Pfam Description: Chitin recognition protein
  misc_feature (1)..(327): Homolog of NCBI NO: 320556 NR Description: chitinase (EC 3.2.1.14) precursor, basic - thaliana >gi|166666|gb|AAA32769.1| basic chitinase basic endochitinase [Arabidopsis thaliana]
  misc_feature (1)..(327): Homolog of NCBI NO: 5689102 NR Description: basic endochitinase [Arabidopsis thaliana]
  misc_feature (1)..(327): Homolog of NCBI NO: 5689130 NR Description: basic endochitinase [Arabidopsis thaliana]
  misc_feature (1)..(327): Homolog of NCBI NO: 5689110 NR Description: basic endochitinase [Arabidopsis thaliana]
  misc_feature (1)..(327): Homolog of NCBI NO: 5689118 NR Description: basic endochitinase [Arabidopsis thaliana]
  misc_feature (1)..(327): Homolog of NCBI NO: 227774 NR Description: basic chitinase
  misc_feature (6)..(327): Homolog of NCBI NO: 18399632 NR Description: glycosyl hydrolase family 19 (basic protein id: At3g12500.1 [Arabidopsis thaliana] Basic endochitinase precursor >gi|15451096|gb|AAK96819.1| basic
  misc_feature (1)..(327): Homolog of NCBI NO: 5689134 NR Description: basic endochitinase [Arabis gemmifera]
  misc_feature (5)..(327): Homolog of NCBI NO: 7798646 NR Description: class I chitinase [Arabis fecunda]
  misc_feature (7)..(327): Homolog of NCBI NO: 7798652 NR Description: class I chitinase [Arabis glabra]
RTLNKMKTNLFLFLIFSLLLSLSSAEQCGRQAGGALCPNGLCCSEFGWCGNTEPYCKQPGCQSQCTPGGTPPGPTGDLSGIISSSQFDDMLKHRNDAACPARGFYTYNAFITAAKSFPGFGTTGDTATRKKEVAAFFGQTSHETTGGWATAPDGPYSWGYCFKQEQNPASDYCEPSATWPCASGKRYYGRGPMQLSWNYNYGLCGRAIGVDLLNNPDLVANDAVIAFKAAIWFWMTAQPPKPSCHAVIAGQWQPSDADRAAGRLPGYGVITNIINGGLECGRGQDGRVADRIGFYQRYCNIFGVNPGGNLDCYNQRSFVNGLLEAAI

SEQ ID NO: 90063 - protein, 322 aa, Arabidopsis thaliana
  peptide (1)..(322): Ceres Seq. ID no. 12722060
  misc_feature (20)..(60): Pfam Name: Chitin recognition protein Pfam Description: Chitin recognition protein
  misc_feature (1)..(322): Homolog of NCBI NO: 320556 NR Description: chitinase (EC 3.2.1.14) precursor, basic - thaliana >gi|166666|gb|AAA32769.1| basic chitinase basic endochitinase [Arabidopsis thaliana]
  misc_feature (1)..(322): Homolog of NCBI NO: 5689102 NR Description: basic endochitinase [Arabidopsis thaliana]
  misc_feature (1)..(322): Homolog of NCBI NO: 5689130 NR Description: basic endochitinase [Arabidopsis thaliana]
  misc_feature (1)..(322): Homolog of NCBI NO: 5689110 NR Description: basic endochitinase [Arabidopsis thaliana]
  misc_feature (1)..(322): Homolog of NCBI NO: 5689118 NR Description: basic endochitinase [Arabidopsis thaliana]
  misc_feature (1)..(322): Homolog of NCBI NO: 227774 NR Description: basic chitinase
  misc_feature (1)..(322): Homolog of NCBI NO: 18399632 NR Description: glycosyl hydrolase family 19 (basic protein id: At3g12500.1 [Arabidopsis thaliana] Basic endochitinase precursor >gi|15451096|gb|AAK96819.1| basic
  misc_feature (1)..(322): Homolog of NCBI NO: 5689134 NR Description: basic endochitinase [Arabis gemmifera]
  misc_feature (1)..(322): Homolog of NCBI NO: 7798646 NR Description: class I chitinase [Arabis fecunda]
  misc_feature (2)..(322): Homolog of NCBI NO: 7798652 NR Description: class I chitinase [Arabis glabra]
MKTNLFLFLIFSLLLSLSSAEQCGRQAGGALCPNGLCCSEFGWCGNTEPYCKQPGCQSQCTPGGTPPGPTGDLSGIISSSQFDDMLKHRNDAACPARGFYTYNAFITAAKSFPGFGTTGDTATRKKEVAAFFGQTSHETTGGWATAPDGPYSWGYCFKQEQNPASDYCEPSATWPCASGKRYYGRGPMQLSWNYNYGLCGRAIGVDLLNNPDLVANDAVIAFKAAIWFWMTAQPPKPSCHAVIAGQWQPSDADRAAGRLPGYGVITNIINGGLECGRGQDGRVADRIGFYQRYCNIFGVNPGGNLDCYNQRSFVNGLLEAAI

SEQ ID NO: 90064 - protein, 238 aa, Arabidopsis thaliana
  peptide (1)..(238): Ceres Seq. ID no. 12722061
  misc_feature (1)..(238): Homolog of NCBI NO: 320556 NR Description: chitinase (EC 3.2.1.14) precursor, basic - thaliana >gi|166666|gb|AAA32769.1| basic chitinase basic endochitinase [Arabidopsis thaliana]
  misc_feature (1)..(238): Homolog of NCBI NO: 5689102 NR Description: basic endochitinase [Arabidopsis thaliana]
  misc_feature (1)..(238): Homolog of NCBI NO: 5689130 NR Description: basic endochitinase [Arabidopsis thaliana]
  misc_feature (1)..(238): Homolog of NCBI NO: 5689110 NR Description: basic endochitinase [Arabidopsis thaliana]
  misc_feature (1)..(238): Homolog of NCBI NO: 5689118 NR Description: basic endochitinase [Arabidopsis thaliana]
  misc_feature (1)..(238): Homolog of NCBI NO: 227774 NR Description: basic chitinase
  misc_feature (1)..(238): Homolog of NCBI NO: 18399632 NR Description: glycosyl hydrolase family 19 (basic protein id: At3g12500.1 [Arabidopsis thaliana] Basic endochitinase precursor >gi|15451096|gb|AAK96819.1| basic
  misc_feature (1)..(238): Homolog of NCBI NO: 5689134 NR Description: basic endochitinase [Arabis gemmifera]
  misc_feature (1)..(238): Homolog of NCBI NO: 7798646 NR Description: class I chitinase [Arabis fecunda]
  misc_feature (1)..(238): Homolog of NCBI NO: 7798652 NR Description: class I chitinase [Arabis glabra]
MLKHRNDAACPARGFYTYNAFITAAKSFPGFGTTGDTATRKKEVAAFFGQTSHETTGGWATAPDGPYSWGYCFKQEQNPASDYCEPSATWPCASGKRYYGRGPMQLSWNYNYGLCGRAIGVDLLNNPDLVANDAVIAFKAAIWFWMTAQPPKPSCHAVIAGQWQPSDADRAAGRLPGYGVITNIINGGLECGRGQDGRVADRIGFYQRYCNIFGVNPGGNLDCYNQRSFVNGLLEAAI

SEQ ID NO: 90065 - DNA, 2221 bp, Arabidopsis thaliana
  misc_feature (1)..(2221): Ceres Seq. ID no. 12722066
  misc_feature: MA Experiment ID: 20000179 Result: Up-regulated in Transcription
  misc_feature: MA Experiment 20000179 PARAMETER Experiment Name: At_Germinating_Seeds_P Parameter: Age (hr) Value: 6 vs. 0
  misc_feature: MA Experiment 20000179 PARAMETER Experiment Name: At_Germinating_Seeds_P Parameter: Tissue Value: Germinating Seeds
  misc_feature: MA Experiment ID: 20000180 Result: Up-regulated in Transcription
  misc_feature: MA Experiment 20000180 PARAMETER Experiment Name: At_Germinating_Seeds_P Parameter: Age (hr) Value: 24 vs. 0
  misc_feature: MA Experiment 20000180 PARAMETER Experiment Name: At_Germinating_Seeds_P Parameter: Tissue Value: Germinating Seeds
  misc_feature: MA Experiment ID: 20000182 Result: Down-regulated in Transcription
  misc_feature: MA Experiment 20000182 PARAMETER Experiment Name: At_2mM_SA_P Parameter: Age (day) Value: 14
  misc_feature: MA Experiment 20000182 PARAMETER Experiment Name: At_2mM_SA_P Parameter: Organism Value: A. thaliana
  misc_feature: MA Experiment 20000182 PARAMETER Experiment Name: At_2mM_SA_P Parameter: Plant Line Value: WS
  misc_feature: MA Experiment 20000182 PARAMETER Experiment Name: At_2mM_SA_P Parameter: Timepoint (hr) Value: 6
  misc_feature: MA Experiment 20000182 PARAMETER Experiment Name: At_2mM_SA_P Parameter: Tissue Value: Aerial
  misc_feature: MA Experiment 20000182 PARAMETER Experiment Name: At_2mM_SA_P Parameter: Treatment Value: 2mM SA vs. No Treatment
  misc_feature: MA Experiment ID: 20000184 Result: Down-regulated in Transcription
  misc_feature: MA Experiment 20000184 PARAMETER Experiment Name: At_Shoots__P Parameter: Age (day) Value: 7
  misc_feature: MA Experiment 20000184 PARAMETER Experiment Name: At_Shoots__P Parameter: Tissue Value: Shoots vs. Whole Plant
  misc_feature: MA Experiment ID: 20000227 Result: Down-regulated in Transcription
  misc_feature: MA Experiment 20000227 PARAMETER Experiment Name: At_Root-Tips-vs-Tops_P Parameter: Tissue Value: Root Tips vs. Root Tops
  misc_feature: MA Experiment ID: 20000234 Result: Up-regulated in Transcription
  misc_feature: MA Experiment 20000234 PARAMETER Experiment Name: At_Siliques_P Parameter: Age (day) Value: 21
  misc_feature: MA Experiment 20000234 PARAMETER Experiment Name: At_Siliques_P Parameter: Organism Value: A. thaliana
  misc_feature: MA Experiment 20000234 PARAMETER Experiment Name: At_Siliques_P Parameter: Plant Line Value: WS
  misc_feature: MA Experiment 20000234 PARAMETER Experiment Name: At_Siliques_P Parameter: Tissue Value: Less Than 5mm Siliques vs. Whole Plant
  misc_feature: MA Experiment ID: 20000235 Result: Up-regulated in Transcription
  misc_feature: MA Experiment 20000235 PARAMETER Experiment Name: At_Siliques_P Parameter: Age (day) Value: 21
  misc_feature: MA Experiment 20000235 PARAMETER Experiment Name: At_Siliques_P Parameter: Organism Value: A. thaliana
  misc_feature: MA Experiment 20000235 PARAMETER Experiment Name: At_Siliques_P Parameter: Plant Line Value: WS
  misc_feature: MA Experiment 20000235 PARAMETER Experiment Name: At_Siliques_P Parameter: Tissue Value: 5-10mm Siliques vs. Whole Plant
  misc_feature: MA Experiment ID: 20000264 Result: Up-regulated in Transcription
  misc_feature: MA Experiment 20000264 PARAMETER Experiment Name: At_Open_Flower_P Parameter: Age (day) Value: 21
  misc_feature: MA Experiment 20000264 PARAMETER Experiment Name: At_Open_Flower_P Parameter: Plant Line Value: WS
  misc_feature: MA Experiment 20000264 PARAMETER Experiment Name: At_Open_Flower_P Parameter: Tissue Value: Open Flower vs. Whole Plant
  misc_feature: MA Experiment ID: 20000265 Result: Up-regulated in Transcription
  misc_feature: MA Experiment 20000265 PARAMETER Experiment Name: At_Open_Flower_P Parameter: Age (day) Value: 21
  misc_feature: MA Experiment 20000265 PARAMETER Experiment Name: At_Open_Flower_P Parameter: Plant Line Value: WS
  misc_feature: MA Experiment 20000265 PARAMETER Experiment Name: At_Open_Flower_P Parameter: Tissue Value: Closed Flower vs. Whole Plant
  misc_feature: MA Experiment ID: 20000439 Result: Up-regulated in Transcription
  misc_feature: MA Experiment 20000439 PARAMETER Experiment Name: At_Roots__P Parameter: Age (day) Value: 14 vs. 21
  misc_feature: MA Experiment 20000439 PARAMETER Experiment Name: At_Roots__P Parameter: Organism Value: A. thaliana
  misc_feature: MA Experiment 20000439 PARAMETER Experiment Name: At_Roots__P Parameter: Tissue Value: Roots vs. Whole Plant
  misc_feature: MA Experiment ID: 20000441 Result: Down-regulated in Transcription
  misc_feature: MA Experiment 20000441 PARAMETER Experiment Name: At_1uM_BR-BRZ__P Parameter: Tissue Value: Shoot Apices
  misc_feature: MA Experiment 20000441 PARAMETER Experiment Name: At_1uM_BR-BRZ__P Parameter: Treatment Value: 1uM BR vs. No Treatment
  misc_feature: MA Experiment ID: 20000443 Result: Down-regulated in Transcription
  misc_feature: MA Experiment 20000443 PARAMETER Experiment Name: At_1uM_BR-BRZ__P Parameter: Tissue Value: Shoot Apices
  misc_feature: MA Experiment 20000443 PARAMETER Experiment Name: At_1uM_BR-BRZ__P Parameter: Treatment Value: 1uM BRZ vs. No Treatment
  misc_feature: MA Experiment ID: 20000495 Result: Up-regulated in Transcription
  misc_feature: MA Experiment 20000495 PARAMETER Experiment Name: At_Guard_Cells_P Parameter: Harvest Date Value: 8/2/2002
  misc_feature: MA Experiment 20000495 PARAMETER Experiment Name: At_Guard_Cells_P Parameter: Organism Value: A. thaliana
  misc_feature: MA Experiment 20000495 PARAMETER Experiment Name: At_Guard_Cells_P Parameter: Tissue Value: Guard Cells vs. Leaves
  misc_feature: MA Experiment ID: 20000527 Result: Down-regulated in Transcription
  misc_feature: MA Experiment 20000527 PARAMETER Experiment Name: At_10percent_PEG_P Parameter: Age (day) Value: 20
  misc_feature: MA Experiment 20000527 PARAMETER Experiment Name: At_10percent_PEG_P Parameter: Organism Value: A. thaliana
  misc_feature: MA Experiment 20000527 PARAMETER Experiment Name: At_10percent_PEG_P Parameter: Plant Line Value: WS
  misc_feature: MA Experiment 20000527 PARAMETER Experiment Name: At_10percent_PEG_P Parameter: Timepoint (day) Value: 20
  misc_feature: MA Experiment 20000527 PARAMETER Experiment Name: At_10percent_PEG_P Parameter: Tissue Value: Whole Plant
  misc_feature: MA Experiment 20000527 PARAMETER Experiment Name: At_10percent_PEG_P Parameter: Treatment Value: 10percent PEG vs. No Treatment
  misc_feature: MA Experiment ID: 20001248 Result: Down-regulated in Transcription
  misc_feature: MA Experiment 20001248 PARAMETER Experiment Name: At_Far-red-induction_P Parameter: Age (day) Value: 7
  misc_feature: MA Experiment 20001248 PARAMETER Experiment Name: At_Far-red-induction_P Parameter: Light Value: Far-red vs. White
  misc_feature: MA Experiment 20001248 PARAMETER Experiment Name: At_Far-red-induction_P Parameter: Organism Value: A. thaliana
  misc_feature: MA Experiment 20001248 PARAMETER Experiment Name: At_Far-red-induction_P Parameter: Plant Line Value: Columbia
  misc_feature: MA Experiment 20001248 PARAMETER Experiment Name: At_Far-red-induction_P Parameter: Timepoint (hr) Value: 4
  misc_feature: MA Experiment 20001248 PARAMETER Experiment Name: At_Far-red-induction_P Parameter: Tissue Value: Whole Plant
  misc_feature: MA Experiment ID: 20001450 Result: Down-regulated in Transcription
  misc_feature: MA Experiment 20001450 PARAMETER Experiment Name: At_Far-red-induction_P Parameter: Age (day) Value: 7
  misc_feature: MA Experiment 20001450 PARAMETER Experiment Name: At_Far-red-induction_P Parameter: Light Value: Far-red vs. White
  misc_feature: MA Experiment 20001450 PARAMETER Experiment Name: At_Far-red-induction_P Parameter: Organism Value: A. thaliana
  misc_feature: MA Experiment 20001450 PARAMETER Experiment Name: At_Far-red-induction_P Parameter: Plant Line Value: Columbia
  misc_feature: MA Experiment 20001450 PARAMETER Experiment Name: At_Far-red-induction_P Parameter: Timepoint (hr) Value: 8
  misc_feature: MA Experiment 20001450 PARAMETER Experiment Name: At_Far-red-induction_P Parameter: Tissue Value: Whole Plant
  misc_feature: MA Experiment ID: 20001451 Result: Down-regulated in Transcription
  misc_feature: MA Experiment 20001451 PARAMETER Experiment Name: At_Far-red-induction_P Parameter: Age (day) Value: 7
  misc_feature: MA Experiment 20001451 PARAMETER Experiment Name: At_Far-red-induction_P Parameter: Light Value: Far-red vs. White
  misc_feature: MA Experiment 20001451 PARAMETER Experiment Name: At_Far-red-induction_P Parameter: Organism Value: A. thaliana
  misc_feature: MA Experiment 20001451 PARAMETER Experiment Name: At_Far-red-induction_P Parameter: Plant Line Value: Columbia
  misc_feature: MA Experiment 20001451 PARAMETER Experiment Name: At_Far-red-induction_P Parameter: Timepoint (hr) Value: 24
  misc_feature: MA Experiment 20001451 PARAMETER Experiment Name: At_Far-red-induction_P Parameter: Tissue Value: Whole Plant
  misc_feature: MA Experiment ID: 20001458 Result: Up-regulated in Transcription
  misc_feature: MA Experiment 20001458 PARAMETER Experiment Name: At_50mM_NH4NO3_L-to-H_P Parameter: Age (day) Value: Undefined
  misc_feature: MA Experiment 20001458 PARAMETER Experiment Name: At_50mM_NH4NO3_L-to-H_P Parameter: Organism Value: Undefined
  misc_feature: MA Experiment 20001458 PARAMETER Experiment Name: At_50mM_NH4NO3_L-to-H_P Parameter: Plant Line Value: Undefined
  misc_feature: MA Experiment 20001458 PARAMETER Experiment Name: At_50mM_NH4NO3_L-to-H_P Parameter: Timepoint (hr) Value: 2
  misc_feature: MA Experiment 20001458 PARAMETER Experiment Name: At_50mM_NH4NO3_L-to-H_P Parameter: Tissue Value: Siliques
  misc_feature: MA Experiment 20001458 PARAMETER Experiment Name: At_50mM_NH4NO3_L-to-H_P Parameter: Treatment Value: 50mM NH4NO3 vs. 100mM Manitol
  misc_feature: MA Experiment ID: 20001554 Result: Up-regulated in Transcription
  misc_feature: MA Experiment 20001554 PARAMETER Experiment Name: At_Drought_Soil_Dry_P Parameter: Age (day) Value: 21
  misc_feature: MA Experiment 20001554 PARAMETER Experiment Name: At_Drought_Soil_Dry_P Parameter: Organism Value: A. thaliana
  misc_feature: MA Experiment 20001554 PARAMETER Experiment Name: At_Drought_Soil_Dry_P Parameter: Plant Line Value: WS
  misc_feature: MA Experiment 20001554 PARAMETER Experiment Name: At_Drought_Soil_Dry_P Parameter: Post Timepoint (hr) Value: None
  misc_feature: MA Experiment 20001554 PARAMETER Experiment Name: At_Drought_Soil_Dry_P Parameter: Post-Treatment Value: None
  misc_feature: MA Experiment 20001554 PARAMETER Experiment Name: At_Drought_Soil_Dry_P Parameter: Timepoint (day) Value: 7
  misc_feature: MA Experiment 20001554 PARAMETER Experiment Name: At_Drought_Soil_Dry_P Parameter: Treatment Value: Drought vs. No Drought
  misc_feature: MA Experiment ID: 20001556 Result: Up-regulated in Transcription
  misc_feature: MA Experiment 20001556 PARAMETER Experiment Name: At_Drought_Soil_Dry_P Parameter: Age (day) Value: 26
  misc_feature: MA Experiment 20001556 PARAMETER Experiment Name: At_Drought_Soil_Dry_P Parameter: Organism Value: A. thaliana
  misc_feature: MA Experiment 20001556 PARAMETER Experiment Name: At_Drought_Soil_Dry_P Parameter: Plant Line Value: WS
  misc_feature: MA Experiment 20001556 PARAMETER Experiment Name: At_Drought_Soil_Dry_P Parameter: Post Timepoint (hr) Value: None
  misc_feature: MA Experiment 20001556 PARAMETER Experiment Name: At_Drought_Soil_Dry_P Parameter: Post-Treatment Value: None
  misc_feature: MA Experiment 20001556 PARAMETER Experiment Name: At_Drought_Soil_Dry_P Parameter: Timepoint (day) Value: 12
  misc_feature: MA Experiment 20001556 PARAMETER Experiment Name: At_Drought_Soil_Dry_P Parameter: Treatment Value: Drought vs. No Drought
  misc_feature: MA Experiment ID: 20001560 Result: Down-regulated in Transcription
  misc_feature: MA Experiment 20001560 PARAMETER Experiment Name: At_Drought_Soil_Dry_P Parameter: Age (day) Value: 28
  misc_feature: MA Experiment 20001560 PARAMETER Experiment Name: At_Drought_Soil_Dry_P Parameter: Organism Value: A. thaliana
  misc_feature: MA Experiment 20001560 PARAMETER Experiment Name: At_Drought_Soil_Dry_P Parameter: Plant Line Value: WS
  misc_feature: MA Experiment 20001560 PARAMETER Experiment Name: At_Drought_Soil_Dry_P Parameter: Post Timepoint (hr) Value: None
  misc_feature: MA Experiment 20001560 PARAMETER Experiment Name: At_Drought_Soil_Dry_P Parameter: Post-Treatment Value: None
  misc_feature: MA Experiment 20001560 PARAMETER Experiment Name: At_Drought_Soil_Dry_P Parameter: Timepoint (day) Value: 14
  misc_feature: MA Experiment 20001560 PARAMETER Experiment Name: At_Drought_Soil_Dry_P Parameter: Treatment Value: Drought vs. No Drought
acattcttctctatcccaccaattccgatgtccctcgccgtcaaggatctctccaccgcttcatcctcttcatctaaggcgattccggtcaagatcattcctctccagtatcccgattccacctcttctgatcctcactgtcactccattccctttaatgatttcttctcccgatggacggcgaagatcaagcgcatgacgttcttcgactggattgatgcaatatttccttgcttcctttggattcggacttaccggtggcatcagtactttaagctcgatcttatggctggtatcaccgtcggtatcatgcttgttccccaggcaatgtcgtatgcaaggttagctgggcttcaaccaatatacggtctatactcctcatttgtgccggtattcgtgtatgccgtcttcggttcatcccgtcagcttgcagttggacctgtagcattagtttcccttctcgtttctaatgccttgagtggaattgttgatccatctgaagaattatacactgagcttgccattttgttggctcttatggtcggaatatttgagagcattatggggttcttgaggcttggatggcttattcgtttcataagtcactcagtcatttctggatttacaactgcttcagctgttgtaattgggttatcccaactgaaatacttcctagggtatagcgtttctcggagcagcaagattatgccagtaattgatagcataatagctggagctgatcagtttaagtggccacctttcttgttgggatgtaccattctggtgatccttttagtaatgaagcatgtgggaaaagcaaagaaggaacttcggttcatacgagcagcaggaccgctcacaggtcttgctcttggtacaatcattgcaaaagtgttccatccaccttccatcacactggtgggagatatacctcagggacttccaaagttttctttcccaaaaagttttgatcatgccaaattactgcttccaacatcggctctcattactggtgttgccatcttggaatctgtaggtattgcgaaagcactagccgcgaaaaatagatacgaattggattcaaattcagagttgtttggtcttggcgttgcaaatatatttgggtcactattctctgcatatccaactacaggatccttttctaggtcagctgtgaatagcgaaagtgaagccaagactggtctatcaggccttgtaacaggaatcatcattggatgttctctactgttcttgaccccaatgttcaaatttataccacagtgtgctttagcagcaatagttatctctgctgttagtggtttggtggactatgaaggggcaatctttctgtggcgtgtggacaagagagattttactctttggaccatcactagcaccaccactttgttctttggaatagagattggggtcctcattggtgttggtttttcacttgcatttgttatacacgagtctgcaaaccctcatatagctgtcttggggcgtcttccagggaccactgtgtacagaaacatgaaacagtatccagaggcatacacttacaacgggattgtgattgttcgaatcgatgctcccatttattttgccaacataagctacatcaaggacaggctacgagaatatgaagttgctatcgacaaacacacaagcaagggcccagatatggagaggatctactttgttatcctggaaatgtctcctgtcacatacatcgactcgagcgctgtagaagctttaaaagatttgtacgaggagtataaaacaaggggcattcagctagcgatttcgaacccaaacaaagaggttctcttgactctagcaagagcaggcattgtggaacttattggcaaagaatggttcttcgtgagagtacatgacgcagtccaagtttgtgttcattacgtcaatagacccacagatgtagaagaaagcagcaaaccaagcttatggagaagaagcggcctgaaaaactcatcgacctacactgaagttgaatcgaacatagttttagaggaaccattgttgtcaagagagaaatagagacattgaacacttcgattctttttacaataatgtaatgtatgtatcaaataaagcattcactttggttgagaaaaatatgattcccatttctctgtttcaaccttaaaaaactatttcttatgtaatgtatagaaaagcacaataaaaattggaagtc

SEQ ID NO: 90066 - protein, 686 aa, Arabidopsis thaliana
  peptide (1)..(686): Ceres Seq. ID no. 12722067
  misc_feature (235)..(475): Pfam Name: Permease family Pfam Description: Permease family
  misc_feature (11)..(686): Homolog of NCBI NO: 15240652 NR Description: sulfate transporter; protein id: At5g13550.1, by cDNA: gi_2626752 [Arabidopsis thaliana]
  misc_feature (11)..(686): Homolog of NCBI NO: 2626753 NR Description: sulfate transporter [Arabidopsis thaliana]
  misc_feature (11)..(686): Homolog of NCBI NO: 16197734 NR Description: sulfate transporter [Brassica napus]
  misc_feature (104)..(666): Homolog of NCBI NO: 37998897 NR Description: sulfate transporter [Brassica oleracea var.
  misc_feature (30)..(672): Homolog of NCBI NO: 20162451 NR Description: putative sulphate transporter [Oryza sativa]
  misc_feature (11)..(385): Homolog of NCBI NO: 11022647 NR Description: sulfate transporter-like protein [Arabidopsis
  misc_feature (11)..(348): Homolog of NCBI NO: 26453094 NR Description: putative sulfate transporter [Arabidopsis
  misc_feature (48)..(638): Homolog of NCBI NO: 11279063 NR Description: sulfate transport protein [imported] - thaliana >gi|3777483|dbj|BAA33932.1| sulfate transporter
  misc_feature (72)..(638): Homolog of NCBI NO: 13487717 NR Description: sulfate transporter 2 [Lycopersicon esculentum]
  misc_feature (72)..(638): Homolog of NCBI NO: 14270243 NR Description: sulfate transporter [Brassica napus]
TFFSIPPIPMSLAVKDLSTASSSSSKAIPVKIIPLQYPDSTSSDPHCHSIPFNDFFSRWTAKIKRMTFFDWIDAIFPCFLWIRTYRWHQYFKLDLMAGITVGIMLVPQAMSYARLAGLQPIYGLYSSFVPVFVYAVFGSSRQLAVGPVALVSLLVSNALSGIVDPSEELYTELAILLALMVGIFESIMGFLRLGWLIRFISHSVISGFTTASAVVIGLSQLKYFLGYSVSRSSKIMPVIDSIIAGADQFKWPPFLLGCTILVILLVMKHVGKAKKELRFIRAAGPLTGLALGTIIAKVFHPPSITLVGDIPQGLPKFSFPKSFDHAKLLLPTSALITGVAILESVGIAKALAAKNRYELDSNSELFGLGVANIFGSLFSAYPTTGSFSRSAVNSESEAKTGLSGLVTGIIIGCSLLFLTPMFKFIPQCALAAIVISAVSGLVDYEGAIFLWRVDKRDFTLWTITSTTTLFFGIEIGVLIGVGFSLAFVIHESANPHIAVLGRLPGTTVYRNMKQYPEAYTYNGIVIVRIDAPIYFANISYIKDRLREYEVAIDKHTSKGPDMERIYFVILEMSPVTYIDSSAVEALKDLYEEYKTRGIQLAISNPNKEVLLTLARAGIVELIGKEWFFVRVHDAVQVCVHYVNRPTDVEESSKPSLWRRSGLKNSSTYTEVESNIVLEEPLLSREK

SEQ ID NO: 90067 - protein, 677 aa, Arabidopsis thaliana
  peptide (1)..(677): Ceres Seq. ID no. 12722068
  misc_feature (226)..(466): Pfam Name: Permease family Pfam Description: Permease family
  misc_feature (2)..(677): Homolog of NCBI NO: 15240652 NR Description: sulfate transporter; protein id: At5g13550.1, by cDNA: gi_2626752 [Arabidopsis thaliana]
  misc_feature (2)..(677): Homolog of NCBI NO: 2626753 NR Description: sulfate transporter [Arabidopsis thaliana]
  misc_feature (2)..(677): Homolog of NCBI NO: 16197734 NR Description: sulfate transporter [Brassica napus]
  misc_feature (95)..(657): Homolog of NCBI NO: 37998897 NR Description: sulfate transporter [Brassica oleracea var.
  misc_feature (21)..(663): Homolog of NCBI NO: 20162451 NR Description: putative sulphate transporter [Oryza sativa]
  misc_feature (2)..(376): Homolog of NCBI NO: 11022647 NR Description: sulfate transporter-like protein [Arabidopsis
  misc_feature (2)..(339): Homolog of NCBI NO: 26453094 NR Description: putative sulfate transporter [Arabidopsis
  misc_feature (39)..(629): Homolog of NCBI NO: 11279063 NR Description: sulfate transport protein [imported] - thaliana >gi|3777483|dbj|BAA33932.1| sulfate transporter
  misc_feature (63)..(629): Homolog of NCBI NO: 13487717 NR Description: sulfate transporter 2 [Lycopersicon esculentum]
  misc_feature (63)..(629): Homolog of NCBI NO: 14270243 NR Description: sulfate transporter [Brassica napus]
MSLAVKDLSTASSSSSKAIPVKIIPLQYPDSTSSDPHCHSIPFNDFFSRWTAKIKRMTFFDWIDAIFPCFLWIRTYRWHQYFKLDLMAGITVGIMLVPQAMSYARLAGLQPIYGLYSSFVPVFVYAVFGSSRQLAVGPVALVSLLVSNALSGIVDPSEELYTELAILLALMVGIFESIMGFLRLGWLIRFISHSVISGFTTASAVVIGLSQLKYFLGYSVSRSSKIMPVIDSIIAGADQFKWPPFLLGCTILVILLVMKHVGKAKKELRFIRAAGPLTGLALGTIIAKVFHPPSITLVGDIPQGLPKFSFPKSFDHAKLLLPTSALITGVAILESVGIAKALAAKNRYELDSNSELFGLGVANIFGSLFSAYPTTGSFSRSAVNSESEAKTGLSGLVTGIIIGCSLLFLTPMFKFIPQCALAAIVISAVSGLVDYEGAIFLWRVDKRDFTLWTITSTTTLFFGIEIGVLIGVGFSLAFVIHESANPHIAVLGRLPGTTVYRNMKQYPEAYTYNGIVIVRIDAPIYFANISYIKDRLREYEVAIDKHTSKGPDMERIYFVILEMSPVTYIDSSAVEALKDLYEEYKTRGIQLAISNPNKEVLLTLARAGIVELIGKEWFFVRVHDAVQVCVHYVNRPTDVEESSKPSLWRRSGLKNSSTYTEVESNIVLEEPLLSREK

SEQ ID NO: 90068 - protein, 621 aa, Arabidopsis thaliana
  peptide (1)..(621): Ceres Seq. ID no. 12722069
  misc_feature (170)..(410): Pfam Name: Permease family Pfam Description: Permease family
  misc_feature (1)..(621): Homolog of NCBI NO: 15240652 NR Description: sulfate transporter; protein id: At5g13550.1, by cDNA: gi_2626752 [Arabidopsis thaliana]
  misc_feature (1)..(621): Homolog of NCBI NO: 2626753 NR Description: sulfate transporter [Arabidopsis thaliana]
  misc_feature (1)..(621): Homolog of NCBI NO: 16197734 NR Description: sulfate transporter [Brassica napus]
  misc_feature (39)..(601): Homolog of NCBI NO: 37998897 NR Description: sulfate transporter [Brassica oleracea var.
  misc_feature (1)..(607): Homolog of NCBI NO: 20162451 NR Description: putative sulphate transporter [Oryza sativa]
  misc_feature (1)..(320): Homolog of NCBI NO: 11022647 NR Description: sulfate transporter-like protein [Arabidopsis
  misc_feature (1)..(283): Homolog of NCBI NO: 26453094 NR Description: putative sulfate transporter [Arabidopsis
  misc_feature (1)..(573): Homolog of NCBI NO: 11279063 NR Description: sulfate transport protein [imported] - thaliana >gi|3777483|dbj|BAA33932.1| sulfate transporter
  misc_feature (7)..(573): Homolog of NCBI NO: 13487717 NR Description: sulfate transporter 2 [Lycopersicon esculentum]
  misc_feature (7)..(573): Homolog of NCBI NO: 14270243 NR Description: sulfate transporter [Brassica napus]
MTFFDWIDAIFPCFLWIRTYRWHQYFKLDLMAGITVGIMLVPQAMSYARLAGLQPIYGLYSSFVPVFVYAVFGSSRQLAVGPVALVSLLVSNALSGIVDPSEELYTELAILLALMVGIFESIMGFLRLGWLIRFISHSVISGFTTASAVVIGLSQLKYFLGYSVSRSSKIMPVIDSIIAGADQFKWPPFLLGCTILVILLVMKHVGKAKKELRFIRAAGPLTGLALGTIIAKVFHPPSITLVGDIPQGLPKFSFPKSFDHAKLLLPTSALITGVAILESVGIAKALAAKNRYELDSNSELFGLGVANIFGSLFSAYPTTGSFSRSAVNSESEAKTGLSGLVTGIIIGCSLLFLTPMFKFIPQCALAAIVISAVSGLVDYEGAIFLWRVDKRDFTLWTITSTTTLFFGIEIGVLIGVGFSLAFVIHESANPHIAVLGRLPGTTVYRNMKQYPEAYTYNGIVIVRIDAPIYFANISYIKDRLREYEVAIDKHTSKGPDMERIYFVILEMSPVTYIDSSAVEALKDLYEEYKTRGIQLAISNPNKEVLLTLARAGIVELIGKEWFFVRVHDAVQVCVHYVNRPTDVEESSKPSLWRRSGLKNSSTYTEVESNIVLEEPLLSREK

SEQ ID NO: 90069 - DNA, 1913 bp, Arabidopsis thaliana
  misc_feature (1)..(1913): Ceres Seq. ID no. 12722077
gtcaaatcaagttttatggatctgagaatttttgttctgtttgagttggttgtaaaccccacaaacacaacaattttgataatttgtttgacaccaaaaaagtagaaagctttttcctttagggtttcctttttcgatcgaatggcacatcgtcaattgtatagctacgcccttcaaccttcttatgctgctgctgcctccaccgtatctccagctcctcctccgccgcaacaaccactgccgccaaaaaccggtctttcttctctctacggttcttctgctgaccattactttccggataccacgtatcgtttcttagctcgtgatggatccgaagctttgagcaactattcagggactcttgcatcgtcttcctctatgtaccatcatttgcctaacacgacggcatcgcatttggcgtatcctcagctgcttcagcatcaggaagttgcttggccacctggtgtggaggttcccggtgctgcttccgccgtcgagccacttcctcctggtgtcaaacgcacctctgaagcgctctactatccgactctgttgggtgcccataatacaattggtcaaaccgaagcttggtatactacagactattttaccaagcgccctaagttggagagtacaagccatttgcctatatatccacagagggcaggagagaaagattgtacccactatatgcaaacaagaacatgtaaatttggagaaagctgcaggtttgatcatcctatttgggttcctgagggcggaatcccagattggaaagaggcaccagttgttccaaatgaagagtatcctgagagaccaggagaaccagattgtccttactatataaaaacacaacgctgcaaatatggttcaaagtgcaaatttaatcatccaagagaagaggctgcagttagtgttgaaactcaagattcattgcctgagaggccttctgaacctatgtgcacattctacatgaagactggaaaatgtaaatttggtttgtcatgcaaattccaccatccaaaggatatccagctaccatcatcgagtcaagatattggtagcagtgtggggttaaccagtgagcctgatgccacaaacaatccgcatgtcacatttaccccagcattgtatcacaactcaaaaggactacctgttagatcgggtgaagtggactgcccattctatctcaaaacgggaagctgcaagtatggagccacttgtcgctacaatcatcctgagaggactgcattcattccccaagctgctggggtaaactattctctagtttcatcgaacactgcgaatttgaaccttgggctggttacaccagctacctctttctatcagactcttactcaacccacgcttggagtgatttcagcaacttatccccaaagacctggacaatcagaatgtgactactacatgaagacaggggagtgcaagtttggagagagatgcaaattccatcacccagcagataggttaagtgcaatgaccaaacaagctcctcaacaaccaaatgtaaagctgagtcttgcagggtatcccagaagagagggtgcgcttaattgcccttattacatgaagacaggaacttgcaaatacggggcaacatgcaagtttgaccatcctcctccaggtgaggtgatggctaagaccacttcagaagccgatgctgctggagcaaccaacaccgacactactcaatgagtttcccagctttgtgtaacataagatgatatcttgttgtaatcctagtttacttcctatgtactgcatctgtttcgtttcgaaatgcttatcgctcgtgagttctctacttctctttatcatcctaaaacaaaaaagatatcgttgagtgagtcttcttttactcagttgagctcataaaagcaaaattgttcatc

SEQ ID NO: 90070 - protein, 524 aa, Arabidopsis thaliana
  peptide (1)..(524): Ceres Seq. ID no. 12722078
  misc_feature (226)..(252): Pfam Name: Zinc finger C-x8-C-x5-C-x3-H type (and similar) Pfam Description: Zinc finger C-x8-C-x5-C-x3-H type (and similar)
  misc_feature (1)..(524): Homolog of NCBI NO: 22331028 NR Description: hypothetical protein; protein id: At3g12680.1, by cDNA: gi_16797660 [Arabidopsis thaliana]
  misc_feature (197)..(524): Homolog of NCBI NO: 12321969 NR Description: zinc finger protein, putative, 5' partial;
  misc_feature (184)..(524): Homolog of NCBI NO: 11994409 NR Description: zinc finger protein-like [Arabidopsis thaliana]
  misc_feature (126)..(443): Homolog of NCBI NO: 22507458 NR Description: Unknown (protein for MGC:30371) [Mus musculus]
  misc_feature (200)..(511): Homolog of NCBI NO: 22507458 NR Description: Unknown (protein for MGC:30371) [Mus musculus]
  misc_feature (1)..(139): Homolog of NCBI NO: 11994410 NR Description: emb|CAB71107.1~gene_id:MBK21.6~similar to unknown
  misc_feature (112)..(499): Homolog of NCBI NO: 34912676 NR Description: P0686E09.7 [Oryza sativa (japonica
  misc_feature (171)..(499): Homolog of NCBI NO: 25409067 NR Description: hypothetical protein At2g47850 [imported] - thaliana >gi|3738297|gb|AAC63639.1| unknown protein [Arabidopsis
  misc_feature (171)..(499): Homolog of NCBI NO: 30690809 NR Description: expressed protein [Arabidopsis thaliana]
  misc_feature (221)..(506): Homolog of NCBI NO: 34906988 NR Description: putative zinc finger protein [Oryza sativa
MAHRQLYSYALQPSYAAAASTVSPAPPPPQQPLPPKTGLSSLYGSSADHYFPDTTYRFLARDGSEALSNYSGTLASSSSMYHHLPNTTASHLAYPQLLQHQEVAWPPGVEVPGAASAVEPLPPGVKRTSEALYYPTLLGAHNTIGQTEAWYTTDYFTKRPKLESTSHLPIYPQRAGEKDCTHYMQTRTCKFGESCRFDHPIWVPEGGIPDWKEAPVVPNEEYPERPGEPDCPYYIKTQRCKYGSKCKFNHPREEAAVSVETQDSLPERPSEPMCTFYMKTGKCKFGLSCKFHHPKDIQLPSSSQDIGSSVGLTSEPDATNNPHVTFTPALYHNSKGLPVRSGEVDCPFYLKTGSCKYGATCRYNHPERTAFIPQAAGVNYSLVSSNTANLNLGLVTPATSFYQTLTQPTLGVISATYPQRPGQSECDYYMKTGECKFGERCKFHHPADRLSAMTKQAPQQPNVKLSLAGYPRREGALNCPYYMKTGTCKYGATCKFDHPPPGEVMAKTTSEADAAGATNTDTTQ

SEQ ID NO: 90071 - protein, 445 aa, Arabidopsis thaliana
  peptide (1)..(445): Ceres Seq. ID no. 12722079
  misc_feature (147)..(173): Pfam Name: Zinc finger C-x8-C-x5-C-x3-H type (and similar) Pfam Description: Zinc finger C-x8-C-x5-C-x3-H type (and similar)
  misc_feature (1)..(445): Homolog of NCBI NO: 22331028 NR Description: hypothetical protein; protein id: At3g12680.1, by cDNA: gi_16797660 [Arabidopsis thaliana]
  misc_feature (118)..(445): Homolog of NCBI NO: 12321969 NR Description: zinc finger protein, putative, 5' partial;
  misc_feature (105)..(445): Homolog of NCBI NO: 11994409 NR Description: zinc finger protein-like [Arabidopsis thaliana]
  misc_feature (47)..(364): Homolog of NCBI NO: 22507458 NR Description: Unknown (protein for MGC:30371) [Mus musculus]
  misc_feature (121)..(432): Homolog of NCBI NO: 22507458 NR Description: Unknown (protein for MGC:30371) [Mus musculus]
  misc_feature (1)..(60): Homolog of NCBI NO: 11994410 NR Description: emb|CAB71107.1~gene_id:MBK21.6~similar to unknown
  misc_feature (33)..(420): Homolog of NCBI NO: 34912676 NR Description: P0686E09.7 [Oryza sativa (japonica
  misc_feature (92)..(420): Homolog of NCBI NO: 25409067 NR Description: hypothetical protein At2g47850 [imported] - thaliana >gi|3738297|gb|AAC63639.1| unknown protein [Arabidopsis
  misc_feature (92)..(420): Homolog of NCBI NO: 30690809 NR Description: expressed protein [Arabidopsis thaliana]
  misc_feature (142)..(427): Homolog of NCBI NO: 34906988 NR Description: putative zinc finger protein [Oryza sativa
MYHHLPNTTASHLAYPQLLQHQEVAWPPGVEVPGAASAVEPLPPGVKRTSEALYYPTLLGAHNTIGQTEAWYTTDYFTKRPKLESTSHLPIYPQRAGEKDCTHYMQTRTCKFGESCRFDHPIWVPEGGIPDWKEAPVVPNEEYPERPGEPDCPYYIKTQRCKYGSKCKFNHPREEAAVSVETQDSLPERPSEPMCTFYMKTGKCKFGLSCKFHHPKDIQLPSSSQDIGSSVGLTSEPDATNNPHVTFTPALYHNSKGLPVRSGEVDCPFYLKTGSCKYGATCRYNHPERTAFIPQAAGVNYSLVSSNTANLNLGLVTPATSFYQTLTQPTLGVISATYPQRPGQSECDYYMKTGECKFGERCKFHHPADRLSAMTKQAPQQPNVKLSLAGYPRREGALNCPYYMKTGTCKYGATCKFDHPPPGEVMAKTTSEADAAGATNTDTTQ

SEQ ID NO: 90072 - protein, 341 aa, Arabidopsis thaliana
  peptide (1)..(341): Ceres Seq. ID no. 12722080
  misc_feature (43)..(69): Pfam Name: Zinc finger C-x8-C-x5-C-x3-H type (and similar) Pfam Description: Zinc finger C-x8-C-x5-C-x3-H type (and similar)
  misc_feature (1)..(341): Homolog of NCBI NO: 22331028 NR Description: hypothetical protein; protein id: At3g12680.1, by cDNA: gi_16797660 [Arabidopsis thaliana]
  misc_feature (14)..(341): Homolog of NCBI NO: 12321969 NR Description: zinc finger protein, putative, 5' partial;
  misc_feature (1)..(341): Homolog of NCBI NO: 11994409 NR Description: zinc finger protein-like [Arabidopsis thaliana]
  misc_feature (1)..(260): Homolog of NCBI NO: 22507458 NR Description: Unknown (protein for MGC:30371) [Mus musculus]
  misc_feature (17)..(328): Homolog of NCBI NO: 22507458 NR Description: Unknown (protein for MGC:30371) [Mus musculus]
  misc_feature (1)..(316): Homolog of NCBI NO: 34912676 NR Description: P0686E09.7 [Oryza sativa (japonica
  misc_feature (1)..(316): Homolog of NCBI NO: 25409067 NR Description: hypothetical protein At2g47850 [imported] - thaliana >gi|3738297|gb|AAC63639.1| unknown protein [Arabidopsis
  misc_feature (1)..(316): Homolog of NCBI NO: 30690809 NR Description: expressed protein [Arabidopsis thaliana]
  misc_feature (38)..(323): Homolog of NCBI NO: 34906988 NR Description: putative zinc finger protein [Oryza sativa
  misc_feature (39)..(58): Homolog of NCBI NO: 34906988 NR Description: putative zinc finger protein [Oryza sativa
MQTRTCKFGESCRFDHPIWVPEGGIPDWKEAPVVPNEEYPERPGEPDCPYYIKTQRCKYGSKCKFNHPREEAAVSVETQDSLPERPSEPMCTFYMKTGKCKFGLSCKFHHPKDIQLPSSSQDIGSSVGLTSEPDATNNPHVTFTPALYHNSKGLPVRSGEVDCPFYLKTGSCKYGATCRYNHPERTAFIPQAAGVNYSLVSSNTANLNLGLVTPATSFYQTLTQPTLGVISATYPQRPGQSECDYYMKTGECKFGERCKFHHPADRLSAMTKQAPQQPNVKLSLAGYPRREGALNCPYYMKTGTCKYGATCKFDHPPPGEVMAKTTSEADAAGATNTDTTQ

SEQ ID NO: 90073 - DNA, 798 bp, Arabidopsis thaliana
  misc_feature (1)..(798): Ceres Seq. ID no. 12722081
  misc_feature: MA Experiment ID: 20000182 Result: Down-regulated in Transcription
  misc_feature: MA Experiment 20000182 PARAMETER Experiment Name: At_2mM_SA_P Parameter: Age (day) Value: 14
  misc_feature: MA Experiment 20000182 PARAMETER Experiment Name: At_2mM_SA_P Parameter: Organism Value: A. thaliana
  misc_feature: MA Experiment 20000182 PARAMETER Experiment Name: At_2mM_SA_P Parameter: Plant Line Value: WS
  misc_feature: MA Experiment 20000182 PARAMETER Experiment Name: At_2mM_SA_P Parameter: Timepoint (hr) Value: 6
  misc_feature: MA Experiment 20000182 PARAMETER Experiment Name: At_2mM_SA_P Parameter: Tissue Value: Aerial
  misc_feature: MA Experiment 20000182 PARAMETER Experiment Name: At_2mM_SA_P Parameter: Treatment Value: 2mM SA vs. No Treatment
  misc_feature: MA Experiment ID: 20000185 Result: Down-regulated in Transcription
  misc_feature: MA Experiment 20000185 PARAMETER Experiment Name: At_Roots__P Parameter: Age (day) Value: 7 vs. 21
  misc_feature: MA Experiment 20000185 PARAMETER Experiment Name: At_Roots__P Parameter: Organism Value: A. thaliana
  misc_feature: MA Experiment 20000185 PARAMETER Experiment Name: At_Roots__P Parameter: Tissue Value: Roots vs. Whole Plant
  misc_feature: MA Experiment ID: 20000437 Result: Down-regulated in Transcription
  misc_feature: MA Experiment 20000437 PARAMETER Experiment Name: At_Drought_P Parameter: Age (day) Value: 8
  misc_feature: MA Experiment 20000437 PARAMETER Experiment Name: At_Drought_P Parameter: Organism Value: A. thaliana
  misc_feature: MA Experiment 20000437 PARAMETER Experiment Name: At_Drought_P Parameter: Plant Line Value: WS
  misc_feature: MA Experiment 20000437 PARAMETER Experiment Name: At_Drought_P Parameter: Timepoint (hr) Value: 24
  misc_feature: MA Experiment 20000437 PARAMETER Experiment Name: At_Drought_P Parameter: Tissue Value: Whole Plant
  misc_feature: MA Experiment 20000437 PARAMETER Experiment Name: At_Drought_P Parameter: Treatment Value: Drought vs. No Drought
  misc_feature: MA Experiment ID: 20000439 Result: Down-regulated in Transcription
  misc_feature: MA Experiment 20000439 PARAMETER Experiment Name: At_Roots__P Parameter: Age (day) Value: 14 vs. 21
  misc_feature: MA Experiment 20000439 PARAMETER Experiment Name: At_Roots__P Parameter: Organism Value: A. thaliana
  misc_feature: MA Experiment 20000439 PARAMETER Experiment Name: At_Roots__P Parameter: Tissue Value: Roots vs. Whole Plant
  misc_feature: MA Experiment ID: 20001248 Result: Down-regulated in Transcription
  misc_feature: MA Experiment 20001248 PARAMETER Experiment Name: At_Far-red-induction_P Parameter: Age (day) Value: 7
  misc_feature: MA Experiment 20001248 PARAMETER Experiment Name: At_Far-red-induction_P Parameter: Light Value: Far-red vs. White
  misc_feature: MA Experiment 20001248 PARAMETER Experiment Name: At_Far-red-induction_P Parameter: Organism Value: A. thaliana
  misc_feature: MA Experiment 20001248 PARAMETER Experiment Name: At_Far-red-induction_P Parameter: Plant Line Value: Columbia
  misc_feature: MA Experiment 20001248 PARAMETER Experiment Name: At_Far-red-induction_P Parameter: Timepoint (hr) Value: 4
  misc_feature: MA Experiment 20001248 PARAMETER Experiment Name: At_Far-red-induction_P Parameter: Tissue Value: Whole Plant
gacataacagagcgtcagaaccattggttccaaatttctcgctgccttattcttatcgtcatcctccgaccaaagttccatcttctgcacagagatgttgatgaagcactgttttgtgtctcataacgccaatgatctctgtttctctttctccaactccaaattcaatcttgcaagctgcccaaagaagccacctcgtctcacctgcgttgtcaatgttggattccaagatatcgctgaggtcatccacaacaaggtactcatagctgctgggacttctgctgtgattgggcagctctcaaagccattcacttctgtcgttttgtatgggaaaaatctggactttagaagtgtctttcaagctggaggtttcccttcaacacattcttcttctgttgtggctgcagcaactgctattgcttttgaaaggggatttgctgactccatttttggtctaactgtggtttatgctggccttatcatgtatgatgcccagggggtgaggagagaagttggaaaacatgccaaagtgttgaacaaactaacagctaatgctcgtagaagtgaagtaatgagtttaaagggcaacgaatctaacaaagctttgacatcagaagagatcagtgaggagattgctcctccattgaaagaatcaataggacacactgaagttgaagtcatagcaggggctttgttcggtttcttagttaccctcagtgtttattccctgatgtaaaaaagctcccaactttataaaaactatatattttttgtgttgataagaaagaaagagaattt

SEQ ID NO: 90074 - protein, 213 aa, Arabidopsis thaliana
  peptide (1)..(213): Ceres Seq. ID no. 12722082
  misc_feature (48)..(213): Pfam Name: Divergent PAP2 family Pfam Description: Divergent PAP2 family
  misc_feature (1)..(213): Homolog of NCBI NO: 18399713 NR Description: Expressed protein; protein id: At3g12685.1, by cDNA: gi_15810238, supported by cDNA: gi_20465354 [Arabidopsis >gi|15810239|gb|AAL07237.1| unknown protein [Arabidopsis
  misc_feature (1)..(213): Homolog of NCBI NO: 11994410 NR Description: emb|CAB71107.1~gene_id:MBK21.6~similar to unknown
  misc_feature (49)..(210): Homolog of NCBI NO: 15615964 NR Description: BH3402~unknown conserved protein [Bacillus
  misc_feature (49)..(207): Homolog of NCBI NO: 16080259 NR Description: similar to hypothetical proteins [Bacillus
  misc_feature (50)..(205): Homolog of NCBI NO: 16804424 NR Description: similar to B. subtilis YuiD protein [Listeria
  misc_feature (53)..(212): Homolog of NCBI NO: 23099802 NR Description: hypothetical protein [Oceanobacillus iheyensis >gi|22778033|dbj|BAC14303.1| hypothetical conserved protein
  misc_feature (50)..(205): Homolog of NCBI NO: 16801547 NR Description: similar to B. subtilis YuiD protein [Listeria
  misc_feature (49)..(159): Homolog of NCBI NO: 15672981 NR Description: conserved hypothetical protein [Lactococcus subsp. lactis] >gi|25303764|pir||G86749 conserved hypothetical
  misc_feature (47)..(150): Homolog of NCBI NO: 22297563 NR Description: ORF_ID:tll0019~hypothetical protein
  misc_feature (45)..(150): Homolog of NCBI NO: 16329803 NR Description: hypothetical protein [Synechocystis sp. PCC 6803]
MLMKHCFVSHNANDLCFSFSNSKFNLASCPKKPPRLTCVVNVGFQDIAEVIHNKVLIAAGTSAVIGQLSKPFTSVVLYGKNLDFRSVFQAGGFPSTHSSSVVAAATAIAFERGFADSIFGLTVVYAGLIMYDAQGVRREVGKHAKVLNKLTANARRSEVMSLKGNESNKALTSEEISEEIAPPLKESIGHTEVEVIAGALFGFLVTLSVYSLM

SEQ ID NO: 90075 - protein, 211 aa, Arabidopsis thaliana
  peptide (1)..(211): Ceres Seq. ID no. 12722083
  misc_feature (46)..(211): Pfam Name: Divergent PAP2 family Pfam Description: Divergent PAP2 family
  misc_feature (1)..(211): Homolog of NCBI NO: 18399713 NR Description: Expressed protein; protein id: At3g12685.1, by cDNA: gi_15810238, supported by cDNA: gi_20465354 [Arabidopsis >gi|15810239|gb|AAL07237.1| unknown protein [Arabidopsis
  misc_feature (1)..(211): Homolog of NCBI NO: 11994410 NR Description: emb|CAB71107.1~gene_id:MBK21.6~similar to unknown
  misc_feature (47)..(208): Homolog of NCBI NO: 15615964 NR Description: BH3402~unknown conserved protein [Bacillus
  misc_feature (47)..(205): Homolog of NCBI NO: 16080259 NR Description: similar to hypothetical proteins [Bacillus
  misc_feature (48)..(203): Homolog of NCBI NO: 16804424 NR Description: similar to B. subtilis YuiD protein [Listeria
  misc_feature (51)..(210): Homolog of NCBI NO: 23099802 NR Description: hypothetical protein [Oceanobacillus iheyensis >gi|22778033|dbj|BAC14303.1| hypothetical conserved protein
  misc_feature (48)..(203): Homolog of NCBI NO: 16801547 NR Description: similar to B. subtilis YuiD protein [Listeria
  misc_feature (47)..(157): Homolog of NCBI NO: 15672981 NR Description: conserved hypothetical protein [Lactococcus subsp. lactis] >gi|25303764|pir||G86749 conserved hypothetical
  misc_feature (45)..(148): Homolog of NCBI NO: 22297563 NR Description: ORF_ID:tll0019~hypothetical protein
  misc_feature (43)..(148): Homolog of NCBI NO: 16329803 NR Description: hypothetical protein [Synechocystis sp. PCC 6803]
MKHCFVSHNANDLCFSFSNSKFNLASCPKKPPRLTCVVNVGFQDIAEVIHNKVLIAAGTSAVIGQLSKPFTSVVLYGKNLDFRSVFQAGGFPSTHSSSVVAAATAIAFERGFADSIFGLTVVYAGLIMYDAQGVRREVGKHAKVLNKLTANARRSEVMSLKGNESNKALTSEEISEEIAPPLKESIGHTEVEVIAGALFGFLVTLSVYSLM

SEQ ID NO: 90076 - DNA, 680 bp, Arabidopsis thaliana
  misc_feature (1)..(680): Ceres Seq. ID no. 12722096
  misc_feature: MA Experiment ID: 20000574 Result: Up-regulated in Transcription
  misc_feature: MA Experiment 20000574 PARAMETER Experiment Name: At_100uM_ABA_Mutants__P Parameter: Organism Value: A. thaliana
  misc_feature: MA Experiment 20000574 PARAMETER Experiment Name: At_100uM_ABA_Mutants__P Parameter: Plant Line Value: CS23 vs. Ler wt
  misc_feature: MA Experiment 20000574 PARAMETER Experiment Name: At_100uM_ABA_Mutants__P Parameter: Timepoint (hr) Value: N/A
  misc_feature: MA Experiment 20000574 PARAMETER Experiment Name: At_100uM_ABA_Mutants__P Parameter: Tissue Value: Whole Plant
  misc_feature: MA Experiment 20000574 PARAMETER Experiment Name: At_100uM_ABA_Mutants__P Parameter: Treatment Value: None
catcactaccttttctctgctaatttctactatttgtgttggagggatatattataataaaaagaaccaatggcggaccaaacaagaacccatcacgagatgataagccgagacagtacccaagaggcccatccgaaggccaggcagatggtgaaggcagcaaccgctgtcacagccggtggatccctacttgtcctctccggcttaacactcgctggaacagtcatcgcactcacggtggctactcctctcctcgtcatcttcagccccgtcttggttccagcagtggtaaccgttgctctcatcattaccggattccttgcatccggtggctttggaatagccgccattaccgccttctcttggctctacaggcacatgacgggatctggatcggataagatagagaatgctcggatgaaggttggaagcagagtgcaggatactaagtatgggcagcacaacattggagtccaacaccaacaagtttcttaaaattcaaaggctaaaaacgatttccacattaaattgtcatccatcgttagatctcttctctttgtttttattttcaacgtttatgttgtaatgtgtgatatataataacatgcaatgtatgatgtaatcttgttgttgttgtatgagtaatgttttgatccttctatgcgagcggaaatcttcat

SEQ ID NO: 90077 - protein, 141 aa, Arabidopsis thaliana
  peptide (1)..(141): Ceres Seq. ID no. 12722097
  misc_feature (23)..(132): Pfam Name: Oleosin Pfam Description: Oleosin
  misc_feature (1)..(141): Homolog of NCBI NO: 15241406 NR Description: oleosin; protein id: At5g51210.1 [Arabidopsis >gi|18206251|sp|Q43284|OLE3_ARATH Oleosin 14.9 kDa
  misc_feature (1)..(141): Homolog of NCBI NO: 27754368 NR Description: putative oleosin [Arabidopsis thaliana]
  misc_feature (1)..(139): Homolog of NCBI NO: 15234945 NR Description: oleosin; protein id: At4g25140.1 [Arabidopsis >gi|266693|sp|P29525|OLE1_ARATH Oleosin 18.5 kDa
  misc_feature (1)..(139): Homolog of NCBI NO: 228416 NR Description: oleosin
  misc_feature (1)..(139): Homolog of NCBI NO: 129082 NR Description: Oleosin Bn-III (BnIII) >gi|81692|pir||S22475
  misc_feature (1)..(134): Homolog of NCBI NO: 129097 NR Description: Major oleosin NAP-II >gi|2119750|pir||S70915
  misc_feature (1)..(139): Homolog of NCBI NO: 129083 NR Description: Oleosin Bn-V (BnV) >gi|280390|pir||S25089 oleosin
  misc_feature (8)..(136): Homolog of NCBI NO: 7442009 NR Description: oleosin-like protein, salt stress-induced - sweet
  misc_feature (14)..(137): Homolog of NCBI NO: 29170509 NR Description: oleosin [Corylus avellana]
  misc_feature (1)..(137): Homolog of NCBI NO: 3914199 NR Description: OLEOSIN 1 >gi|460803|emb|CAA55008.1| oleosin
MADQTRTHHEMISRDSTQEAHPKARQMVKAATAVTAGGSLLVLSGLTLAGTVIALTVATPLLVIFSPVLVPAVVTVALIITGFLASGGFGIAAITAFSWLYRHMTGSGSDKIENARMKVGSRVQDTKYGQHNIGVQHQQVS

SEQ ID NO: 90078 - protein, 131 aa, Arabidopsis thaliana
  peptide (1)..(131): Ceres Seq. ID no. 12722098
  misc_feature (13)..(122): Pfam Name: Oleosin Pfam Description: Oleosin
  misc_feature (1)..(131): Homolog of NCBI NO: 15241406 NR Description: oleosin; protein id: At5g51210.1 [Arabidopsis >gi|18206251|sp|Q43284|OLE3_ARATH Oleosin 14.9 kDa
  misc_feature (1)..(131): Homolog of NCBI NO: 27754368 NR Description: putative oleosin [Arabidopsis thaliana]
  misc_feature (1)..(129): Homolog of NCBI NO: 15234945 NR Description: oleosin; protein id: At4g25140.1 [Arabidopsis >gi|266693|sp|P29525|OLE1_ARATH Oleosin 18.5 kDa
  misc_feature (1)..(129): Homolog of NCBI NO: 228416 NR Description: oleosin
  misc_feature (1)..(129): Homolog of NCBI NO: 129082 NR Description: Oleosin Bn-III (BnIII) >gi|81692|pir||S22475
  misc_feature (1)..(124): Homolog of NCBI NO: 129097 NR Description: Major oleosin NAP-II >gi|2119750|pir||S70915
  misc_feature (1)..(129): Homolog of NCBI NO: 129083 NR Description: Oleosin Bn-V (BnV) >gi|280390|pir||S25089 oleosin
  misc_feature (1)..(126): Homolog of NCBI NO: 7442009 NR Description: oleosin-like protein, salt stress-induced - sweet
  misc_feature (4)..(127): Homolog of NCBI NO: 29170509 NR Description: oleosin [Corylus avellana]
  misc_feature (1)..(127): Homolog of NCBI NO: 3914199 NR Description: OLEOSIN 1 >gi|460803|emb|CAA55008.1| oleosin
MISRDSTQEAHPKARQMVKAATAVTAGGSLLVLSGLTLAGTVIALTVATPLLVIFSPVLVPAVVTVALIITGFLASGGFGIAAITAFSWLYRHMTGSGSDKIENARMKVGSRVQDTKYGQHNIGVQHQQVS

SEQ ID NO: 90079 - protein, 115 aa, Arabidopsis thaliana
  peptide (1)..(115): Ceres Seq. ID no. 12722099
  misc_feature (1)..(106): Pfam Name: Oleosin Pfam Description: Oleosin
  misc_feature (1)..(115): Homolog of NCBI NO: 15241406 NR Description: oleosin; protein id: At5g51210.1 [Arabidopsis >gi|18206251|sp|Q43284|OLE3_ARATH Oleosin 14.9 kDa
  misc_feature (1)..(115): Homolog of NCBI NO: 27754368 NR Description: putative oleosin [Arabidopsis thaliana]
  misc_feature (1)..(113): Homolog of NCBI NO: 15234945 NR Description: oleosin; protein id: At4g25140.1 [Arabidopsis >gi|266693|sp|P29525|OLE1_ARATH Oleosin 18.5 kDa
  misc_feature (1)..(113): Homolog of NCBI NO: 228416 NR Description: oleosin
  misc_feature (1)..(113): Homolog of NCBI NO: 129082 NR Description: Oleosin Bn-III (BnIII) >gi|81692|pir||S22475
  misc_feature (1)..(108): Homolog of NCBI NO: 129097 NR Description: Major oleosin NAP-II >gi|2119750|pir||S70915
  misc_feature (1)..(113): Homolog of NCBI NO: 129083 NR Description: Oleosin Bn-V (BnV) >gi|280390|pir||S25089 oleosin
  misc_feature (1)..(110): Homolog of NCBI NO: 7442009 NR Description: oleosin-like protein, salt stress-induced - sweet
  misc_feature (1)..(111): Homolog of NCBI NO: 29170509 NR Description: oleosin [Corylus avellana]
  misc_feature (1)..(111): Homolog of NCBI NO: 3914199 NR Description: OLEOSIN 1 >gi|460803|emb|CAA55008.1| oleosin
MVKAATAVTAGGSLLVLSGLTLAGTVIALTVATPLLVIFSPVLVPAVVTVALIITGFLASGGFGIAAITAFSWLYRHMTGSGSDKIENARMKVGSRVQDTKYGQHNIGVQHQQVS

SEQ ID NO: 90080 - DNA, 2460 bp, Arabidopsis thaliana
  misc_feature (1)..(2460): Ceres Seq. ID no. 12722108
  misc_feature: MA Experiment ID: 20000180 Result: Up-regulated in Transcription
  misc_feature: MA Experiment 20000180 PARAMETER Experiment Name: At_Germinating_Seeds_P Parameter: Age (hr) Value: 24 vs. 0
  misc_feature: MA Experiment 20000180 PARAMETER Experiment Name: At_Germinating_Seeds_P Parameter: Tissue Value: Germinating Seeds
  misc_feature: MA Experiment ID: 20000495 Result: Down-regulated in Transcription
  misc_feature: MA Experiment 20000495 PARAMETER Experiment Name: At_Guard_Cells_P Parameter: Harvest Date Value: 8/2/2002
  misc_feature: MA Experiment 20000495 PARAMETER Experiment Name: At_Guard_Cells_P Parameter: Organism Value: A. thaliana
  misc_feature: MA Experiment 20000495 PARAMETER Experiment Name: At_Guard_Cells_P Parameter: Tissue Value: Guard Cells vs. Leaves
  misc_feature: MA Experiment ID: 20001451 Result: Up-regulated in Transcription
  misc_feature: MA Experiment 20001451 PARAMETER Experiment Name: At_Far-red-induction_P Parameter: Age (day) Value: 7
  misc_feature: MA Experiment 20001451 PARAMETER Experiment Name: At_Far-red-induction_P Parameter: Light Value: Far-red vs. White
  misc_feature: MA Experiment 20001451 PARAMETER Experiment Name: At_Far-red-induction_P Parameter: Organism Value: A. thaliana
  misc_feature: MA Experiment 20001451 PARAMETER Experiment Name: At_Far-red-induction_P Parameter: Plant Line Value: Columbia
  misc_feature: MA Experiment 20001451 PARAMETER Experiment Name: At_Far-red-induction_P Parameter: Timepoint (hr) Value: 24
  misc_feature: MA Experiment 20001451 PARAMETER Experiment Name: At_Far-red-induction_P Parameter: Tissue Value: Whole Plant
atggactcttttttcaaaaactcatatctggacccaaaggctgtgcgtgcccagcttcctaagagggctgatcttgcggctccttctgaaccgatgaccgttgcgttagctattagtgggagcattaaaagcaagaatgtaattaagtgggcgctcaacaagtttggttctgacaaaaatgtcactttcaagctgattcacatccatccaaagattactactctacctacagcttcggggaacatagtctctatatccgaggaactagaggaagtagcggctgcttatagacaaaaagtgatgcaggagacaaaagaaactcttcttaaacctttcaagaaaatgtgcgagcggaaaaagctaaagatcgatgaaactcgttttgaatcttctttgacaaaggttgcagtagaacttcaagtgcttgaatcaaatagtgttgcagtggcgataaccaaagaggttaatcagcatttgatcagcaatcttatcattggacgctcatctcaagctgcctcctcgaggaattatgatattacagcgtcgatatcagcatctgtgtcaaacttgtgcacagtctatgttgtctcaaacggaggagtccatattcttgcaaaagacacgtcagacacggagaggaatgacacttcaatagaatctggttttgagagaacttcctccagctgttcttctggttcaggagctaactcagatgttatgtcgaatgcactcaaatctaaccctcacactctgtccaataagagaatgcaaaatctcccgacaatagtaagaggggtttctgttcctatggaaactagttctactgagtcagatgaaactaaaaagaggtcttcggatgctgcagaggaagcaagcaagagaagtagccctgaaacatcacgtagtgtttcttggaatcctcagtttagagattttgacgagagaaaagacgctatgagttccatgtctagcaactttgaatacggaaatgttgttactccccttggacactatttcacagacaaccaggacacgcttaatgaaatttcgaagttgagagctgagcttagacacgctcatgaaatgtatgcagtggctcaagttgaaacgttggatgcttctcgtaagctaaacgagcttaagtttgaagagctaacgcttctggagcacgaaacgaaggggatagcaaaaaaggaaacagagaagtttgagcagaagagaagggaagagagagaagctgcacaaagaagagaagctgagatgaaagcaacccatgaagccaaagagaaggagaagcttgaagaaagttcccttgtggctcctaagctgcaataccaagagttcacgtgggaagaaattattaacgcaacttcatcattctctgaagatttaaagatcggaatgggagcttacggggatgtttacaaatgcaatctgcatcatacaatcgccgctgtcaaagttttgcattctgctgaaagtagtctatccaagcaattcgatcaagagctcgaaatcttgagcaagatcaggcacccgcacttggttcttcttctaggagcatgtcctgatcatggcgctctagtgtatgagtacatggaaaacggtagcttggaagatagactgttccaagtcaacgatagtcaaccaatcccgtggttcgtgcggttaagaatcgcttgggaagtcgcatcagcgcttgttttcctccacaaatcaaaaccgacaccaatcatccaccgcgatcttaagcctgctaacatcttgcttaatcacaactttgtcagcaaagtaggagatgttggtctttccacaatgatccaagctgccgacccattgtcaaccaaattcacaatgtacaagcagacaagccccgtgggaacgttatgctatatcgatcccgaatatcaacgaaccggaaggatatctccaaaatcagacgtgtatgctttcggaatgatcattctgcagcttctcactggtcaacaggctatggcactgacatatacagtagaaacagccatggagaacaacaacgacgatgagttaatacagattcttgatgaaaaagcaggtaactggccaatcgaagaaactaggcaattagctgctttagcactccagtgtacagagctccgttctaaagacaggcctgatttggaagatcagattcttccagtattggaaagcttgaagaaagtagctgataaagcaagaaactcgctttccgctgcgccaagtcaacctccaagccatttcttctgtccattacttaaggatgtgatgaaggagccatgtattgcggctgatgggtacacttatgaccggagagccatagaggagtggatggagaaccaccggacgtctccggttactaattcgccgttacaaaacgtgaaccttttgcccaatcacactctttacgcagccatcgtcgaatggagaaatagaaatcagtga

SEQ ID NO: 90081 - protein, 819 aa, Arabidopsis thaliana
  peptide (1)..(819): Ceres Seq. ID no. 12722109
  misc_feature (32)..(197): Pfam Name: Universal stress protein family Pfam Description: Universal stress protein family
  misc_feature (348)..(816): Homolog of NCBI NO: 15234952 NR Description: putative Ser Thr protein kinase; protein id:
  misc_feature (20)..(109): Homolog of NCBI NO: 15234952 NR Description: putative Ser Thr protein kinase; protein id:
  misc_feature (348)..(819): Homolog of NCBI NO: 15240280 NR Description: putative protein; protein id: At5g61550.1
  misc_feature (32)..(817): Homolog of NCBI NO: 30697549 NR Description: protein kinase family [Arabidopsis thaliana]
  misc_feature (178)..(817): Homolog of NCBI NO: 9758471 NR Description: contains similarity to receptor-like protein
  misc_feature (32)..(70): Homolog of NCBI NO: 9758471 NR Description: contains similarity to receptor-like protein
  misc_feature (134)..(815): Homolog of NCBI NO: 37536860 NR Description: putative protein kinase [Oryza sativa (japonica group)] >gi|13569983|gb|AAK31267.1| putative protein kinase sativa] >gi|31433514|gb|AAP55019.1| putative protein kinase
  misc_feature (378)..(818): Homolog of NCBI NO: 29367517 NR Description: putative serine/threonine protein kinase [Oryza
  misc_feature (39)..(819): Homolog of NCBI NO: 22327904 NR Description: similar to putative protein kinase; protein id:
  misc_feature (277)..(817): Homolog of NCBI NO: 15224775 NR Description: putative protein kinase; protein id: At2g19410.1 thaliana] >gi|7486244|pir||T01289 probable protein kinase
MDSFFKNSYLDPKAVRAQLPKRADLAAPSEPMTVALAISGSIKSKNVIKWALNKFGSDKNVTFKLIHIHPKITTLPTASGNIVSISEELEEVAAAYRQKVMQETKETLLKPFKKMCERKKLKIDETRFESSLTKVAVELQVLESNSVAVAITKEVNQHLISNLIIGRSSQAASSRNYDITASISASVSNLCTVYVVSNGGVHILAKDTSDTERNDTSIESGFERTSSSCSSGSGANSDVMSNALKSNPHTLSNKRMQNLPTIVRGVSVPMETSSTESDETKKRSSDAAEEASKRSSPETSRSVSWNPQFRDFDERKDAMSSMSSNFEYGNVVTPLGHYFTDNQDTLNEISKLRAELRHAHEMYAVAQVETLDASRKLNELKFEELTLLEHETKGIAKKETEKFEQKRREEREAAQRREAEMKATHEAKEKEKLEESSLVAPKLQYQEFTWEEIINATSSFSEDLKIGMGAYGDVYKCNLHHTIAAVKVLHSAESSLSKQFDQELEILSKIRHPHLVLLLGACPDHGALVYEYMENGSLEDRLFQVNDSQPIPWFVRLRIAWEVASALVFLHKSKPTPIIHRDLKPANILLNHNFVSKVGDVGLSTMIQAADPLSTKFTMYKQTSPVGTLCYIDPEYQRTGRISPKSDVYAFGMIILQLLTGQQAMALTYTVETAMENNNDDELIQILDEKAGNWPIEETRQLAALALQCTELRSKDRPDLEDQILPVLESLKKVADKARNSLSAAPSQPPSHFFCPLLKDVMKEPCIAADGYTYDRRAIEEWMENHRTSPVTNSPLQNVNLLPNHTLYAAIVEWRNRNQ

SEQ ID NO: 90082 - protein, 788 aa, Arabidopsis thaliana
  peptide (1)..(788): Ceres Seq. ID no. 12722110
  misc_feature (1)..(166): Pfam Name: Universal stress protein family Pfam Description: Universal stress protein family
  misc_feature (317)..(785): Homolog of NCBI NO: 15234952 NR Description: putative Ser Thr protein kinase; protein id:
  misc_feature (1)..(78): Homolog of NCBI NO: 15234952 NR Description: putative Ser Thr protein kinase; protein id:
  misc_feature (317)..(788): Homolog of NCBI NO: 15240280 NR Description: putative protein; protein id: At5g61550.1
  misc_feature (1)..(786): Homolog of NCBI NO: 30697549 NR Description: protein kinase family [Arabidopsis thaliana]
  misc_feature (147)..(786): Homolog of NCBI NO: 9758471 NR Description: contains similarity to receptor-like protein
  misc_feature (1)..(39): Homolog of NCBI NO: 9758471 NR Description: contains similarity to receptor-like protein
  misc_feature (103)..(784): Homolog of NCBI NO: 37536860 NR Description: putative protein kinase [Oryza sativa (japonica group)] >gi|13569983|gb|AAK31267.1| putative protein kinase sativa] >gi|31433514|gb|AAP55019.1| putative protein kinase
  misc_feature (347)..(787): Homolog of NCBI NO: 29367517 NR Description: putative serine/threonine protein kinase [Oryza
  misc_feature (8)..(788): Homolog of NCBI NO: 22327904 NR Description: similar to putative protein kinase; protein id:
  misc_feature (246)..(786): Homolog of NCBI NO: 15224775 NR Description: putative protein kinase; protein id: At2g19410.1 thaliana] >gi|7486244|pir||T01289 probable protein kinase
MTVALAISGSIKSKNVIKWALNKFGSDKNVTFKLIHIHPKITTLPTASGNIVSISEELEEVAAAYRQKVMQETKETLLKPFKKMCERKKLKIDETRFESSLTKVAVELQVLESNSVAVAITKEVNQHLISNLIIGRSSQAASSRNYDITASISASVSNLCTVYVVSNGGVHILAKDTSDTERNDTSIESGFERTSSSCSSGSGANSDVMSNALKSNPHTLSNKRMQNLPTIVRGVSVPMETSSTESDETKKRSSDAAEEASKRSSPETSRSVSWNPQFRDFDERKDAMSSMSSNFEYGNVVTPLGHYFTDNQDTLNEISKLRAELRHAHEMYAVAQVETLDASRKLNELKFEELTLLEHETKGIAKKETEKFEQKRREEREAAQRREAEMKATHEAKEKEKLEESSLVAPKLQYQEFTWEEIINATSSFSEDLKIGMGAYGDVYKCNLHHTIAAVKVLHSAESSLSKQFDQELEILSKIRHPHLVLLLGACPDHGALVYEYMENGSLEDRLFQVNDSQPIPWFVRLRIAWEVASALVFLHKSKPTPIIHRDLKPANILLNHNFVSKVGDVGLSTMIQAADPLSTKFTMYKQTSPVGTLCYIDPEYQRTGRISPKSDVYAFGMIILQLLTGQQAMALTYTVETAMENNNDDELIQILDEKAGNWPIEETRQLAALALQCTELRSKDRPDLEDQILPVLESLKKVADKARNSLSAAPSQPPSHFFCPLLKDVMKEPCIAADGYTYDRRAIEEWMENHRTSPVTNSPLQNVNLLPNHTLYAAIVEWRNRNQ

SEQ ID NO: 90083 - protein, 719 aa, Arabidopsis thaliana
  peptide (1)..(719): Ceres Seq. ID no. 12722111
  misc_feature (1)..(97): Pfam Name: Universal stress protein family Pfam Description: Universal stress protein family
  misc_feature (248)..(716): Homolog of NCBI NO: 15234952 NR Description: putative Ser Thr protein kinase; protein id:
  misc_feature (248)..(719): Homolog of NCBI NO: 15240280 NR Description: putative protein; protein id: At5g61550.1
  misc_feature (1)..(717): Homolog of NCBI NO: 30697549 NR Description: protein kinase family [Arabidopsis thaliana]
  misc_feature (78)..(717): Homolog of NCBI NO: 9758471 NR Description: contains similarity to receptor-like protein
  misc_feature (34)..(715): Homolog of NCBI NO: 37536860 NR Description: putative protein kinase [Oryza sativa (japonica group)] >gi|13569983|gb|AAK31267.1| putative protein kinase sativa] >gi|31433514|gb|AAP55019.1| putative protein kinase
  misc_feature (278)..(718): Homolog of NCBI NO: 29367517 NR Description: putative serine/threonine protein kinase [Oryza
  misc_feature (1)..(719): Homolog of NCBI NO: 22327904 NR Description: similar to putative protein kinase; protein id:
  misc_feature (177)..(717): Homolog of NCBI NO: 15224775 NR Description: putative protein kinase; protein id: At2g19410.1 thaliana] >gi|7486244|pir||T01289 probable protein kinase
  misc_feature (41)..(634): Homolog of NCBI NO: 15239834 NR Description: putative receptor - like kinase; protein id:
  misc_feature (244)..(651): Homolog of NCBI NO: 15224129 NR Description: putative protein kinase; protein id: At2g24370.1
MQETKETLLKPFKKMCERKKLKIDETRFESSLTKVAVELQVLESNSVAVAITKEVNQHLISNLIIGRSSQAASSRNYDITASISASVSNLCTVYVVSNGGVHILAKDTSDTERNDTSIESGFERTSSSCSSGSGANSDVMSNALKSNPHTLSNKRMQNLPTIVRGVSVPMETSSTESDETKKRSSDAAEEASKRSSPETSRSVSWNPQFRDFDERKDAMSSMSSNFEYGNVVTPLGHYFTDNQDTLNEISKLRAELRHAHEMYAVAQVETLDASRKLNELKFEELTLLEHETKGIAKKETEKFEQKRREEREAAQRREAEMKATHEAKEKEKLEESSLVAPKLQYQEFTWEEIINATSSFSEDLKIGMGAYGDVYKCNLHHTIAAVKVLHSAESSLSKQFDQELEILSKIRHPHLVLLLGACPDHGALVYEYMENGSLEDRLFQVNDSQPIPWFVRLRIAWEVASALVFLHKSKPTPIIHRDLKPANILLNHNFVSKVGDVGLSTMIQAADPLSTKFTMYKQTSPVGTLCYIDPEYQRTGRISPKSDVYAFGMIILQLLTGQQAMALTYTVETAMENNNDDELIQILDEKAGNWPIEETRQLAALALQCTELRSKDRPDLEDQILPVLESLKKVADKARNSLSAAPSQPPSHFFCPLLKDVMKEPCIAADGYTYDRRAIEEWMENHRTSPVTNSPLQNVNLLPNHTLYAAIVEWRNRNQ

SEQ ID NO: 90084 - DNA, 1308 bp, Arabidopsis thaliana
  misc_feature (1)..(1308): Ceres Seq. ID no. 12722125
atggaggaagaactcaagaacttgatcaaggtttcggtttctgtaataatctccatatcttactgttactacgtaccaaccagaatcaaacctggtatctttagatttctctctgttcttccaatttgtgctctgtttcgtgttcttcctctgtttttcgcctctgttcacctctctggttacacagcgcttttcatctcatggctcgccaatttcaaactcatactcttctccttcaatcaaggcccactttttccacttccctcaaatctcacccgattcatctgcttcgcttgcttccccatcaagcttcaacaaaaccctaagcgccgagactatttcttccaatgggaataccccattgaagttttgtttagtaaccaattcgtgactaaagttgtaatcttgagtgtagtgttacatatgtataatcacatacaacatatatatcccattgtgctatttgttctctatccactccatctatacttggtacttgagattctcttaaagctcttcaacgctttcttctctatagctcttgattgcgaactcgagccacagctgaatgaaccatacttggcctattctcttcgagacttctggggtcactggtggacactcatgctcccgacgatcctcctgccagacgtctacgctaggatgcggcgaatcactgaagggaaaatgaactccgagaatgctctgtacttgggagtttttgtcacattccttgtctccggtgcacttcacgagtttctcttcttctatataactcgtgagcggcctactggagaggttactctgttcttcgtgttacatggggtttgcattgtggcgtacgacgccaggttaaagaagaagattgcgcggtggatagggtttgaattttgcccgtgtttgatattacaagtgatggttatggggtttgtcgttgtgactgctggttggttgtttttccctcctcttgtcaggaccggcaagattcagagattcgctaacgaagccttgctcttcattggtttcgtgcgcaacttgtttaacgaatccttgttcttcatgcgtaagttttttaacgaagccttgttcttcactggtttcgtcatgcgcaagttgtttaacggagccttgtttttcattggtttcgtcaagctcaagttgtttaacgaatcctccttgttcttcatcatgcgcaagttgtttaacgaagccatgttcttcattggtttcgtcatacgcaagttgtttaacgaagccatgttcttcattggtttcgtcaagctcaagttgtttacttttggctggtga

SEQ ID NO: 90085 - protein, 435 aa, Arabidopsis thaliana
  peptide (1)..(435): Ceres Seq. ID no. 12722126
  misc_feature (50)..(325): Pfam Name: MBOAT family Pfam Description: MBOAT family
  misc_feature (1)..(435): Homolog of NCBI NO: 15242082 NR Description: putative protein; protein id: At5g51420.1 thaliana] >gi|9759288|dbj|BAB09753.1| contains similarity to wax
  misc_feature (1)..(347): Homolog of NCBI NO: 15240497 NR Description: wax synthase-like protein; protein id: At5g55350.1
  misc_feature (1)..(347): Homolog of NCBI NO: 15240498 NR Description: wax synthase-like protein; protein id: At5g55360.1
  misc_feature (1)..(344): Homolog of NCBI NO: 15240496 NR Description: putative protein; protein id: At5g55340.1, by cDNA: 115917. [Arabidopsis thaliana] contains similarity to wax synthase~gene_id:MTE17.5 [Arabidopsis
  misc_feature (1)..(348): Homolog of NCBI NO: 15218659 NR Description: hypothetical protein; protein id: At1g34490.1
  misc_feature (1)..(351): Homolog of NCBI NO: 8778260 NR Description: F12K21.17 [Arabidopsis thaliana]
  misc_feature (1)..(348): Homolog of NCBI NO: 15218662 NR Description: hypothetical protein; protein id: At1g34500.1
  misc_feature (1)..(347): Homolog of NCBI NO: 15240494 NR Description: wax synthase-like protein; protein id: At5g55320.1
  misc_feature (1)..(353): Homolog of NCBI NO: 8778259 NR Description: F12K21.19 [Arabidopsis thaliana]
  misc_feature (5)..(348): Homolog of NCBI NO: 8778259 NR Description: F12K21.19 [Arabidopsis thaliana]
MEEELKNLIKVSVSVIISISYCYYVPTRIKPGIFRFLSVLPICALFRVLPLFFASVHLSGYTALFISWLANFKLILFSFNQGPLFPLPSNLTRFICFACFPIKLQQNPKRRDYFFQWEYPIEVLFSNQFVTKVVILSVVLHMYNHIQHIYPIVLFVLYPLHLYLVLEILLKLFNAFFSIALDCELEPQLNEPYLAYSLRDFWGHWWTLMLPTILLPDVYARMRRITEGKMNSENALYLGVFVTFLVSGALHEFLFFYITRERPTGEVTLFFVLHGVCIVAYDARLKKKIARWIGFEFCPCLILQVMVMGFVVVTAGWLFFPPLVRTGKIQRFANEALLFIGFVRNLFNESLFFMRKFFNEALFFTGFVMRKLFNGALFFIGFVKLKLFNESSLFFIMRKLFNEAMFFIGFVIRKLFNEAMFFIGFVKLKLFTFGW

SEQ ID NO: 90086 - protein, 294 aa, Arabidopsis thaliana
  peptide (1)..(294): Ceres Seq. ID no. 12722127
  misc_feature (1)..(184): Pfam Name: MBOAT family Pfam Description: MBOAT family
  misc_feature (1)..(294): Homolog of NCBI NO: 15242082 NR Description: putative protein; protein id: At5g51420.1 thaliana] >gi|9759288|dbj|BAB09753.1| contains similarity to wax
  misc_feature (1)..(206): Homolog of NCBI NO: 15240497 NR Description: wax synthase-like protein; protein id: At5g55350.1
  misc_feature (1)..(206): Homolog of NCBI NO: 15240498 NR Description: wax synthase-like protein; protein id: At5g55360.1
  misc_feature (1)..(203): Homolog of NCBI NO: 15240496 NR Description: putative protein; protein id: At5g55340.1, by cDNA: 115917. [Arabidopsis thaliana] contains similarity to wax synthase~gene_id:MTE17.5 [Arabidopsis
  misc_feature (1)..(207): Homolog of NCBI NO: 15218659 NR Description: hypothetical protein; protein id: At1g34490.1
  misc_feature (1)..(210): Homolog of NCBI NO: 8778260 NR Description: F12K21.17 [Arabidopsis thaliana]
  misc_feature (1)..(207): Homolog of NCBI NO: 15218662 NR Description: hypothetical protein; protein id: At1g34500.1
  misc_feature (1)..(206): Homolog of NCBI NO: 15240494 NR Description: wax synthase-like protein; protein id: At5g55320.1
  misc_feature (1)..(212): Homolog of NCBI NO: 8778259 NR Description: F12K21.19 [Arabidopsis thaliana]
  misc_feature (1)..(207): Homolog of NCBI NO: 8778259 NR Description: F12K21.19 [Arabidopsis thaliana]
MYNHIQHIYPIVLFVLYPLHLYLVLEILLKLFNAFFSIALDCELEPQLNEPYLAYSLRDFWGHWWTLMLPTILLPDVYARMRRITEGKMNSENALYLGVFVTFLVSGALHEFLFFYITRERPTGEVTLFFVLHGVCIVAYDARLKKKIARWIGFEFCPCLILQVMVMGFVVVTAGWLFFPPLVRTGKIQRFANEALLFIGFVRNLFNESLFFMRKFFNEALFFTGFVMRKLFNGALFFIGFVKLKLFNESSLFFIMRKLFNEAMFFIGFVIRKLFNEAMFFIGFVKLKLFTFGW

SEQ ID NO: 90087 - protein, 227 aa, Arabidopsis thaliana
  peptide (1)..(227): Ceres Seq. ID no. 12722128
  misc_feature (1)..(117): Pfam Name: MBOAT family Pfam Description: MBOAT family
  misc_feature (1)..(227): Homolog of NCBI NO: 15242082 NR Description: putative protein; protein id: At5g51420.1 thaliana] >gi|9759288|dbj|BAB09753.1| contains similarity to wax
  misc_feature (1)..(139): Homolog of NCBI NO: 15240497 NR Description: wax synthase-like protein; protein id: At5g55350.1
  misc_feature (1)..(139): Homolog of NCBI NO: 15240498 NR Description: wax synthase-like protein; protein id: At5g55360.1
  misc_feature (1)..(136): Homolog of NCBI NO: 15240496 NR Description: putative protein; protein id: At5g55340.1, by cDNA: 115917. [Arabidopsis thaliana] contains similarity to wax synthase~gene_id:MTE17.5 [Arabidopsis
  misc_feature (1)..(140): Homolog of NCBI NO: 15218659 NR Description: hypothetical protein; protein id: At1g34490.1
  misc_feature (1)..(143): Homolog of NCBI NO: 8778260 NR Description: F12K21.17 [Arabidopsis thaliana]
  misc_feature (1)..(140): Homolog of NCBI NO: 15218662 NR Description: hypothetical protein; protein id: At1g34500.1
  misc_feature (1)..(139): Homolog of NCBI NO: 15240494 NR Description: wax synthase-like protein; protein id: At5g55320.1
  misc_feature (1)..(145): Homolog of NCBI NO: 8778259 NR Description: F12K21.19 [Arabidopsis thaliana]
  misc_feature (1)..(140): Homolog of NCBI NO: 8778259 NR Description: F12K21.19 [Arabidopsis thaliana]
MLPTILLPDVYARMRRITEGKMNSENALYLGVFVTFLVSGALHEFLFFYITRERPTGEVTLFFVLHGVCIVAYDARLKKKIARWIGFEFCPCLILQVMVMGFVVVTAGWLFFPPLVRTGKIQRFANEALLFIGFVRNLFNESLFFMRKFFNEALFFTGFVMRKLFNGALFFIGFVKLKLFNESSLFFIMRKLFNEAMFFIGFVIRKLFNEAMFFIGFVKLKLFTFGW

SEQ ID NO: 90088 - DNA, 1611 bp, Arabidopsis thaliana
  misc_feature (1)..(1611): Ceres Seq. ID no. 12722145
  misc_feature: MA Experiment ID: 20000180 Result: Up-regulated in Transcription
  misc_feature: MA Experiment 20000180 PARAMETER Experiment Name: At_Germinating_Seeds_P Parameter: Age (hr) Value: 24 vs. 0
  misc_feature: MA Experiment 20000180 PARAMETER Experiment Name: At_Germinating_Seeds_P Parameter: Tissue Value: Germinating Seeds
  misc_feature: MA Experiment ID: 20000227 Result: Up-regulated in Transcription
  misc_feature: MA Experiment 20000227 PARAMETER Experiment Name: At_Root-Tips-vs-Tops_P Parameter: Tissue Value: Root Tips vs. Root Tops
  misc_feature: MA Experiment ID: 20001451 Result: Up-regulated in Transcription
  misc_feature: MA Experiment 20001451 PARAMETER Experiment Name: At_Far-red-induction_P Parameter: Age (day) Value: 7
  misc_feature: MA Experiment 20001451 PARAMETER Experiment Name: At_Far-red-induction_P Parameter: Light Value: Far-red vs. White
  misc_feature: MA Experiment 20001451 PARAMETER Experiment Name: At_Far-red-induction_P Parameter: Organism Value: A. thaliana
  misc_feature: MA Experiment 20001451 PARAMETER Experiment Name: At_Far-red-induction_P Parameter: Plant Line Value: Columbia
  misc_feature: MA Experiment 20001451 PARAMETER Experiment Name: At_Far-red-induction_P Parameter: Timepoint (hr) Value: 24
  misc_feature: MA Experiment 20001451 PARAMETER Experiment Name: At_Far-red-induction_P Parameter: Tissue Value: Whole Plant
  misc_feature: MA Experiment ID: 20001906 Result: Up-regulated in Transcription
  misc_feature: MA Experiment 20001906 PARAMETER Experiment Name: At_Drought_Reproduction_P Parameter: Age (day) Value: 35
  misc_feature: MA Experiment 20001906 PARAMETER Experiment Name: At_Drought_Reproduction_P Parameter: Organism Value: A. thaliana
  misc_feature: MA Experiment 20001906 PARAMETER Experiment Name: At_Drought_Reproduction_P Parameter: Plant Line Value: WS
  misc_feature: MA Experiment 20001906 PARAMETER Experiment Name: At_Drought_Reproduction_P Parameter: Timepoint (day) Value: 5
  misc_feature: MA Experiment 20001906 PARAMETER Experiment Name: At_Drought_Reproduction_P Parameter: Tissue Value: Siliques
  misc_feature: MA Experiment 20001906 PARAMETER Experiment Name: At_Drought_Reproduction_P Parameter: Treatment Value: Drought vs. No Drought
atgaatatgatgatgcaaaaactctctattctatttctacatttaatattactagtactactctgcgtccatcctctcaccaccgtagccgaccgcaattccaccgattggtgcgacaaaactccataccctgatccatgcaaatgctacttcaagaaccacaacggatttcaacagccgacacaattatccgagttccgagtaatgctggtggaagcagccatggatcgggccatatccgcccgtgccgagttgactaattccggcaagaactgcacggatagcaagaaacaagcagttttggcggattgcattgacctctatggagacacgatcatgcagttaaaccggacattgcatggcgtgtctcctaaagccggtgccgcgaaaagttgcactgacttcgacgctcaaacgtggctgagcaccgcgcttacaaacaccgagacctgccgacgtggctcatccgatttaaacgtcacagacttcatcacacccatcgtttcaaacaccaaaatctcccacctcattagcaactgcttagccgtcaacggagccctcttgaccgctggaaacaaaggcaacaccactgctaatcaaaagggctttccgacgtggctttcccgtaaagataagagactcctgcgtgccgttcgagccaacctcgtggtggccaaggacggatcaggacatttcaacacggtacaagcggctattgacgtggcgggacggagaaaggtgacgtcagggaggttcgttatatacgtaaaaagaggtatatatcaagaaaacattaacgtacgtctaaataatgatgacataatgttggtcggagatggaatgagatccaccattatcaccggcggtcgaagtgtccaaggaggttacaccacgtacaattccgctactgccggtatcgagggacttcacttcattgccaaaggcataacgtttaggaacacagctggtccagccaagggccaggccgtggcacttcgttcatcgtctgacctctcaatcttctacaaatgctcaatcgaaggataccaagatacactgatggtccattctcaacgccagttttaccgtgagtgttacatctatggaaccgtcgatttcatattcggtaacgcggctgctgttttccaaaactgtctcatcctccctcgccggccactcaaaggtcaagccaatgtaattaccgcacaaggtcgtgctgatccgtttcagaacacagggatctctatccataactcaagaatcctaccggctcctgatctaaaaccagtggtcggtaccgttaagacgtacatgggccggccttggatgaagttctcacgaaccgtggttcttcagacgtatttggataatgttgtgagtccagtcgggtggtctccgtggattgaaggttcggtgtttggtctggacactctcttctatgcagaatataagaatactggaccagcttcatccacgaggtggcgtgtcagttggaaagggtttcatgtgttgggtagagcttccgatgcatctgctttcactgttggaaagtttatcgctggtacagcatggctcccacgcaccggcatacccttcacttctggactctaa

SEQ ID NO: 90089 - protein, 536 aa, Arabidopsis thaliana
  peptide (1)..(536): Ceres Seq. ID no. 12722146
  misc_feature (221)..(522): Pfam Name: Pectinesterase Pfam Description: Pectinesterase
  misc_feature (1)..(536): Homolog of NCBI NO: 15242109 NR Description: pectinesterase family; protein id: At5g51490.1 thaliana] >gi|9758191|dbj|BAB08665.1| pectinesterase [Arabidopsis
  misc_feature (1)..(536): Homolog of NCBI NO: 15242110 NR Description: pectinesterase family; protein id: At5g51500.1 thaliana] >gi|9758192|dbj|BAB08666.1| pectinesterase [Arabidopsis
  misc_feature (35)..(536): Homolog of NCBI NO: 15232793 NR Description: pectinesterase-like protein; protein id: [Arabidopsis thaliana] >gi|7447382|pir||T12995 pectinesterase
  misc_feature (14)..(536): Homolog of NCBI NO: 18406733 NR Description: pectinesterase family; protein id: At2g45220.1, by cDNA: gi_13605695 [Arabidopsis thaliana] At2g45220/F4L23.27 [Arabidopsis thaliana]
  misc_feature (14)..(536): Homolog of NCBI NO: 25313433 NR Description: probable pectinesterase [imported] - Arabidopsis
  misc_feature (118)..(536): Homolog of NCBI NO: 6174914 NR Description: Pectinesterase 2.1 precursor (Pectin
  misc_feature (118)..(536): Homolog of NCBI NO: 7447381 NR Description: pectinesterase (EC 3.1.1.11) PECS-c2 - sweet
  misc_feature (8)..(536): Homolog of NCBI NO: 34908778 NR Description: putative pectin esterase [Oryza sativa (japonica group)] >gi|20161185|dbj|BAB90112.1| putative pectin esterase
  misc_feature (38)..(536): Homolog of NCBI NO: 6174912 NR Description: Pectinesterase 1.1 precursor (Pectin
  misc_feature (38)..(536): Homolog of NCBI NO: 2098711 NR Description: pectinesterase [Citrus sinensis]
MNMMMQKLSILFLHLILLVLLCVHPLTTVADRNSTDWCDKTPYPDPCKCYFKNHNGFQQPTQLSEFRVMLVEAAMDRAISARAELTNSGKNCTDSKKQAVLADCIDLYGDTIMQLNRTLHGVSPKAGAAKSCTDFDAQTWLSTALTNTETCRRGSSDLNVTDFITPIVSNTKISHLISNCLAVNGALLTAGNKGNTTANQKGFPTWLSRKDKRLLRAVRANLVVAKDGSGHFNTVQAAIDVAGRRKVTSGRFVIYVKRGIYQENINVRLNNDDIMLVGDGMRSTIITGGRSVQGGYTTYNSATAGIEGLHFIAKGITFRNTAGPAKGQAVALRSSSDLSIFYKCSIEGYQDTLMVHSQRQFYRECYIYGTVDFIFGNAAAVFQNCLILPRRPLKGQANVITAQGRADPFQNTGISIHNSRILPAPDLKPVVGTVKTYMGRPWMKFSRTVVLQTYLDNVVSPVGWSPWIEGSVFGLDTLFYAEYKNTGPASSTRWRVSWKGFHVLGRASDASAFTVGKFIAGTAWLPRTGIPFTSGL

SEQ ID NO: 90090 - protein, 534 aa, Arabidopsis thaliana
  peptide (1)..(534): Ceres Seq. ID no. 12722147
  misc_feature (219)..(520): Pfam Name: Pectinesterase Pfam Description: Pectinesterase
  misc_feature (1)..(534): Homolog of NCBI NO: 15242109 NR Description: pectinesterase family; protein id: At5g51490.1 thaliana] >gi|9758191|dbj|BAB08665.1| pectinesterase [Arabidopsis
  misc_feature (1)..(534): Homolog of NCBI NO: 15242110 NR Description: pectinesterase family; protein id: At5g51500.1 thaliana] >gi|9758192|dbj|BAB08666.1| pectinesterase [Arabidopsis
  misc_feature (33)..(534): Homolog of NCBI NO: 15232793 NR Description: pectinesterase-like protein; protein id: [Arabidopsis thaliana] >gi|7447382|pir||T12995 pectinesterase
  misc_feature (12)..(534): Homolog of NCBI NO: 18406733 NR Description: pectinesterase family; protein id: At2g45220.1, by cDNA: gi_13605695 [Arabidopsis thaliana] At2g45220/F4L23.27 [Arabidopsis thaliana]
  misc_feature (12)..(534): Homolog of NCBI NO: 25313433 NR Description: probable pectinesterase [imported] - Arabidopsis
  misc_feature (116)..(534): Homolog of NCBI NO: 6174914 NR Description: Pectinesterase 2.1 precursor (Pectin
  misc_feature (116)..(534): Homolog of NCBI NO: 7447381 NR Description: pectinesterase (EC 3.1.1.11) PECS-c2 - sweet
  misc_feature (6)..(534): Homolog of NCBI NO: 34908778 NR Description: putative pectin esterase [Oryza sativa (japonica group)] >gi|20161185|dbj|BAB90112.1| putative pectin esterase
  misc_feature (36)..(534): Homolog of NCBI NO: 6174912 NR Description: Pectinesterase 1.1 precursor (Pectin
  misc_feature (36)..(534): Homolog of NCBI NO: 2098711 NR Description: pectinesterase [Citrus sinensis]
MMMQKLSILFLHLILLVLLCVHPLTTVADRNSTDWCDKTPYPDPCKCYFKNHNGFQQPTQLSEFRVMLVEAAMDRAISARAELTNSGKNCTDSKKQAVLADCIDLYGDTIMQLNRTLHGVSPKAGAAKSCTDFDAQTWLSTALTNTETCRRGSSDLNVTDFITPIVSNTKISHLISNCLAVNGALLTAGNKGNTTANQKGFPTWLSRKDKRLLRAVRANLVVAKDGSGHFNTVQAAIDVAGRRKVTSGRFVIYVKRGIYQENINVRLNNDDIMLVGDGMRSTIITGGRSVQGGYTTYNSATAGIEGLHFIAKGITFRNTAGPAKGQAVALRSSSDLSIFYKCSIEGYQDTLMVHSQRQFYRECYIYGTVDFIFGNAAAVFQNCLILPRRPLKGQANVITAQGRADPFQNTGISIHNSRILPAPDLKPVVGTVKTYMGRPWMKFSRTVVLQTYLDNVVSPVGWSPWIEGSVFGLDTLFYAEYKNTGPASSTRWRVSWKGFHVLGRASDASAFTVGKFIAGTAWLPRTGIPFTSGL

SEQ ID NO: 90091 - protein, 533 aa, Arabidopsis thaliana
  peptide (1)..(533): Ceres Seq. ID no. 12722148
  misc_feature (218)..(519): Pfam Name: Pectinesterase Pfam Description: Pectinesterase
  misc_feature (1)..(533): Homolog of NCBI NO: 15242109 NR Description: pectinesterase family; protein id: At5g51490.1 thaliana] >gi|9758191|dbj|BAB08665.1| pectinesterase [Arabidopsis
  misc_feature (1)..(533): Homolog of NCBI NO: 15242110 NR Description: pectinesterase family; protein id: At5g51500.1 thaliana] >gi|9758192|dbj|BAB08666.1| pectinesterase [Arabidopsis
  misc_feature (32)..(533): Homolog of NCBI NO: 15232793 NR Description: pectinesterase-like protein; protein id: [Arabidopsis thaliana] >gi|7447382|pir||T12995 pectinesterase
  misc_feature (11)..(533): Homolog of NCBI NO: 18406733 NR Description: pectinesterase family; protein id: At2g45220.1, by cDNA: gi_13605695 [Arabidopsis thaliana] At2g45220/F4L23.27 [Arabidopsis thaliana]
  misc_feature (11)..(533): Homolog of NCBI NO: 25313433 NR Description: probable pectinesterase [imported] - Arabidopsis
  misc_feature (115)..(533): Homolog of NCBI NO: 6174914 NR Description: Pectinesterase 2.1 precursor (Pectin
  misc_feature (115)..(533): Homolog of NCBI NO: 7447381 NR Description: pectinesterase (EC 3.1.1.11) PECS-c2 - sweet
  misc_feature (5)..(533): Homolog of NCBI NO: 34908778 NR Description: putative pectin esterase [Oryza sativa (japonica group)] >gi|20161185|dbj|BAB90112.1| putative pectin esterase
  misc_feature (35)..(533): Homolog of NCBI NO: 6174912 NR Description: Pectinesterase 1.1 precursor (Pectin
  misc_feature (35)..(533): Homolog of NCBI NO: 2098711 NR Description: pectinesterase [Citrus sinensis]
MMQKLSILFLHLILLVLLCVHPLTTVADRNSTDWCDKTPYPDPCKCYFKNHNGFQQPTQLSEFRVMLVEAAMDRAISARAELTNSGKNCTDSKKQAVLADCIDLYGDTIMQLNRTLHGVSPKAGAAKSCTDFDAQTWLSTALTNTETCRRGSSDLNVTDFITPIVSNTKISHLISNCLAVNGALLTAGNKGNTTANQKGFPTWLSRKDKRLLRAVRANLVVAKDGSGHFNTVQAAIDVAGRRKVTSGRFVIYVKRGIYQENINVRLNNDDIMLVGDGMRSTIITGGRSVQGGYTTYNSATAGIEGLHFIAKGITFRNTAGPAKGQAVALRSSSDLSIFYKCSIEGYQDTLMVHSQRQFYRECYIYGTVDFIFGNAAAVFQNCLILPRRPLKGQANVITAQGRADPFQNTGISIHNSRILPAPDLKPVVGTVKTYMGRPWMKFSRTVVLQTYLDNVVSPVGWSPWIEGSVFGLDTLFYAEYKNTGPASSTRWRVSWKGFHVLGRASDASAFTVGKFIAGTAWLPRTGIPFTSGL

SEQ ID NO: 90092 - DNA, 1623 bp, Arabidopsis thaliana
  misc_feature (1)..(1623): Ceres Seq. ID no. 12722149
  misc_feature: MA Experiment ID: 20000227 Result: Up-regulated in Transcription
  misc_feature: MA Experiment 20000227 PARAMETER Experiment Name: At_Root-Tips-vs-Tops_P Parameter: Tissue Value: Root Tips vs. Root Tops
atgaatatcatgatggtgcaaaatatctcttttctatctctacatttactattaatattactactctgcctccgtcctcttaccaccgtagccgacggcaattctaccaacattgacgggtggtgcgacaaaactccatacccatatccatgcaaacgctacttcataaaacacagcggttttcgactgccaacacaaatatccgagttccgagtacttctcgtggaagcagccatggatcgggccgtatccgcttgggacaaattgaccaattcaagcaagaactgcacagatttcaagaaacaagcagttttggcggattgcattaacctctatggagacactgtcatgcagctaaacagaacgctgcagggcgtgtcttcaaaaaccgggagaaggtgtactgacttcgacgctcaaacgtggctaagcaccgcgcttacaaacactgagacttgccgacgcggctcctccgatctcaacgtctcagatttcactacacctattgtttcaaacacaaaaatctctcacctcatcagcaactgcttagccgtcaacggagcccttttgaccgccggaaaaaatgacagcaccaccggtgattccaagggttttccaacgtgggtttcccgtaaagagaggagacttttgcaattgcaatcagtgcgtgcgaatcttgtagtggccaaagacggatcgggacatttcaagacggtgcaagcggctattgacgtggcgggacggagaaaggtgacgtcagggaggttcgttatatacgtaaaaagagggatatatcaagaaaaccttaacgtacgtctaaataatgataacataatgttggtcggagatggaatgagatataccattatcaccggtggtcgaagtgttaaaggaggttacaccacgtacagttctgccactgccggtatagagggacttcacttcatagcaaaaggcatagcgttccagaacacggcaggtccggcaaaaggccaggcagtggcactacggtcatcctcggacctctcaatcttctatagatgctccatcgaaggataccaagacacattgatggtccattcacaacgccagttttatcgcgagtgctacatctatggaactgtcgatttcatcttcggaaacgcggccgttgttttccaaaactgtatcatcctgcctcgcctgccactcaaaggtcaagccaatgtaataaccgcacaaggtcgtactgatctatttcagaacacagggatctctattcataactcaataatcatacccgctcctgacttaaaaccggtggtccgtagtgttaagacatatatgggtcgaccctggatgatgtactcccgcaccgtggttcttaagacgtacatcgatagtgttgtgagtcctgtcgggtggtctccgtggactaaaggttcgacgtatggtctcgacacgctgttctatgcggaatataagaatatcggaccggcttcatccacgaggtggcgtgtccgttggaaagggtttcatgtgttgagtaaagcttccgatgcatctgctttctctgttggaaaattcatcgctggtactgcgtggctcccaggctctggcatacccttcacttcagaactctaa

SEQ ID NO: 90093 - protein, 540 aa, Arabidopsis thaliana
  peptide (1)..(540): Ceres Seq. ID no. 12722150
  misc_feature (225)..(526): Pfam Name: Pectinesterase Pfam Description: Pectinesterase
  misc_feature (1)..(540): Homolog of NCBI NO: 15242110 NR Description: pectinesterase family; protein id: At5g51500.1 thaliana] >gi|9758192|dbj|BAB08666.1| pectinesterase [Arabidopsis
  misc_feature (1)..(540): Homolog of NCBI NO: 15242109 NR Description: pectinesterase family; protein id: At5g51490.1 thaliana] >gi|9758191|dbj|BAB08665.1| pectinesterase [Arabidopsis
  misc_feature (26)..(540): Homolog of NCBI NO: 15232793 NR Description: pectinesterase-like protein; protein id: [Arabidopsis thaliana] >gi|7447382|pir||T12995 pectinesterase
  misc_feature (127)..(540): Homolog of NCBI NO: 7447381 NR Description: pectinesterase (EC 3.1.1.11) PECS-c2 - sweet
  misc_feature (127)..(540): Homolog of NCBI NO: 6174914 NR Description: Pectinesterase 2.1 precursor (Pectin
  misc_feature (133)..(540): Homolog of NCBI NO: 18406733 NR Description: pectinesterase family; protein id: At2g45220.1, by cDNA: gi_13605695 [Arabidopsis thaliana] At2g45220/F4L23.27 [Arabidopsis thaliana]
  misc_feature (133)..(540): Homolog of NCBI NO: 25313433 NR Description: probable pectinesterase [imported] - Arabidopsis
  misc_feature (223)..(540): Homolog of NCBI NO: 15236734 NR Description: pectinesterase family; protein id: At4g00190.1
  misc_feature (42)..(194): Homolog of NCBI NO: 15236734 NR Description: pectinesterase family; protein id: At4g00190.1
  misc_feature (93)..(540): Homolog of NCBI NO: 15081598 NR Description: pectin methylesterase PME1 [Vitis vinifera]
MNIMMVQNISFLSLHLLLILLLCLRPLTTVADGNSTNIDGWCDKTPYPYPCKRYFIKHSGFRLPTQISEFRVLLVEAAMDRAVSAWDKLTNSSKNCTDFKKQAVLADCINLYGDTVMQLNRTLQGVSSKTGRRCTDFDAQTWLSTALTNTETCRRGSSDLNVSDFTTPIVSNTKISHLISNCLAVNGALLTAGKNDSTTGDSKGFPTWVSRKERRLLQLQSVRANLVVAKDGSGHFKTVQAAIDVAGRRKVTSGRFVIYVKRGIYQENLNVRLNNDNIMLVGDGMRYTIITGGRSVKGGYTTYSSATAGIEGLHFIAKGIAFQNTAGPAKGQAVALRSSSDLSIFYRCSIEGYQDTLMVHSQRQFYRECYIYGTVDFIFGNAAVVFQNCIILPRLPLKGQANVITAQGRTDLFQNTGISIHNSIIIPAPDLKPVVRSVKTYMGRPWMMYSRTVVLKTYIDSVVSPVGWSPWTKGSTYGLDTLFYAEYKNIGPASSTRWRVRWKGFHVLSKASDASAFSVGKFIAGTAWLPGSGIPFTSEL

SEQ ID NO: 90094 - protein, 537 aa, Arabidopsis thaliana
  peptide (1)..(537): Ceres Seq. ID no. 12722151
  misc_feature (222)..(523): Pfam Name: Pectinesterase Pfam Description: Pectinesterase
  misc_feature (1)..(537): Homolog of NCBI NO: 15242110 NR Description: pectinesterase family; protein id: At5g51500.1 thaliana] >gi|9758192|dbj|BAB08666.1| pectinesterase [Arabidopsis
  misc_feature (1)..(537): Homolog of NCBI NO: 15242109 NR Description: pectinesterase family; protein id: At5g51490.1 thaliana] >gi|9758191|dbj|BAB08665.1| pectinesterase [Arabidopsis
  misc_feature (23)..(537): Homolog of NCBI NO: 15232793 NR Description: pectinesterase-like protein; protein id: [Arabidopsis thaliana] >gi|7447382|pir||T12995 pectinesterase
  misc_feature (124)..(537): Homolog of NCBI NO: 7447381 NR Description: pectinesterase (EC 3.1.1.11) PECS-c2 - sweet
  misc_feature (124)..(537): Homolog of NCBI NO: 6174914 NR Description: Pectinesterase 2.1 precursor (Pectin
  misc_feature (130)..(537): Homolog of NCBI NO: 18406733 NR Description: pectinesterase family; protein id: At2g45220.1, by cDNA: gi_13605695 [Arabidopsis thaliana] At2g45220/F4L23.27 [Arabidopsis thaliana]
  misc_feature (130)..(537): Homolog of NCBI NO: 25313433 NR Description: probable pectinesterase [imported] - Arabidopsis
  misc_feature (220)..(537): Homolog of NCBI NO: 15236734 NR Description: pectinesterase family; protein id: At4g00190.1
  misc_feature (39)..(191): Homolog of NCBI NO: 15236734 NR Description: pectinesterase family; protein id: At4g00190.1
  misc_feature (90)..(537): Homolog of NCBI NO: 15081598 NR Description: pectin methylesterase PME1 [Vitis vinifera]
MMVQNISFLSLHLLLILLLCLRPLTTVADGNSTNIDGWCDKTPYPYPCKRYFIKHSGFRLPTQISEFRVLLVEAAMDRAVSAWDKLTNSSKNCTDFKKQAVLADCINLYGDTVMQLNRTLQGVSSKTGRRCTDFDAQTWLSTALTNTETCRRGSSDLNVSDFTTPIVSNTKISHLISNCLAVNGALLTAGKNDSTTGDSKGFPTWVSRKERRLLQLQSVRANLVVAKDGSGHFKTVQAAIDVAGRRKVTSGRFVIYVKRGIYQENLNVRLNNDNIMLVGDGMRYTIITGGRSVKGGYTTYSSATAGIEGLHFIAKGIAFQNTAGPAKGQAVALRSSSDLSIFYRCSIEGYQDTLMVHSQRQFYRECYIYGTVDFIFGNAAVVFQNCIILPRLPLKGQANVITAQGRTDLFQNTGISIHNSIIIPAPDLKPVVRSVKTYMGRPWMMYSRTVVLKTYIDSVVSPVGWSPWTKGSTYGLDTLFYAEYKNIGPASSTRWRVRWKGFHVLSKASDASAFSVGKFIAGTAWLPGSGIPFTSEL

SEQ ID NO: 90095 - protein, 536 aa, Arabidopsis thaliana
  peptide (1)..(536): Ceres Seq. ID no. 12722152
  misc_feature (221)..(522): Pfam Name: Pectinesterase Pfam Description: Pectinesterase
  misc_feature (1)..(536): Homolog of NCBI NO: 15242110 NR Description: pectinesterase family; protein id: At5g51500.1 thaliana] >gi|9758192|dbj|BAB08666.1| pectinesterase [Arabidopsis
  misc_feature (1)..(536): Homolog of NCBI NO: 15242109 NR Description: pectinesterase family; protein id: At5g51490.1 thaliana] >gi|9758191|dbj|BAB08665.1| pectinesterase [Arabidopsis
  misc_feature (22)..(536): Homolog of NCBI NO: 15232793 NR Description: pectinesterase-like protein; protein id: [Arabidopsis thaliana] >gi|7447382|pir||T12995 pectinesterase
  misc_feature (123)..(536): Homolog of NCBI NO: 7447381 NR Description: pectinesterase (EC 3.1.1.11) PECS-c2 - sweet
  misc_feature (123)..(536): Homolog of NCBI NO: 6174914 NR Description: Pectinesterase 2.1 precursor (Pectin
  misc_feature (129)..(536): Homolog of NCBI NO: 18406733 NR Description: pectinesterase family; protein id: At2g45220.1, by cDNA: gi_13605695 [Arabidopsis thaliana] At2g45220/F4L23.27 [Arabidopsis thaliana]
  misc_feature (129)..(536): Homolog of NCBI NO: 25313433 NR Description: probable pectinesterase [imported] - Arabidopsis
  misc_feature (219)..(536): Homolog of NCBI NO: 15236734 NR Description: pectinesterase family; protein id: At4g00190.1
  misc_feature (38)..(190): Homolog of NCBI NO: 15236734 NR Description: pectinesterase family; protein id: At4g00190.1
  misc_feature (89)..(536): Homolog of NCBI NO: 15081598 NR Description: pectin methylesterase PME1 [Vitis vinifera]
MVQNISFLSLHLLLILLLCLRPLTTVADGNSTNIDGWCDKTPYPYPCKRYFIKHSGFRLPTQISEFRVLLVEAAMDRAVSAWDKLTNSSKNCTDFKKQAVLADCINLYGDTVMQLNRTLQGVSSKTGRRCTDFDAQTWLSTALTNTETCRRGSSDLNVSDFTTPIVSNTKISHLISNCLAVNGALLTAGKNDSTTGDSKGFPTWVSRKERRLLQLQSVRANLVVAKDGSGHFKTVQAAIDVAGRRKVTSGRFVIYVKRGIYQENLNVRLNNDNIMLVGDGMRYTIITGGRSVKGGYTTYSSATAGIEGLHFIAKGIAFQNTAGPAKGQAVALRSSSDLSIFYRCSIEGYQDTLMVHSQRQFYRECYIYGTVDFIFGNAAVVFQNCIILPRLPLKGQANVITAQGRTDLFQNTGISIHNSIIIPAPDLKPVVRSVKTYMGRPWMMYSRTVVLKTYIDSVVSPVGWSPWTKGSTYGLDTLFYAEYKNIGPASSTRWRVRWKGFHVLSKASDASAFSVGKFIAGTAWLPGSGIPFTSEL

SEQ ID NO: 90096 - DNA, 1260 bp, Arabidopsis thaliana
  misc_feature (1)..(1260): Ceres Seq. ID no. 12722158
  misc_feature: MA Experiment ID: 20000307 Result: Down-regulated in Transcription
  misc_feature: MA Experiment 20000307 PARAMETER Experiment Name: At_Germinating_Seeds_Sub_P Parameter: Age (hr) Value: 24 vs. 0
  misc_feature: MA Experiment 20000307 PARAMETER Experiment Name: At_Germinating_Seeds_Sub_P Parameter: Organism Value: A. thaliana
  misc_feature: MA Experiment 20000307 PARAMETER Experiment Name: At_Germinating_Seeds_Sub_P Parameter: Plant Line Value: WS
  misc_feature: MA Experiment 20000307 PARAMETER Experiment Name: At_Germinating_Seeds_Sub_P Parameter: Tissue Value: Germinating Seeds
  misc_feature: MA Experiment ID: 20000355 Result: Up-regulated in Transcription
  misc_feature: MA Experiment 20000355 PARAMETER Experiment Name: At_Siliques_Sub_P Parameter: Age (day) Value: 21
  misc_feature: MA Experiment 20000355 PARAMETER Experiment Name: At_Siliques_Sub_P Parameter: Organism Value: A. thaliana
  misc_feature: MA Experiment 20000355 PARAMETER Experiment Name: At_Siliques_Sub_P Parameter: Plant Line Value: WS
  misc_feature: MA Experiment 20000355 PARAMETER Experiment Name: At_Siliques_Sub_P Parameter: Tissue Value: Less Than 5mm Siliques vs. Whole Plant
  misc_feature: MA Experiment ID: 20000440 Result: Up-regulated in Transcription
  misc_feature: MA Experiment 20000440 PARAMETER Experiment Name: At_Closed-Flower__Sub_P Parameter: Tissue Value: Closed Flower vs. Whole Plant
atggaggagagagaaggaactaacatcaacaacatcccaaccagttttggtctgaaacaacatgaaactcctcttcctcctcctggttacccaccacggtctgaaaaccctaatctttttccggtgggtcaatccagcacttcctccgccgccgccgcggtgaaaccttctgagaatgttgctcctccttttagcttaacaatgccggtggagaattcttcttctgagttgaagaagaagagagggagaccaagaaagtataaccctgacggctcactcgctgtgactctctctcctatgcctatctcatcctccgttccgttgacgtcggagtttggttctcggaaacgaggaagaggtcgaggaagaggcagaggaagaggacgaggacgtggacaaggacaaggaagcagagagcccaataacaacaacaacgacaacaattggctcaagaatcctcagatgttcgaatttaacaacaacactcctacttctggtggaggaggacctgctgaaattgtcagtccaagttttacacctcatgtgctcacagtaaatgccggtgaggatgtgacaatgaagataatgacattctctcaacaaggctcgcgtgctatttgtattctttcagcgaacggtcccatatccaatgttacacttcgtcaatctatgacatctggtggtactctcacttatgagggtcattttgagattctttctttgacgggttcgtttataccaagcgagagtggaggaacccgaagcagagctggtgggatgagtgtctctcttgcaggacaagatggtcgtgtctttggtggtggacttgctggtctctttattgccgctggtcctgttcaggtaatggtagggagttttatagcgggtcaggaggaatcgcagcagcagcagcagcagataaagaagcaaagaagggaaagactcgggatcccgacaacaacacaagcttctaatatctcattcggtggctcagcggaagatcctaaggctagatacgggctcaacaagcctgttgttattcagccaccaccggtgtctgcaccacctgtgtccttttcgcatgaaccaagtactaacaccgtccatggttactatgcaaataacacagctaaccatatcaaggatctcttctcttccctccctggagaagatagggaagaagatgaggatgatttagaaggtgaagatgatgaagaattcggaggccatagcgaatctgacaccgaggttccaagctga

SEQ ID NO: 90097 - protein, 419 aa, Arabidopsis thaliana
  peptide (1)..(419): Ceres Seq. ID no. 12722159
  misc_feature (1)..(419): Homolog of NCBI NO: 15242131 NR Description: putative protein; protein id: At5g51590.1
  misc_feature (127)..(419): Homolog of NCBI NO: 15235023 NR Description: putative protein; protein id: At4g25320.1, by cDNA: gi_20466212 [Arabidopsis thaliana]
  misc_feature (1)..(144): Homolog of NCBI NO: 15235023 NR Description: putative protein; protein id: At4g25320.1, by cDNA: gi_20466212 [Arabidopsis thaliana]
  misc_feature (163)..(402): Homolog of NCBI NO: 15241763 NR Description: putative protein; protein id: At5g62260.1
  misc_feature (32)..(121): Homolog of NCBI NO: 15241763 NR Description: putative protein; protein id: At5g62260.1
  misc_feature (157)..(345): Homolog of NCBI NO: 22328578 NR Description: putative DNA-binding protein; protein id: supported by cDNA: gi_17979484 [Arabidopsis thaliana] AT4g12080/F16J13_150 [Arabidopsis thaliana]
  misc_feature (33)..(105): Homolog of NCBI NO: 22328578 NR Description: putative DNA-binding protein; protein id: supported by cDNA: gi_17979484 [Arabidopsis thaliana] AT4g12080/F16J13_150 [Arabidopsis thaliana]
  misc_feature (32)..(402): Homolog of NCBI NO: 8809639 NR Description: contains similarity to DNA-binding [Arabidopsis thaliana] >gi|26451694|dbj|BAC42942.1| unknown [Arabidopsis thaliana] >gi|28973553|gb|AAO64101.1| unknown
  misc_feature (177)..(334): Homolog of NCBI NO: 37537056 NR Description: putative AT-Hook DNA-binding protein [Oryza
  misc_feature (53)..(139): Homolog of NCBI NO: 37537056 NR Description: putative AT-Hook DNA-binding protein [Oryza
MEEREGTNINNIPTSFGLKQHETPLPPPGYPPRSENPNLFPVGQSSTSSAAAAVKPSENVAPPFSLTMPVENSSSELKKKRGRPRKYNPDGSLAVTLSPMPISSSVPLTSEFGSRKRGRGRGRGRGRGRGRGQGQGSREPNNNNNDNNWLKNPQMFEFNNNTPTSGGGGPAEIVSPSFTPHVLTVNAGEDVTMKIMTFSQQGSRAICILSANGPISNVTLRQSMTSGGTLTYEGHFEILSLTGSFIPSESGGTRSRAGGMSVSLAGQDGRVFGGGLAGLFIAAGPVQVMVGSFIAGQEESQQQQQQIKKQRRERLGIPTTTQASNISFGGSAEDPKARYGLNKPVVIQPPPVSAPPVSFSHEPSTNTVHGYYANNTANHIKDLFSSLPGEDREEDEDDLEGEDDEEFGGHSESDTEVPS

SEQ ID NO: 90098 - protein, 352 aa, Arabidopsis thaliana
  peptide (1)..(352): Ceres Seq. ID no. 12722160
  misc_feature (1)..(352): Homolog of NCBI NO: 15242131 NR Description: putative protein; protein id: At5g51590.1
  misc_feature (60)..(352): Homolog of NCBI NO: 15235023 NR Description: putative protein; protein id: At4g25320.1, by cDNA: gi_20466212 [Arabidopsis thaliana]
  misc_feature (1)..(77): Homolog of NCBI NO: 15235023 NR Description: putative protein; protein id: At4g25320.1, by cDNA: gi_20466212 [Arabidopsis thaliana]
  misc_feature (96)..(335): Homolog of NCBI NO: 15241763 NR Description: putative protein; protein id: At5g62260.1
  misc_feature (1)..(54): Homolog of NCBI NO: 15241763 NR Description: putative protein; protein id: At5g62260.1
  misc_feature (90)..(278): Homolog of NCBI NO: 22328578 NR Description: putative DNA-binding protein; protein id: supported by cDNA: gi_17979484 [Arabidopsis thaliana] AT4g12080/F16J13_150 [Arabidopsis thaliana]
  misc_feature (1)..(38): Homolog of NCBI NO: 22328578 NR Description: putative DNA-binding protein; protein id: supported by cDNA: gi_17979484 [Arabidopsis thaliana] AT4g12080/F16J13_150 [Arabidopsis thaliana]
  misc_feature (1)..(335): Homolog of NCBI NO: 8809639 NR Description: contains similarity to DNA-binding [Arabidopsis thaliana] >gi|26451694|dbj|BAC42942.1| unknown [Arabidopsis thaliana] >gi|28973553|gb|AAO64101.1| unknown
  misc_feature (110)..(267): Homolog of NCBI NO: 37537056 NR Description: putative AT-Hook DNA-binding protein [Oryza
  misc_feature (1)..(72): Homolog of NCBI NO: 37537056 NR Description: putative AT-Hook DNA-binding protein [Oryza
MPVENSSSELKKKRGRPRKYNPDGSLAVTLSPMPISSSVPLTSEFGSRKRGRGRGRGRGRGRGRGQGQGSREPNNNNNDNNWLKNPQMFEFNNNTPTSGGGGPAEIVSPSFTPHVLTVNAGEDVTMKIMTFSQQGSRAICILSANGPISNVTLRQSMTSGGTLTYEGHFEILSLTGSFIPSESGGTRSRAGGMSVSLAGQDGRVFGGGLAGLFIAAGPVQVMVGSFIAGQEESQQQQQQIKKQRRERLGIPTTTQASNISFGGSAEDPKARYGLNKPVVIQPPPVSAPPVSFSHEPSTNTVHGYYANNTANHIKDLFSSLPGEDREEDEDDLEGEDDEEFGGHSESDTEVPS

SEQ ID NO: 90099 - protein, 320 aa, Arabidopsis thaliana
  peptide (1)..(320): Ceres Seq. ID no. 12722161
  misc_feature (1)..(320): Homolog of NCBI NO: 15242131 NR Description: putative protein; protein id: At5g51590.1
  misc_feature (28)..(320): Homolog of NCBI NO: 15235023 NR Description: putative protein; protein id: At4g25320.1, by cDNA: gi_20466212 [Arabidopsis thaliana]
  misc_feature (1)..(45): Homolog of NCBI NO: 15235023 NR Description: putative protein; protein id: At4g25320.1, by cDNA: gi_20466212 [Arabidopsis thaliana]
  misc_feature (64)..(303): Homolog of NCBI NO: 15241763 NR Description: putative protein; protein id: At5g62260.1
  misc_feature (1)..(22): Homolog of NCBI NO: 15241763 NR Description: putative protein; protein id: At5g62260.1
  misc_feature (58)..(246): Homolog of NCBI NO: 22328578 NR Description: putative DNA-binding protein; protein id: supported by cDNA: gi_17979484 [Arabidopsis thaliana] AT4g12080/F16J13_150 [Arabidopsis thaliana]
  misc_feature (1)..(303): Homolog of NCBI NO: 8809639 NR Description: contains similarity to DNA-binding [Arabidopsis thaliana] >gi|26451694|dbj|BAC42942.1| unknown [Arabidopsis thaliana] >gi|28973553|gb|AAO64101.1| unknown
  misc_feature (78)..(235): Homolog of NCBI NO: 37537056 NR Description: putative AT-Hook DNA-binding protein [Oryza
  misc_feature (1)..(40): Homolog of NCBI NO: 37537056 NR Description: putative AT-Hook DNA-binding protein [Oryza
  misc_feature (1)..(246): Homolog of NCBI NO: 7485570 NR Description: hypothetical protein F16J13.150 - Arabidopsis
MPISSSVPLTSEFGSRKRGRGRGRGRGRGRGRGQGQGSREPNNNNNDNNWLKNPQMFEFNNNTPTSGGGGPAEIVSPSFTPHVLTVNAGEDVTMKIMTFSQQGSRAICILSANGPISNVTLRQSMTSGGTLTYEGHFEILSLTGSFIPSESGGTRSRAGGMSVSLAGQDGRVFGGGLAGLFIAAGPVQVMVGSFIAGQEESQQQQQQIKKQRRERLGIPTTTQASNISFGGSAEDPKARYGLNKPVVIQPPPVSAPPVSFSHEPSTNTVHGYYANNTANHIKDLFSSLPGEDREEDEDDLEGEDDEEFGGHSESDTEVPS

SEQ ID NO: 90100 - DNA, 1828 bp, Arabidopsis thaliana
  misc_feature (1)..(1828): Ceres Seq. ID no. 12722162
  misc_feature: MA Experiment ID: 20000234 Result: Down-regulated in Transcription
  misc_feature: MA Experiment 20000234 PARAMETER Experiment Name: At_Siliques_P Parameter: Age (day) Value: 21
  misc_feature: MA Experiment 20000234 PARAMETER Experiment Name: At_Siliques_P Parameter: Organism Value: A. thaliana
  misc_feature: MA Experiment 20000234 PARAMETER Experiment Name: At_Siliques_P Parameter: Plant Line Value: WS
  misc_feature: MA Experiment 20000234 PARAMETER Experiment Name: At_Siliques_P Parameter: Tissue Value: Less Than 5mm Siliques vs. Whole Plant
  misc_feature: MA Experiment ID: 20000495 Result: Down-regulated in Transcription
  misc_feature: MA Experiment 20000495 PARAMETER Experiment Name: At_Guard_Cells_P Parameter: Harvest Date Value: 8/2/2002
  misc_feature: MA Experiment 20000495 PARAMETER Experiment Name: At_Guard_Cells_P Parameter: Organism Value: A. thaliana
  misc_feature: MA Experiment 20000495 PARAMETER Experiment Name: At_Guard_Cells_P Parameter: Tissue Value: Guard Cells vs. Leaves
  misc_feature: MA Experiment ID: 20001451 Result: Down-regulated in Transcription
  misc_feature: MA Experiment 20001451 PARAMETER Experiment Name: At_Far-red-induction_P Parameter: Age (day) Value: 7
  misc_feature: MA Experiment 20001451 PARAMETER Experiment Name: At_Far-red-induction_P Parameter: Light Value: Far-red vs. White
  misc_feature: MA Experiment 20001451 PARAMETER Experiment Name: At_Far-red-induction_P Parameter: Organism Value: A. thaliana
  misc_feature: MA Experiment 20001451 PARAMETER Experiment Name: At_Far-red-induction_P Parameter: Plant Line Value: Columbia
  misc_feature: MA Experiment 20001451 PARAMETER Experiment Name: At_Far-red-induction_P Parameter: Timepoint (hr) Value: 24
  misc_feature: MA Experiment 20001451 PARAMETER Experiment Name: At_Far-red-induction_P Parameter: Tissue Value: Whole Plant
aaactcccagatcttgtcgatttatttattcctctccaaagcaaaagcttcttcgatcgtccttgtctcgttttcaattctaaatgttttgtgcagaaaaatcatgactttggcttctccacgagtttcaaattcaaagacgactgtgttgttgtttcctcgaaaagtttcttcaattgcatttgctattggtggattaacttctttcgtcatcttcgcttctctgcttcttttcacgtatcccattggttcctctgttactgactatttctacagaacagagaccactcaaaacgtccagtttcaccatagtatccatgatcctgatcgtaacccatctcctgtttctagctcagagtcaccaccagtattgacacaagatagtgatgataaagtgcttcccaagggatctcatgattcgaatgatgttagattaggtgaagaaacaaactcagggaagtcttcaaatgtttccattgatgaagaagctacacaagatcatgtagaaacagaatgtgatttatatcatggtaactggttttatgatccgatgggaccgttgtatacaaacaactcttgtcctcttttgacacagatgcaaaactgtcagggcaatggaagacctgacaaggggtatgaaaactggagatggaaaccgtctcagtgtgatcttccgcgttttgatgctaagaaatttcttgagctaatgagaggcaagacactagcttttataggcgattcagtagctcgtaatcagatggagtccatgatgtgtcttctttggcaggtagaaactccggttaaccgtgggaacaggaagatgcagagatggtatttcaggtcatcatcggtgatgatagctcggatgtggtcatcttggctggtccatcagttcaatgaaccgtttggttttgctacagatggtgtaactaaactcaagcttgaccaacccgatgagcgcataattgaagctcttccgaatttcgatgtggttgtactttcatcaggtcactggtttgcaaaacagtctgtctatattttaaatgaccagattgtgggaggccagttatggtggccagacaaatcaaaacccgaaaagattaacaacgtcgaagcatttgggatctctgtagaaacaatcataaaggcaatggctaaacacccaaactacacgggtctgaccatcttacgtacttggtcgcctgatcattatgaaggcggtgcgtggaacactggtggatcatgcacaggtaaagtagagccgcttcctcctgggaatttagttacaaacgggttcacagagataatgcacgagaagcaagcaacagggtttcaccgtgctgtcgcggatgataagctcgggaatagatcgaagaagctgaagctaatggatatcactgaggctttcgggtatcgccacgacggtcatcctggtccatacaggagtcctgacccgaaaaagatcacaaaacgtggaccagacggtcagcctcctccacaagactgtttgcattggtgcatgccagggccagtggacacatggaacgagatggttctggagattattaggagagattttgaaggcagacaaagttcaccatcatcttgatctaggagcaaaagatatatttatatatacgtacaagatcatttattcataccacggattagttgatttaaggatttctaaagtatattcattacacaatacacacacttgtaggtctctctttttttacgtacaatgtaacttaaagcaaacataagagttctattagattagttactcttttagatgaaagaatctttataatcataatttttgttt

SEQ ID NO: 90101 - protein, 535 aa, Arabidopsis thaliana
  peptide (1)..(535): Ceres Seq. ID no. 12722163
  misc_feature (339)..(522): Pfam Name: Arabidopsis proteins of unknown function Pfam Description: Arabidopsis proteins of unknown function
  misc_feature (35)..(535): Homolog of NCBI NO: 15242138 NR Description: putative protein; protein id: At5g51640.1, by cDNA: gi_19424020 [Arabidopsis thaliana] gene_id:K17N15.19~pir||T10216~strong similarity to unknown
  misc_feature (112)..(532): Homolog of NCBI NO: 22328922 NR Description: putative protein; protein id: At4g25360.1, by cDNA: gi_17979114 [Arabidopsis thaliana] unknown protein [Arabidopsis thaliana]
  misc_feature (35)..(128): Homolog of NCBI NO: 22328922 NR Description: putative protein; protein id: At4g25360.1, by cDNA: gi_17979114 [Arabidopsis thaliana] unknown protein [Arabidopsis thaliana]
  misc_feature (112)..(532): Homolog of NCBI NO: 7487578 NR Description: hypothetical protein T30C3.30 - Arabidopsis >gi|5123925|emb|CAB45513.1| putative protein [Arabidopsis >gi|7269387|emb|CAB81347.1| putative protein [Arabidopsis
  misc_feature (35)..(128): Homolog of NCBI NO: 7487578 NR Description: hypothetical protein T30C3.30 - Arabidopsis >gi|5123925|emb|CAB45513.1| putative protein [Arabidopsis >gi|7269387|emb|CAB81347.1| putative protein [Arabidopsis
  misc_feature (115)..(531): Homolog of NCBI NO: 34906936 NR Description: leaf senescence related protein-like [Oryza
  misc_feature (157)..(522): Homolog of NCBI NO: 15237044 NR Description: putative protein; protein id: At4g11090.1
  misc_feature (115)..(530): Homolog of NCBI NO: 30678135 NR Description: expressed protein [Arabidopsis thaliana] unknown protein [Arabidopsis thaliana]
  misc_feature (160)..(522): Homolog of NCBI NO: 30686312 NR Description: expressed protein [Arabidopsis thaliana]
  misc_feature (109)..(525): Homolog of NCBI NO: 15237211 NR Description: putative protein; protein id: At5g15890.1
NSQILSIYLFLSKAKASSIVLVSFSILNVLCRKIMTLASPRVSNSKTTVLLFPRKVSSIAFAIGGLTSFVIFASLLLFTYPIGSSVTDYFYRTETTQNVQFHHSIHDPDRNPSPVSSSESPPVLTQDSDDKVLPKGSHDSNDVRLGEETNSGKSSNVSIDEEATQDHVETECDLYHGNWFYDPMGPLYTNNSCPLLTQMQNCQGNGRPDKGYENWRWKPSQCDLPRFDAKKFLELMRGKTLAFIGDSVARNQMESMMCLLWQVETPVNRGNRKMQRWYFRSSSVMIARMWSSWLVHQFNEPFGFATDGVTKLKLDQPDERIIEALPNFDVVVLSSGHWFAKQSVYILNDQIVGGQLWWPDKSKPEKINNVEAFGISVETIIKAMAKHPNYTGLTILRTWSPDHYEGGAWNTGGSCTGKVEPLPPGNLVTNGFTEIMHEKQATGFHRAVADDKLGNRSKKLKLMDITEAFGYRHDGHPGPYRSPDPKKITKRGPDGQPPPQDCLHWCMPGPVDTWNEMVLEIIRRDFEGRQSSPSS

SEQ ID NO: 90102 - protein, 501 aa, Arabidopsis thaliana
  peptide (1)..(501): Ceres Seq. ID no. 12722164
  misc_feature (305)..(488): Pfam Name: Arabidopsis proteins of unknown function Pfam Description: Arabidopsis proteins of unknown function
  misc_feature (1)..(501): Homolog of NCBI NO: 15242138 NR Description: putative protein; protein id: At5g51640.1, by cDNA: gi_19424020 [Arabidopsis thaliana] gene_id:K17N15.19~pir||T10216~strong similarity to unknown
  misc_feature (78)..(498): Homolog of NCBI NO: 22328922 NR Description: putative protein; protein id: At4g25360.1, by cDNA: gi_17979114 [Arabidopsis thaliana] unknown protein [Arabidopsis thaliana]
  misc_feature (1)..(94): Homolog of NCBI NO: 22328922 NR Description: putative protein; protein id: At4g25360.1, by cDNA: gi_17979114 [Arabidopsis thaliana] unknown protein [Arabidopsis thaliana]
  misc_feature (78)..(498): Homolog of NCBI NO: 7487578 NR Description: hypothetical protein T30C3.30 - Arabidopsis >gi|5123925|emb|CAB45513.1| putative protein [Arabidopsis >gi|7269387|emb|CAB81347.1| putative protein [Arabidopsis
  misc_feature (1)..(94): Homolog of NCBI NO: 7487578 NR Description: hypothetical protein T30C3.30 - Arabidopsis >gi|5123925|emb|CAB45513.1| putative protein [Arabidopsis >gi|7269387|emb|CAB81347.1| putative protein [Arabidopsis
  misc_feature (81)..(497): Homolog of NCBI NO: 34906936 NR Description: leaf senescence related protein-like [Oryza
  misc_feature (123)..(488): Homolog of NCBI NO: 15237044 NR Description: putative protein; protein id: At4g11090.1
  misc_feature (81)..(496): Homolog of NCBI NO: 30678135 NR Description: expressed protein [Arabidopsis thaliana] unknown protein [Arabidopsis thaliana]
  misc_feature (126)..(488): Homolog of NCBI NO: 30686312 NR Description: expressed protein [Arabidopsis thaliana]
  misc_feature (75)..(491): Homolog of NCBI NO: 15237211 NR Description: putative protein; protein id: At5g15890.1
MTLASPRVSNSKTTVLLFPRKVSSIAFAIGGLTSFVIFASLLLFTYPIGSSVTDYFYRTETTQNVQFHHSIHDPDRNPSPVSSSESPPVLTQDSDDKVLPKGSHDSNDVRLGEETNSGKSSNVSIDEEATQDHVETECDLYHGNWFYDPMGPLYTNNSCPLLTQMQNCQGNGRPDKGYENWRWKPSQCDLPRFDAKKFLELMRGKTLAFIGDSVARNQMESMMCLLWQVETPVNRGNRKMQRWYFRSSSVMIARMWSSWLVHQFNEPFGFATDGVTKLKLDQPDERIIEALPNFDVVVLSSGHWFAKQSVYILNDQIVGGQLWWPDKSKPEKINNVEAFGISVETIIKAMAKHPNYTGLTILRTWSPDHYEGGAWNTGGSCTGKVEPLPPGNLVTNGFTEIMHEKQATGFHRAVADDKLGNRSKKLKLMDITEAFGYRHDGHPGPYRSPDPKKITKRGPDGQPPPQDCLHWCMPGPVDTWNEMVLEIIRRDFEGRQSSPSS

SEQ ID NO: 90103 - protein, 352 aa, Arabidopsis thaliana
  peptide (1)..(352): Ceres Seq. ID no. 12722165
  misc_feature (156)..(339): Pfam Name: Arabidopsis proteins of unknown function Pfam Description: Arabidopsis proteins of unknown function
  misc_feature (1)..(352): Homolog of NCBI NO: 15242138 NR Description: putative protein; protein id: At5g51640.1, by cDNA: gi_19424020 [Arabidopsis thaliana] gene_id:K17N15.19~pir||T10216~strong similarity to unknown
  misc_feature (1)..(349): Homolog of NCBI NO: 22328922 NR Description: putative protein; protein id: At4g25360.1, by cDNA: gi_17979114 [Arabidopsis thaliana] unknown protein [Arabidopsis thaliana]
  misc_feature (1)..(349): Homolog of NCBI NO: 7487578 NR Description: hypothetical protein T30C3.30 - Arabidopsis >gi|5123925|emb|CAB45513.1| putative protein [Arabidopsis >gi|7269387|emb|CAB81347.1| putative protein [Arabidopsis
  misc_feature (1)..(348): Homolog of NCBI NO: 34906936 NR Description: leaf senescence related protein-like [Oryza
  misc_feature (1)..(339): Homolog of NCBI NO: 15237044 NR Description: putative protein; protein id: At4g11090.1
  misc_feature (1)..(347): Homolog of NCBI NO: 30678135 NR Description: expressed protein [Arabidopsis thaliana] unknown protein [Arabidopsis thaliana]
  misc_feature (1)..(339): Homolog of NCBI NO: 30686312 NR Description: expressed protein [Arabidopsis thaliana]
  misc_feature (1)..(342): Homolog of NCBI NO: 15237211 NR Description: putative protein; protein id: At5g15890.1
  misc_feature (1)..(344): Homolog of NCBI NO: 15234058 NR Description: hypothetical protein; protein id: At4g01080.1
  misc_feature (1)..(344): Homolog of NCBI NO: 28393189 NR Description: unknown protein [Arabidopsis thaliana]
MGPLYTNNSCPLLTQMQNCQGNGRPDKGYENWRWKPSQCDLPRFDAKKFLELMRGKTLAFIGDSVARNQMESMMCLLWQVETPVNRGNRKMQRWYFRSSSVMIARMWSSWLVHQFNEPFGFATDGVTKLKLDQPDERIIEALPNFDVVVLSSGHWFAKQSVYILNDQIVGGQLWWPDKSKPEKINNVEAFGISVETIIKAMAKHPNYTGLTILRTWSPDHYEGGAWNTGGSCTGKVEPLPPGNLVTNGFTEIMHEKQATGFHRAVADDKLGNRSKKLKLMDITEAFGYRHDGHPGPYRSPDPKKITKRGPDGQPPPQDCLHWCMPGPVDTWNEMVLEIIRRDFEGRQSSPSS

SEQ ID NO: 90104 - DNA, 1425 bp, Arabidopsis thaliana
  misc_feature (1)..(1425): Ceres Seq. ID no. 12722173
  misc_feature: MA Experiment ID: 20000180 Result: Up-regulated in Transcription
  misc_feature: MA Experiment 20000180 PARAMETER Experiment Name: At_Germinating_Seeds_P Parameter: Age (hr) Value: 24 vs. 0
  misc_feature: MA Experiment 20000180 PARAMETER Experiment Name: At_Germinating_Seeds_P Parameter: Tissue Value: Germinating Seeds
  misc_feature: MA Experiment ID: 20000265 Result: Down-regulated in Transcription
  misc_feature: MA Experiment 20000265 PARAMETER Experiment Name: At_Open_Flower_P Parameter: Age (day) Value: 21
  misc_feature: MA Experiment 20000265 PARAMETER Experiment Name: At_Open_Flower_P Parameter: Plant Line Value: WS
  misc_feature: MA Experiment 20000265 PARAMETER Experiment Name: At_Open_Flower_P Parameter: Tissue Value: Closed Flower vs. Whole Plant
  misc_feature: MA Experiment ID: 20000439 Result: Up-regulated in Transcription
  misc_feature: MA Experiment 20000439 PARAMETER Experiment Name: At_Roots__P Parameter: Age (day) Value: 14 vs. 21
  misc_feature: MA Experiment 20000439 PARAMETER Experiment Name: At_Roots__P Parameter: Organism Value: A. thaliana
  misc_feature: MA Experiment 20000439 PARAMETER Experiment Name: At_Roots__P Parameter: Tissue Value: Roots vs. Whole Plant
  misc_feature: MA Experiment ID: 20000444 Result: Up-regulated in Transcription
  misc_feature: MA Experiment 20000444 PARAMETER Experiment Name: At_100uM_NAA__P Parameter: Age (day) Value: 14
  misc_feature: MA Experiment 20000444 PARAMETER Experiment Name: At_100uM_NAA__P Parameter: Organism Value: A. thaliana
  misc_feature: MA Experiment 20000444 PARAMETER Experiment Name: At_100uM_NAA__P Parameter: Plant Line Value: WS
  misc_feature: MA Experiment 20000444 PARAMETER Experiment Name: At_100uM_NAA__P Parameter: Timepoint (hr) Value: 1
  misc_feature: MA Experiment 20000444 PARAMETER Experiment Name: At_100uM_NAA__P Parameter: Tissue Value: Aerial
  misc_feature: MA Experiment 20000444 PARAMETER Experiment Name: At_100uM_NAA__P Parameter: Treatment Value: 100uM NAA vs. No Treatment
  misc_feature: MA Experiment ID: 20000453 Result: Up-regulated in Transcription
  misc_feature: MA Experiment 20000453 PARAMETER Experiment Name: At_100uM_ABA_P Parameter: Age (day) Value: 15
  misc_feature: MA Experiment 20000453 PARAMETER Experiment Name: At_100uM_ABA_P Parameter: Organism Value: A. thaliana
  misc_feature: MA Experiment 20000453 PARAMETER Experiment Name: At_100uM_ABA_P Parameter: Plant Line Value: WS
  misc_feature: MA Experiment 20000453 PARAMETER Experiment Name: At_100uM_ABA_P Parameter: Timepoint (hr) Value: 24
  misc_feature: MA Experiment 20000453 PARAMETER Experiment Name: At_100uM_ABA_P Parameter: Tissue Value: Aerial
  misc_feature: MA Experiment 20000453 PARAMETER Experiment Name: At_100uM_ABA_P Parameter: Treatment Value: 100uM ABA vs. No Treatment
  misc_feature: MA Experiment ID: 20001247 Result: Up-regulated in Transcription
  misc_feature: MA Experiment 20001247 PARAMETER Experiment Name: At_Far-red-induction_P Parameter: Age (day) Value: 7
  misc_feature: MA Experiment 20001247 PARAMETER Experiment Name: At_Far-red-induction_P Parameter: Light Value: Far-red vs. White
  misc_feature: MA Experiment 20001247 PARAMETER Experiment Name: At_Far-red-induction_P Parameter: Organism Value: A. thaliana
  misc_feature: MA Experiment 20001247 PARAMETER Experiment Name: At_Far-red-induction_P Parameter: Plant Line Value: Columbia
  misc_feature: MA Experiment 20001247 PARAMETER Experiment Name: At_Far-red-induction_P Parameter: Timepoint (hr) Value: 1
  misc_feature: MA Experiment 20001247 PARAMETER Experiment Name: At_Far-red-induction_P Parameter: Tissue Value: Whole Plant
  misc_feature: MA Experiment ID: 20001556 Result: Down-regulated in Transcription
  misc_feature: MA Experiment 20001556 PARAMETER Experiment Name: At_Drought_Soil_Dry_P Parameter: Age (day) Value: 26
  misc_feature: MA Experiment 20001556 PARAMETER Experiment Name: At_Drought_Soil_Dry_P Parameter: Organism Value: A. thaliana
  misc_feature: MA Experiment 20001556 PARAMETER Experiment Name: At_Drought_Soil_Dry_P Parameter: Plant Line Value: WS
  misc_feature: MA Experiment 20001556 PARAMETER Experiment Name: At_Drought_Soil_Dry_P Parameter: Post Timepoint (hr) Value: None
  misc_feature: MA Experiment 20001556 PARAMETER Experiment Name: At_Drought_Soil_Dry_P Parameter: Post-Treatment Value: None
  misc_feature: MA Experiment 20001556 PARAMETER Experiment Name: At_Drought_Soil_Dry_P Parameter: Timepoint (day) Value: 12
  misc_feature: MA Experiment 20001556 PARAMETER Experiment Name: At_Drought_Soil_Dry_P Parameter: Treatment Value: Drought vs. No Drought
atggctctcgaaacttttctaataaaactcaaaaacgctatttcctccaaaccaacttctcgtcgaccacaccgatcatctcctccgatatcaaccaccacttcctccgtcggagtattatcgttcgaagtagcacgtgtcatgaccaaactcctacatctcactcactctctcaccgattccaatctcctcactcctcgagaccactctctttccttagaaggtctaaccaaaatcgtcaacggcgacgaaacattccacctcagcctcgtttgtgctgagctcgcagatagtctcgcccacgcagctaactctgtttcaagactgagcaaccgctgcaccacggccagcctccgttctttccaccgcttattccatgaatttgccgacatgggtcgtgaccctcatggatgggtcatgaactgtaaagacacagaagctaaaaacaagaaaatcgaaagatacgtgagcgtgacgacagctttgtatagagagatggaagaaatggcgatattagagaactctctacgaaaacaaagtttacagattgggatcgaattcgaagaagaagaagactacgagaacaagaaagatgttatgaaagtgatagatctacagaacaagattgagagacagaaacaacatgtcaagtatctaaaagacagatctctctggaacaaaagcttcgacactgtcgtgttgattctcgccagatcggtattcacagcactcgctagactcaaatccgtcttctcctccgccgcagccactgggtacatggttccgaccgtcgtgtcttctctccctcgttctctctcttcttcttcttcctctatgaatcttgttcaccctagcccaaacgacgaagagagagacaagacgacgacgtcttctgcgtttcttgaagaaagctcaagactattgaaaccaccggagacaactctcggcggagctggcgtggcgcttcactacgcgaatctgatagtagtaatggagaagatgataaagcaacctcagcttgtaggtcttgacgcgagagacgatctgtattcaatgttaccggcaagtgtgagatcgtcacttaggtcaaggctaaaaggagttggtttcacggcgacggacggtggtttagcgacggagtggaaggcggctttaggtcggatcttacggtggttgttaccattggcgcagaatatgattaggtggcagagtgagagaagctttgagcagcaacacatggcgacggcaacgaatagtcagaacagagtgatgttagttcaaacactagtgtttgcagataaagttaagacagaagcagccataacagagcttcttgttgggttgaattacatctggagattcgaaagagagatgactgcgaaagctctgtttaatctacagtgtcctcctactaattacagctaa

SEQ ID NO: 90105 - protein, 474 aa, Arabidopsis thaliana
  peptide (1)..(474): Ceres Seq. ID no. 12722174
  misc_feature (314)..(401): Pfam Name: Protein of unknown function (DUF668) Pfam Description: Protein of unknown function (DUF668)
  misc_feature (1)..(474): Homolog of NCBI NO: 15242144 NR Description: putative protein; protein id: At5g51670.1 thaliana] >gi|8953735|dbj|BAA98099.1| contains similarity to
  misc_feature (173)..(474): Homolog of NCBI NO: 27754455 NR Description: unknown protein [Arabidopsis thaliana]
  misc_feature (1)..(76): Homolog of NCBI NO: 27754455 NR Description: unknown protein [Arabidopsis thaliana]
  misc_feature (1)..(459): Homolog of NCBI NO: 30102981 NR Description: hypothetical protein [Oryza sativa (japonica
  misc_feature (37)..(251): Homolog of NCBI NO: 15238198 NR Description: putative protein; protein id: At5g04550.1, by cDNA: gi_13605828, supported by cDNA: gi_17064801, supported cDNA: gi_20259825, supported by cDNA: gi_20260407 [Arabidopsis
  misc_feature (263)..(463): Homolog of NCBI NO: 15238198 NR Description: putative protein; protein id: At5g04550.1, by cDNA: gi_13605828, supported by cDNA: gi_17064801, supported cDNA: gi_20259825, supported by cDNA: gi_20260407 [Arabidopsis
  misc_feature (1)..(280): Homolog of NCBI NO: 7939524 NR Description: contains similarity to unknown
  misc_feature (305)..(460): Homolog of NCBI NO: 7939524 NR Description: contains similarity to unknown
  misc_feature (10)..(280): Homolog of NCBI NO: 15228977 NR Description: hypothetical protein; protein id: At3g23160.1
  misc_feature (305)..(460): Homolog of NCBI NO: 15228977 NR Description: hypothetical protein; protein id: At3g23160.1
MALETFLIKLKNAISSKPTSRRPHRSSPPISTTTSSVGVLSFEVARVMTKLLHLTHSLTDSNLLTPRDHSLSLEGLTKIVNGDETFHLSLVCAELADSLAHAANSVSRLSNRCTTASLRSFHRLFHEFADMGRDPHGWVMNCKDTEAKNKKIERYVSVTTALYREMEEMAILENSLRKQSLQIGIEFEEEEDYENKKDVMKVIDLQNKIERQKQHVKYLKDRSLWNKSFDTVVLILARSVFTALARLKSVFSSAAATGYMVPTVVSSLPRSLSSSSSSMNLVHPSPNDEERDKTTTSSAFLEESSRLLKPPETTLGGAGVALHYANLIVVMEKMIKQPQLVGLDARDDLYSMLPASVRSSLRSRLKGVGFTATDGGLATEWKAALGRILRWLLPLAQNMIRWQSERSFEQQHMATATNSQNRVMLVQTLVFADKVKTEAAITELLVGLNYIWRFEREMTAKALFNLQCPPTNYS

SEQ ID NO: 90106 - protein, 427 aa, Arabidopsis thaliana
  peptide (1)..(427): Ceres Seq. ID no. 12722175
  misc_feature (267)..(354): Pfam Name: Protein of unknown function (DUF668) Pfam Description: Protein of unknown function (DUF668)
  misc_feature (1)..(427): Homolog of NCBI NO: 15242144 NR Description: putative protein; protein id: At5g51670.1 thaliana] >gi|8953735|dbj|BAA98099.1| contains similarity to
  misc_feature (126)..(427): Homolog of NCBI NO: 27754455 NR Description: unknown protein [Arabidopsis thaliana]
  misc_feature (1)..(29): Homolog of NCBI NO: 27754455 NR Description: unknown protein [Arabidopsis thaliana]
  misc_feature (1)..(412): Homolog of NCBI NO: 30102981 NR Description: hypothetical protein [Oryza sativa (japonica
  misc_feature (1)..(204): Homolog of NCBI NO: 15238198 NR Description: putative protein; protein id: At5g04550.1, by cDNA: gi_13605828, supported by cDNA: gi_17064801, supported cDNA: gi_20259825, supported by cDNA: gi_20260407 [Arabidopsis
  misc_feature (216)..(416): Homolog of NCBI NO: 15238198 NR Description: putative protein; protein id: At5g04550.1, by cDNA: gi_13605828, supported by cDNA: gi_17064801, supported cDNA: gi_20259825, supported by cDNA: gi_20260407 [Arabidopsis
  misc_feature (1)..(233): Homolog of NCBI NO: 7939524 NR Description: contains similarity to unknown
  misc_feature (258)..(413): Homolog of NCBI NO: 7939524 NR Description: contains similarity to unknown
  misc_feature (1)..(233): Homolog of NCBI NO: 15228977 NR Description: hypothetical protein; protein id: At3g23160.1
  misc_feature (258)..(413): Homolog of NCBI NO: 15228977 NR Description: hypothetical protein; protein id: At3g23160.1
MTKLLHLTHSLTDSNLLTPRDHSLSLEGLTKIVNGDETFHLSLVCAELADSLAHAANSVSRLSNRCTTASLRSFHRLFHEFADMGRDPHGWVMNCKDTEAKNKKIERYVSVTTALYREMEEMAILENSLRKQSLQIGIEFEEEEDYENKKDVMKVIDLQNKIERQKQHVKYLKDRSLWNKSFDTVVLILARSVFTALARLKSVFSSAAATGYMVPTVVSSLPRSLSSSSSSMNLVHPSPNDEERDKTTTSSAFLEESSRLLKPPETTLGGAGVALHYANLIVVMEKMIKQPQLVGLDARDDLYSMLPASVRSSLRSRLKGVGFTATDGGLATEWKAALGRILRWLLPLAQNMIRWQSERSFEQQHMATATNSQNRVMLVQTLVFADKVKTEAAITELLVGLNYIWRFEREMTAKALFNLQCPPTNYS

SEQ ID NO: 90107 - protein, 344 aa, Arabidopsis thaliana
  peptide (1)..(344): Ceres Seq. ID no. 12722176
  misc_feature (184)..(271): Pfam Name: Protein of unknown function (DUF668) Pfam Description: Protein of unknown function (DUF668)
  misc_feature (1)..(344): Homolog of NCBI NO: 15242144 NR Description: putative protein; protein id: At5g51670.1 thaliana] >gi|8953735|dbj|BAA98099.1| contains similarity to
  misc_feature (43)..(344): Homolog of NCBI NO: 27754455 NR Description: unknown protein [Arabidopsis thaliana]
  misc_feature (1)..(329): Homolog of NCBI NO: 30102981 NR Description: hypothetical protein [Oryza sativa (japonica
  misc_feature (1)..(121): Homolog of NCBI NO: 15238198 NR Description: putative protein; protein id: At5g04550.1, by cDNA: gi_13605828, supported by cDNA: gi_17064801, supported cDNA: gi_20259825, supported by cDNA: gi_20260407 [Arabidopsis
  misc_feature (133)..(333): Homolog of NCBI NO: 15238198 NR Description: putative protein; protein id: At5g04550.1, by cDNA: gi_13605828, supported by cDNA: gi_17064801, supported cDNA: gi_20259825, supported by cDNA: gi_20260407 [Arabidopsis
  misc_feature (1)..(150): Homolog of NCBI NO: 7939524 NR Description: contains similarity to unknown
  misc_feature (175)..(330): Homolog of NCBI NO: 7939524 NR Description: contains similarity to unknown
  misc_feature (1)..(150): Homolog of NCBI NO: 15228977 NR Description: hypothetical protein; protein id: At3g23160.1
  misc_feature (175)..(330): Homolog of NCBI NO: 15228977 NR Description: hypothetical protein; protein id: At3g23160.1
  misc_feature (1)..(327): Homolog of NCBI NO: 34902086 NR Description: SR-rich pre-mRNA splicing activator [Oryza sativa
MGRDPHGWVMNCKDTEAKNKKIERYVSVTTALYREMEEMAILENSLRKQSLQIGIEFEEEEDYENKKDVMKVIDLQNKIERQKQHVKYLKDRSLWNKSFDTVVLILARSVFTALARLKSVFSSAAATGYMVPTVVSSLPRSLSSSSSSMNLVHPSPNDEERDKTTTSSAFLEESSRLLKPPETTLGGAGVALHYANLIVVMEKMIKQPQLVGLDARDDLYSMLPASVRSSLRSRLKGVGFTATDGGLATEWKAALGRILRWLLPLAQNMIRWQSERSFEQQHMATATNSQNRVMLVQTLVFADKVKTEAAITELLVGLNYIWRFEREMTAKALFNLQCPPTNYS

SEQ ID NO: 90108 - DNA, 1251 bp, Arabidopsis thaliana
  misc_feature (1)..(1251): Ceres Seq. ID no. 12722181
  misc_feature: MA Experiment ID: 20000180 Result: Down-regulated in Transcription
  misc_feature: MA Experiment 20000180 PARAMETER Experiment Name: At_Germinating_Seeds_P Parameter: Age (hr) Value: 24 vs. 0
  misc_feature: MA Experiment 20000180 PARAMETER Experiment Name: At_Germinating_Seeds_P Parameter: Tissue Value: Germinating Seeds
  misc_feature: MA Experiment ID: 20000227 Result: Up-regulated in Transcription
  misc_feature: MA Experiment 20000227 PARAMETER Experiment Name: At_Root-Tips-vs-Tops_P Parameter: Tissue Value: Root Tips vs. Root Tops
  misc_feature: MA Experiment ID: 20000267 Result: Up-regulated in Transcription
  misc_feature: MA Experiment 20000267 PARAMETER Experiment Name: At_Drought_P Parameter: Age (day) Value: 7
  misc_feature: MA Experiment 20000267 PARAMETER Experiment Name: At_Drought_P Parameter: Organism Value: A. thaliana
  misc_feature: MA Experiment 20000267 PARAMETER Experiment Name: At_Drought_P Parameter: Plant Line Value: WS
  misc_feature: MA Experiment 20000267 PARAMETER Experiment Name: At_Drought_P Parameter: Timepoint (hr) Value: 6
  misc_feature: MA Experiment 20000267 PARAMETER Experiment Name: At_Drought_P Parameter: Tissue Value: Whole Plant
  misc_feature: MA Experiment 20000267 PARAMETER Experiment Name: At_Drought_P Parameter: Treatment Value: Drought vs. No Drought
  misc_feature: MA Experiment ID: 20000436 Result: Up-regulated in Transcription
  misc_feature: MA Experiment 20000436 PARAMETER Experiment Name: At_Drought_P Parameter: Age (day) Value: 7
  misc_feature: MA Experiment 20000436 PARAMETER Experiment Name: At_Drought_P Parameter: Organism Value: A. thaliana
  misc_feature: MA Experiment 20000436 PARAMETER Experiment Name: At_Drought_P Parameter: Plant Line Value: WS
  misc_feature: MA Experiment 20000436 PARAMETER Experiment Name: At_Drought_P Parameter: Timepoint (hr) Value: 12
  misc_feature: MA Experiment 20000436 PARAMETER Experiment Name: At_Drought_P Parameter: Tissue Value: Whole Plant
  misc_feature: MA Experiment 20000436 PARAMETER Experiment Name: At_Drought_P Parameter: Treatment Value: Drought vs. No Drought
  misc_feature: MA Experiment ID: 20000437 Result: Up-regulated in Transcription
  misc_feature: MA Experiment 20000437 PARAMETER Experiment Name: At_Drought_P Parameter: Age (day) Value: 8
  misc_feature: MA Experiment 20000437 PARAMETER Experiment Name: At_Drought_P Parameter: Organism Value: A. thaliana
  misc_feature: MA Experiment 20000437 PARAMETER Experiment Name: At_Drought_P Parameter: Plant Line Value: WS
  misc_feature: MA Experiment 20000437 PARAMETER Experiment Name: At_Drought_P Parameter: Timepoint (hr) Value: 24
  misc_feature: MA Experiment 20000437 PARAMETER Experiment Name: At_Drought_P Parameter: Tissue Value: Whole Plant
  misc_feature: MA Experiment 20000437 PARAMETER Experiment Name: At_Drought_P Parameter: Treatment Value: Drought vs. No Drought
  misc_feature: MA Experiment ID: 20001556 Result: Up-regulated in Transcription
  misc_feature: MA Experiment 20001556 PARAMETER Experiment Name: At_Drought_Soil_Dry_P Parameter: Age (day) Value: 26
  misc_feature: MA Experiment 20001556 PARAMETER Experiment Name: At_Drought_Soil_Dry_P Parameter: Organism Value: A. thaliana
  misc_feature: MA Experiment 20001556 PARAMETER Experiment Name: At_Drought_Soil_Dry_P Parameter: Plant Line Value: WS
  misc_feature: MA Experiment 20001556 PARAMETER Experiment Name: At_Drought_Soil_Dry_P Parameter: Post Timepoint (hr) Value: None
  misc_feature: MA Experiment 20001556 PARAMETER Experiment Name: At_Drought_Soil_Dry_P Parameter: Post-Treatment Value: None
  misc_feature: MA Experiment 20001556 PARAMETER Experiment Name: At_Drought_Soil_Dry_P Parameter: Timepoint (day) Value: 12
  misc_feature: MA Experiment 20001556 PARAMETER Experiment Name: At_Drought_Soil_Dry_P Parameter: Treatment Value: Drought vs. No Drought
  misc_feature: MA Experiment ID: 20001757 Result: Down-regulated in Transcription
  misc_feature: MA Experiment 20001757 PARAMETER Experiment Name: At_50mM_NH4NO3_L-to-H_P Parameter: Timepoint (hr) Value: 6
  misc_feature: MA Experiment 20001757 PARAMETER Experiment Name: At_50mM_NH4NO3_L-to-H_P Parameter: Tissue Value: Leaf
  misc_feature: MA Experiment 20001757 PARAMETER Experiment Name: At_50mM_NH4NO3_L-to-H_P Parameter: Treatment Value: 50mM NH4NO3 vs 100mM Mannitol
  misc_feature: MA Experiment ID: 20001904 Result: Up-regulated in Transcription
  misc_feature: MA Experiment 20001904 PARAMETER Experiment Name: At_Drought_Reproduction_P Parameter: Age (day) Value: 37
  misc_feature: MA Experiment 20001904 PARAMETER Experiment Name: At_Drought_Reproduction_P Parameter: Organism Value: A. thaliana
  misc_feature: MA Experiment 20001904 PARAMETER Experiment Name: At_Drought_Reproduction_P Parameter: Plant Line Value: WS
  misc_feature: MA Experiment 20001904 PARAMETER Experiment Name: At_Drought_Reproduction_P Parameter: Timepoint (day) Value: 7
  misc_feature: MA Experiment 20001904 PARAMETER Experiment Name: At_Drought_Reproduction_P Parameter: Tissue Value: Rosettes
  misc_feature: MA Experiment 20001904 PARAMETER Experiment Name: At_Drought_Reproduction_P Parameter: Treatment Value: Drought vs. No Drought
  misc_feature: MA Experiment ID: 20001910 Result: Up-regulated in Transcription
  misc_feature: MA Experiment 20001910 PARAMETER Experiment Name: At_Drought_Reproduction_P Parameter: Age (day) Value: 37
  misc_feature: MA Experiment 20001910 PARAMETER Experiment Name: At_Drought_Reproduction_P Parameter: Organism Value: A. thaliana
  misc_feature: MA Experiment 20001910 PARAMETER Experiment Name: At_Drought_Reproduction_P Parameter: Plant Line Value: WS
  misc_feature: MA Experiment 20001910 PARAMETER Experiment Name: At_Drought_Reproduction_P Parameter: Timepoint (day) Value: 7
  misc_feature: MA Experiment 20001910 PARAMETER Experiment Name: At_Drought_Reproduction_P Parameter: Tissue Value: Flowers
  misc_feature: MA Experiment 20001910 PARAMETER Experiment Name: At_Drought_Reproduction_P Parameter: Treatment Value: Drought vs. No Drought
atgactgaaatctacagaacaatttcaaccggacgtggagacgacgtttctccgactaaatgccgtgaacgtcgtcgtcggagaattgagatgcggagacaagcggcggttttcggcgaacctagttcgtctaggaatcgtgatcggacggacatggaagtttactcaagttttgacgttccattgaggaaacaagctcggaggtcagagatcggtggtcttccggcggatatcgggggctttttggcacctccggcggcatcttcttgccaaaaatcggaagcgccggtgtggaagggagaagaaacggaggatgagccgttgtacggtatagtttcggttatgggaagatctcgtaagatggaggattcggttactgttaaaccgaatttgtgcaaaccggaagttaaccggcaaagaccggttcatttctttgcggtatacgatggccacggcggttctcaggtgtcaacattgtgcagcacgactatgcacacgtttgtcaaggaggagctagagcaaaacctcgaagaggaggaagaaggaagcgaaaacgatgtcgtggagaggaaatggcggggcgtgatgaaacggagtttcaagaggatggatgagatggcaacgagtacatgcgtgtgtgggactagtgtgccgttgtgtaactgtgatccgagggaggctgcgatttcgggttcaacggcggtcactgcggttttgacgcacgatcatattattgtagccaatactggtgactcacgtgcggtgttgtgtcgaaatggaatggctattcctctgagtaacgatcacaagccggatagaccagacgagcgtgcgaggattgaagcagctggtggtcgagttttagtagtggatggagctagagttgaaggaattctagccacgtccagagccataggggacaggtatctaaaaccaatggtagcatgggaaccagaagtaacattcatgagaagggaatctggagatgaatgcttagtattagcaagcgatgggctttgggatgtactctcgagtcagctagcttgtgacatagctaggttttgtctccgcgaagaaactccctcgagccttgatttaaatagaatggctcaagaagacgacaatgacggagaacaaaatccttcaaggagtgtattggctgcaacgttgctaacgcggttggctttgggtagacaaagcagtgataatataagtgtggtcgtcattgatctcaagaatagctctcagtaa

SEQ ID NO: 90109 - protein, 416 aa, Arabidopsis thaliana
  peptide (1)..(416): Ceres Seq. ID no. 12722182
  misc_feature (107)..(404): Pfam Name: Protein phosphatase 2C Pfam Description: Protein phosphatase 2C
  misc_feature (1)..(416): Homolog of NCBI NO: 15242182 NR Description: protein phosphatase 2C (PP2C); protein id:
  misc_feature (22)..(412): Homolog of NCBI NO: 33309516 NR Description: protein phosphatase 2C [Prunus avium]
  misc_feature (88)..(412): Homolog of NCBI NO: 15227078 NR Description: protein phosphatase 2C (PP2C), putative; protein At2g29380.1 [Arabidopsis thaliana] >gi|25352214|pir||F84695
  misc_feature (43)..(412): Homolog of NCBI NO: 10432446 NR Description: protein phosphatase 2C [Nicotiana tabacum]
  misc_feature (101)..(382): Homolog of NCBI NO: 34902050 NR Description: putative Serine/threonine phosphatases [Oryza
  misc_feature (370)..(412): Homolog of NCBI NO: 34902050 NR Description: putative Serine/threonine phosphatases [Oryza
  misc_feature (35)..(361): Homolog of NCBI NO: 34908256 NR Description: putative protein phosphatase 2C [Oryza sativa
  misc_feature (387)..(412): Homolog of NCBI NO: 34908256 NR Description: putative protein phosphatase 2C [Oryza sativa
  misc_feature (101)..(360): Homolog of NCBI NO: 15222398 NR Description: protein phosphatase 2C (PP2C), putative; protein At1g07430.1, supported by cDNA: 118185., supported by cDNA: supported by cDNA: gi_20259128 [Arabidopsis thaliana] thaliana
  misc_feature (370)..(412): Homolog of NCBI NO: 15222398 NR Description: protein phosphatase 2C (PP2C), putative; protein At1g07430.1, supported by cDNA: 118185., supported by cDNA: supported by cDNA: gi_20259128 [Arabidopsis thaliana] thaliana
MTEIYRTISTGRGDDVSPTKCRERRRRRIEMRRQAAVFGEPSSSRNRDRTDMEVYSSFDVPLRKQARRSEIGGLPADIGGFLAPPAASSCQKSEAPVWKGEETEDEPLYGIVSVMGRSRKMEDSVTVKPNLCKPEVNRQRPVHFFAVYDGHGGSQVSTLCSTTMHTFVKEELEQNLEEEEEGSENDVVERKWRGVMKRSFKRMDEMATSTCVCGTSVPLCNCDPREAAISGSTAVTAVLTHDHIIVANTGDSRAVLCRNGMAIPLSNDHKPDRPDERARIEAAGGRVLVVDGARVEGILATSRAIGDRYLKPMVAWEPEVTFMRRESGDECLVLASDGLWDVLSSQLACDIARFCLREETPSSLDLNRMAQEDDNDGEQNPSRSVLAATLLTRLALGRQSSDNISVVVIDLKNSSQ

SEQ ID NO: 90110 - protein, 386 aa, Arabidopsis thaliana
  peptide (1)..(386): Ceres Seq. ID no. 12722183
  misc_feature (77)..(374): Pfam Name: Protein phosphatase 2C Pfam Description: Protein phosphatase 2C
  misc_feature (1)..(386): Homolog of NCBI NO: 15242182 NR Description: protein phosphatase 2C (PP2C); protein id:
  misc_feature (1)..(382): Homolog of NCBI NO: 33309516 NR Description: protein phosphatase 2C [Prunus avium]
  misc_feature (58)..(382): Homolog of NCBI NO: 15227078 NR Description: protein phosphatase 2C (PP2C), putative; protein At2g29380.1 [Arabidopsis thaliana] >gi|25352214|pir||F84695
  misc_feature (13)..(382): Homolog of NCBI NO: 10432446 NR Description: protein phosphatase 2C [Nicotiana tabacum]
  misc_feature (71)..(352): Homolog of NCBI NO: 34902050 NR Description: putative Serine/threonine phosphatases [Oryza
  misc_feature (340)..(382): Homolog of NCBI NO: 34902050 NR Description: putative Serine/threonine phosphatases [Oryza
  misc_feature (5)..(331): Homolog of NCBI NO: 34908256 NR Description: putative protein phosphatase 2C [Oryza sativa
  misc_feature (357)..(382): Homolog of NCBI NO: 34908256 NR Description: putative protein phosphatase 2C [Oryza sativa
  misc_feature (71)..(330): Homolog of NCBI NO: 15222398 NR Description: protein phosphatase 2C (PP2C), putative; protein At1g07430.1, supported by cDNA: 118185., supported by cDNA: supported by cDNA: gi_20259128 [Arabidopsis thaliana] thaliana
  misc_feature (340)..(382): Homolog of NCBI NO: 15222398 NR Description: protein phosphatase 2C (PP2C), putative; protein At1g07430.1, supported by cDNA: 118185., supported by cDNA: supported by cDNA: gi_20259128 [Arabidopsis thaliana] thaliana
MRRQAAVFGEPSSSRNRDRTDMEVYSSFDVPLRKQARRSEIGGLPADIGGFLAPPAASSCQKSEAPVWKGEETEDEPLYGIVSVMGRSRKMEDSVTVKPNLCKPEVNRQRPVHFFAVYDGHGGSQVSTLCSTTMHTFVKEELEQNLEEEEEGSENDVVERKWRGVMKRSFKRMDEMATSTCVCGTSVPLCNCDPREAAISGSTAVTAVLTHDHIIVANTGDSRAVLCRNGMAIPLSNDHKPDRPDERARIEAAGGRVLVVDGARVEGILATSRAIGDRYLKPMVAWEPEVTFMRRESGDECLVLASDGLWDVLSSQLACDIARFCLREETPSSLDLNRMAQEDDNDGEQNPSRSVLAATLLTRLALGRQSSDNISVVVIDLKNSSQ

SEQ ID NO: 90111 - protein, 365 aa, Arabidopsis thaliana
  peptide (1)..(365): Ceres Seq. ID no. 12722184
  misc_feature (56)..(353): Pfam Name: Protein phosphatase 2C Pfam Description: Protein phosphatase 2C
  misc_feature (1)..(365): Homolog of NCBI NO: 15242182 NR Description: protein phosphatase 2C (PP2C); protein id:
  misc_feature (1)..(361): Homolog of NCBI NO: 33309516 NR Description: protein phosphatase 2C [Prunus avium]
  misc_feature (37)..(361): Homolog of NCBI NO: 15227078 NR Description: protein phosphatase 2C (PP2C), putative; protein At2g29380.1 [Arabidopsis thaliana] >gi|25352214|pir||F84695
  misc_feature (1)..(361): Homolog of NCBI NO: 10432446 NR Description: protein phosphatase 2C [Nicotiana tabacum]
  misc_feature (50)..(331): Homolog of NCBI NO: 34902050 NR Description: putative Serine/threonine phosphatases [Oryza
  misc_feature (319)..(361): Homolog of NCBI NO: 34902050 NR Description: putative Serine/threonine phosphatases [Oryza
  misc_feature (1)..(310): Homolog of NCBI NO: 34908256 NR Description: putative protein phosphatase 2C [Oryza sativa
  misc_feature (336)..(361): Homolog of NCBI NO: 34908256 NR Description: putative protein phosphatase 2C [Oryza sativa
  misc_feature (50)..(309): Homolog of NCBI NO: 15222398 NR Description: protein phosphatase 2C (PP2C), putative; protein At1g07430.1, supported by cDNA: 118185., supported by cDNA: supported by cDNA: gi_20259128 [Arabidopsis thaliana] thaliana
  misc_feature (319)..(361): Homolog of NCBI NO: 15222398 NR Description: protein phosphatase 2C (PP2C), putative; protein At1g07430.1, supported by cDNA: 118185., supported by cDNA: supported by cDNA: gi_20259128 [Arabidopsis thaliana] thaliana
MEVYSSFDVPLRKQARRSEIGGLPADIGGFLAPPAASSCQKSEAPVWKGEETEDEPLYGIVSVMGRSRKMEDSVTVKPNLCKPEVNRQRPVHFFAVYDGHGGSQVSTLCSTTMHTFVKEELEQNLEEEEEGSENDVVERKWRGVMKRSFKRMDEMATSTCVCGTSVPLCNCDPREAAISGSTAVTAVLTHDHIIVANTGDSRAVLCRNGMAIPLSNDHKPDRPDERARIEAAGGRVLVVDGARVEGILATSRAIGDRYLKPMVAWEPEVTFMRRESGDECLVLASDGLWDVLSSQLACDIARFCLREETPSSLDLNRMAQEDDNDGEQNPSRSVLAATLLTRLALGRQSSDNISVVVIDLKNSSQ

SEQ ID NO: 90112 - DNA, 1965 bp, Arabidopsis thaliana
  misc_feature (1)..(1965): Ceres Seq. ID no. 12722185
  misc_feature: MA Experiment ID: 20000328 Result: Down-regulated in Transcription
  misc_feature: MA Experiment 20000328 PARAMETER Experiment Name: At_42deg_Heat_Sub_P Parameter: Age (day) Value: 14
  misc_feature: MA Experiment 20000328 PARAMETER Experiment Name: At_42deg_Heat_Sub_P Parameter: Organism Value: A. thaliana
  misc_feature: MA Experiment 20000328 PARAMETER Experiment Name: At_42deg_Heat_Sub_P Parameter: Plant Line Value: WS
  misc_feature: MA Experiment 20000328 PARAMETER Experiment Name: At_42deg_Heat_Sub_P Parameter: Temperature (deg C) Value: 42 vs. 22
  misc_feature: MA Experiment 20000328 PARAMETER Experiment Name: At_42deg_Heat_Sub_P Parameter: Timepoint (hr) Value: 6
  misc_feature: MA Experiment 20000328 PARAMETER Experiment Name: At_42deg_Heat_Sub_P Parameter: Tissue Value: Aerial
atgccgtcacgaacactcccgtcgccggcaccggtaaattcaccgttctcttcctccgtcacacctcaccatgaaacaaccaccacacgcatcttccctcctcttgcagctgtaggtttctctctcttcataactctctccatctgtttctgcaaattcaaccgcaaacgccgatctcccgccgccgtagcctcctcctctacaccgccgcagaaacaaccgttacacgagttctcctactcatctctccgtaaagccaccgcttctttctcaccggagaatcgactaggtcaaggcggattcggctctgtattccgtggaactttatctccttcctccggtggtggtaatgtcgccgttaaagtaatggattcaggttctcttcaaggagaaagagagtttcaaaacgagcttttcttcgctggtaagcttgattctcctcatgtagtttccgttattggcttctctcgacgacgacgaagccgtttgattcttgtatacgagcttatggatattggaaatcttcaagatgctcttcttcatcgtagatctcctgagcttatgatatggaatcgaagatttctcgttgcgattgatatagctaaagggattgaacatttacatagcttgaatccttgtgtgattcatggagatttgaaacctagtaatgtattgttggatcgattcttctctgctaagatctctgattttggtttagctaggttgaaatctgaacatgttgaagttaaagtagtgtctgagagtgatgtagtggaagattatggttctgtagttgaagaagttgagagtgttgttactaatactactggttgtgatgaatctaactttggattcactgatcagtctccggtgcctctttcatcgccggagatggtggagcaggtgcctatgacgtcaccggagacagttgtatcggtttctccggagatgggggagaaaggaagtgtgttggaggttggtaatgtggtgaggagtaaagattggtggtggaagcaagaagggaatgttggaagagggaaagggaaggagtatgtgatgcaatggattggttctgaggtgaaggaagagagacagagtagtgattggattgctgagacggcggaaggcggtaagaaagttgagaagaagaagagtagtaagagattagaatggtggctttcgttggatgaagagaaggagaaggggaagaagaagaagcggagaatggtgagagagtggtggaaagatgagtataggaaagagcttgctaagagaatgaagaagaagaagaagaagaaaactttggagtctgagttttatagtgatgatgtgagtggaagtgtggatcaaaggcggcacggggatggagaagtgtataggaagaaaagaagaggtgttagtagtaacagtataggtagtagcatagactggtggttagatgggctaagcggtgaacaatggagagcacggcgtagaaacagtcaagattcagttaagagttgcggagtcagtagcacgccgagcatgagagggacgatgtgctatgttgctcctgagtgttgtggtaataacatagatgatgtgtctgaaaaatctgatgtgtatagctatggagttttgttgttagtcctggtttcaggacggcggccgctggaagtaactggacccgcgtctgagatcatgctgcgtgcaaatctcatgtcgtgggcgaggaagctggcgagaagagggagactcggtgatctggtggatgaaaagctgcagttgttagaccaagaacaagcggttttgtgcattaaggtggctttgcaatgtctgcaaaaatcaccggtttcacgaccttcaatgaaagatgttttagaaatgcttacaggagcgataagcccaccggatttgcctacagaattctcaccatcaccgcagactcggttcccgttcaaggcacgaaggaagcagaatcgatag

SEQ ID NO: 90113 - protein, 654 aa, Arabidopsis thaliana
  peptide (1)..(654): Ceres Seq. ID no. 12722186
  misc_feature (1)..(654): Homolog of NCBI NO: 15235063 NR Description: receptor kinase-like protein; protein id:
  misc_feature (1)..(452): Homolog of NCBI NO: 30686865 NR Description: protein kinase family [Arabidopsis thaliana]
  misc_feature (605)..(654): Homolog of NCBI NO: 30686865 NR Description: protein kinase family [Arabidopsis thaliana]
  misc_feature (159)..(651): Homolog of NCBI NO: 37531832 NR Description: putative protein kinase [Oryza sativa (japonica group)] >gi|22725985|gb|AAN04985.1| putative protein kinase
  misc_feature (1)..(144): Homolog of NCBI NO: 37531832 NR Description: putative protein kinase [Oryza sativa (japonica group)] >gi|22725985|gb|AAN04985.1| putative protein kinase
  misc_feature (222)..(651): Homolog of NCBI NO: 15225518 NR Description: putative protein kinase; protein id: At2g45590.1 thaliana] >gi|7485626|pir||T00872 probable protein kinase
  misc_feature (1)..(316): Homolog of NCBI NO: 15225518 NR Description: putative protein kinase; protein id: At2g45590.1 thaliana] >gi|7485626|pir||T00872 probable protein kinase
  misc_feature (78)..(284): Homolog of NCBI NO: 11994703 NR Description: somatic embryogenesis receptor kinase-like
  misc_feature (505)..(638): Homolog of NCBI NO: 11994703 NR Description: somatic embryogenesis receptor kinase-like
  misc_feature (54)..(284): Homolog of NCBI NO: 15225520 NR Description: putative protein kinase; protein id: At2g39660.1, by cDNA: gi_13272430, supported by cDNA: gi_17064833, supported cDNA: gi_18086423, supported by cDNA: gi_20259859, supported by
MPSRTLPSPAPVNSPFSSSVTPHHETTTTRIFPPLAAVGFSLFITLSICFCKFNRKRRSPAAVASSSTPPQKQPLHEFSYSSLRKATASFSPENRLGQGGFGSVFRGTLSPSSGGGNVAVKVMDSGSLQGEREFQNELFFAGKLDSPHVVSVIGFSRRRRSRLILVYELMDIGNLQDALLHRRSPELMIWNRRFLVAIDIAKGIEHLHSLNPCVIHGDLKPSNVLLDRFFSAKISDFGLARLKSEHVEVKVVSESDVVEDYGSVVEEVESVVTNTTGCDESNFGFTDQSPVPLSSPEMVEQVPMTSPETVVSVSPEMGEKGSVLEVGNVVRSKDWWWKQEGNVGRGKGKEYVMQWIGSEVKEERQSSDWIAETAEGGKKVEKKKSSKRLEWWLSLDEEKEKGKKKKRRMVREWWKDEYRKELAKRMKKKKKKKTLESEFYSDDVSGSVDQRRHGDGEVYRKKRRGVSSNSIGSSIDWWLDGLSGEQWRARRRNSQDSVKSCGVSSTPSMRGTMCYVAPECCGNNIDDVSEKSDVYSYGVLLLVLVSGRRPLEVTGPASEIMLRANLMSWARKLARRGRLGDLVDEKLQLLDQEQAVLCIKVALQCLQKSPVSRPSMKDVLEMLTGAISPPDLPTEFSPSPQTRFPFKARRKQNR

SEQ ID NO: 90114 - protein, 532 aa, Arabidopsis thaliana
  peptide (1)..(532): Ceres Seq. ID no. 12722187
  misc_feature (1)..(532): Homolog of NCBI NO: 15235063 NR Description: receptor kinase-like protein; protein id:
  misc_feature (1)..(330): Homolog of NCBI NO: 30686865 NR Description: protein kinase family [Arabidopsis thaliana]
  misc_feature (483)..(532): Homolog of NCBI NO: 30686865 NR Description: protein kinase family [Arabidopsis thaliana]
  misc_feature (37)..(529): Homolog of NCBI NO: 37531832 NR Description: putative protein kinase [Oryza sativa (japonica group)] >gi|22725985|gb|AAN04985.1| putative protein kinase
  misc_feature (1)..(22): Homolog of NCBI NO: 37531832 NR Description: putative protein kinase [Oryza sativa (japonica group)] >gi|22725985|gb|AAN04985.1| putative protein kinase
  misc_feature (100)..(529): Homolog of NCBI NO: 15225518 NR Description: putative protein kinase; protein id: At2g45590.1 thaliana] >gi|7485626|pir||T00872 probable protein kinase
  misc_feature (1)..(194): Homolog of NCBI NO: 15225518 NR Description: putative protein kinase; protein id: At2g45590.1 thaliana] >gi|7485626|pir||T00872 probable protein kinase
  misc_feature (1)..(162): Homolog of NCBI NO: 11994703 NR Description: somatic embryogenesis receptor kinase-like
  misc_feature (383)..(516): Homolog of NCBI NO: 11994703 NR Description: somatic embryogenesis receptor kinase-like
  misc_feature (1)..(162): Homolog of NCBI NO: 15225520 NR Description: putative protein kinase; protein id: At2g39660.1, by cDNA: gi_13272430, supported by cDNA: gi_17064833, supported cDNA: gi_18086423, supported by cDNA: gi_20259859, supported by
MDSGSLQGEREFQNELFFAGKLDSPHVVSVIGFSRRRRSRLILVYELMDIGNLQDALLHRRSPELMIWNRRFLVAIDIAKGIEHLHSLNPCVIHGDLKPSNVLLDRFFSAKISDFGLARLKSEHVEVKVVSESDVVEDYGSVVEEVESVVTNTTGCDESNFGFTDQSPVPLSSPEMVEQVPMTSPETVVSVSPEMGEKGSVLEVGNVVRSKDWWWKQEGNVGRGKGKEYVMQWIGSEVKEERQSSDWIAETAEGGKKVEKKKSSKRLEWWLSLDEEKEKGKKKKRRMVREWWKDEYRKELAKRMKKKKKKKTLESEFYSDDVSGSVDQRRHGDGEVYRKKRRGVSSNSIGSSIDWWLDGLSGEQWRARRRNSQDSVKSCGVSSTPSMRGTMCYVAPECCGNNIDDVSEKSDVYSYGVLLLVLVSGRRPLEVTGPASEIMLRANLMSWARKLARRGRLGDLVDEKLQLLDQEQAVLCIKVALQCLQKSPVSRPSMKDVLEMLTGAISPPDLPTEFSPSPQTRFPFKARRKQNR

SEQ ID NO: 90115 - protein, 485 aa, Arabidopsis thaliana
  peptide (1)..(485): Ceres Seq. ID no. 12722188
  misc_feature (1)..(485): Homolog of NCBI NO: 15235063 NR Description: receptor kinase-like protein; protein id:
  misc_feature (1)..(283): Homolog of NCBI NO: 30686865 NR Description: protein kinase family [Arabidopsis thaliana]
  misc_feature (436)..(485): Homolog of NCBI NO: 30686865 NR Description: protein kinase family [Arabidopsis thaliana]
  misc_feature (1)..(482): Homolog of NCBI NO: 37531832 NR Description: putative protein kinase [Oryza sativa (japonica group)] >gi|22725985|gb|AAN04985.1| putative protein kinase
  misc_feature (53)..(482): Homolog of NCBI NO: 15225518 NR Description: putative protein kinase; protein id: At2g45590.1 thaliana] >gi|7485626|pir||T00872 probable protein kinase
  misc_feature (1)..(147): Homolog of NCBI NO: 15225518 NR Description: putative protein kinase; protein id: At2g45590.1 thaliana] >gi|7485626|pir||T00872 probable protein kinase
  misc_feature (1)..(115): Homolog of NCBI NO: 11994703 NR Description: somatic embryogenesis receptor kinase-like
  misc_feature (336)..(469): Homolog of NCBI NO: 11994703 NR Description: somatic embryogenesis receptor kinase-like
  misc_feature (1)..(115): Homolog of NCBI NO: 15225520 NR Description: putative protein kinase; protein id: At2g39660.1, by cDNA: gi_13272430, supported by cDNA: gi_17064833, supported cDNA: gi_18086423, supported by cDNA: gi_20259859, supported by
  misc_feature (336)..(474): Homolog of NCBI NO: 15225520 NR Description: putative protein kinase; protein id: At2g39660.1, by cDNA: gi_13272430, supported by cDNA: gi_17064833, supported cDNA: gi_18086423, supported by cDNA: gi_20259859, supported by
MDIGNLQDALLHRRSPELMIWNRRFLVAIDIAKGIEHLHSLNPCVIHGDLKPSNVLLDRFFSAKISDFGLARLKSEHVEVKVVSESDVVEDYGSVVEEVESVVTNTTGCDESNFGFTDQSPVPLSSPEMVEQVPMTSPETVVSVSPEMGEKGSVLEVGNVVRSKDWWWKQEGNVGRGKGKEYVMQWIGSEVKEERQSSDWIAETAEGGKKVEKKKSSKRLEWWLSLDEEKEKGKKKKRRMVREWWKDEYRKELAKRMKKKKKKKTLESEFYSDDVSGSVDQRRHGDGEVYRKKRRGVSSNSIGSSIDWWLDGLSGEQWRARRRNSQDSVKSCGVSSTPSMRGTMCYVAPECCGNNIDDVSEKSDVYSYGVLLLVLVSGRRPLEVTGPASEIMLRANLMSWARKLARRGRLGDLVDEKLQLLDQEQAVLCIKVALQCLQKSPVSRPSMKDVLEMLTGAISPPDLPTEFSPSPQTRFPFKARRKQNR

SEQ ID NO: 90116 - DNA, 1938 bp, Arabidopsis thaliana
  misc_feature (1)..(1938): Ceres Seq. ID no. 12722213
  misc_feature: MA Experiment ID: 20000184 Result: Down-regulated in Transcription
  misc_feature: MA Experiment 20000184 PARAMETER Experiment Name: At_Shoots__P Parameter: Age (day) Value: 7
  misc_feature: MA Experiment 20000184 PARAMETER Experiment Name: At_Shoots__P Parameter: Tissue Value: Shoots vs. Whole Plant
  misc_feature: MA Experiment ID: 20000234 Result: Up-regulated in Transcription
  misc_feature: MA Experiment 20000234 PARAMETER Experiment Name: At_Siliques_P Parameter: Age (day) Value: 21
  misc_feature: MA Experiment 20000234 PARAMETER Experiment Name: At_Siliques_P Parameter: Organism Value: A. thaliana
  misc_feature: MA Experiment 20000234 PARAMETER Experiment Name: At_Siliques_P Parameter: Plant Line Value: WS
  misc_feature: MA Experiment 20000234 PARAMETER Experiment Name: At_Siliques_P Parameter: Tissue Value: Less Than 5mm Siliques vs. Whole Plant
  misc_feature: MA Experiment ID: 20000235 Result: Up-regulated in Transcription
  misc_feature: MA Experiment 20000235 PARAMETER Experiment Name: At_Siliques_P Parameter: Age (day) Value: 21
  misc_feature: MA Experiment 20000235 PARAMETER Experiment Name: At_Siliques_P Parameter: Organism Value: A. thaliana
  misc_feature: MA Experiment 20000235 PARAMETER Experiment Name: At_Siliques_P Parameter: Plant Line Value: WS
  misc_feature: MA Experiment 20000235 PARAMETER Experiment Name: At_Siliques_P Parameter: Tissue Value: 5-10mm Siliques vs. Whole Plant
  misc_feature: MA Experiment ID: 20000264 Result: Up-regulated in Transcription
  misc_feature: MA Experiment 20000264 PARAMETER Experiment Name: At_Open_Flower_P Parameter: Age (day) Value: 21
  misc_feature: MA Experiment 20000264 PARAMETER Experiment Name: At_Open_Flower_P Parameter: Plant Line Value: WS
  misc_feature: MA Experiment 20000264 PARAMETER Experiment Name: At_Open_Flower_P Parameter: Tissue Value: Open Flower vs. Whole Plant
  misc_feature: MA Experiment ID: 20000286 Result: Up-regulated in Transcription
  misc_feature: MA Experiment 20000286 PARAMETER Experiment Name: At_Open_Flower_P Parameter: Age (day) Value: 21
  misc_feature: MA Experiment 20000286 PARAMETER Experiment Name: At_Open_Flower_P Parameter: Plant Line Value: WS
  misc_feature: MA Experiment 20000286 PARAMETER Experiment Name: At_Open_Flower_P Parameter: Tissue Value: Half Open vs. Whole Plant
  misc_feature: MA Experiment ID: 20000438 Result: Down-regulated in Transcription
  misc_feature: MA Experiment 20000438 PARAMETER Experiment Name: At_Shoots__P Parameter: Age (day) Value: 14
  misc_feature: MA Experiment 20000438 PARAMETER Experiment Name: At_Shoots__P Parameter: Tissue Value: Shoots vs. Whole Plant
  misc_feature: MA Experiment ID: 20001760 Result: Up-regulated in Transcription
  misc_feature: MA Experiment 20001760 PARAMETER Experiment Name: At_50mM_NH4NO3_L-to-H_P Parameter: Timepoint (hr) Value: 2
  misc_feature: MA Experiment 20001760 PARAMETER Experiment Name: At_50mM_NH4NO3_L-to-H_P Parameter: Tissue Value: Siliques
  misc_feature: MA Experiment 20001760 PARAMETER Experiment Name: At_50mM_NH4NO3_L-to-H_P Parameter: Treatment Value: 50mM NH4NO3 vs 100mM Mannitol
  misc_feature: MA Experiment ID: 20001768 Result: Up-regulated in Transcription
  misc_feature: MA Experiment 20001768 PARAMETER Experiment Name: At_Far-red-enriched-adult_P Parameter: Age (day) Value: 28
  misc_feature: MA Experiment 20001768 PARAMETER Experiment Name: At_Far-red-enriched-adult_P Parameter: Light Value: Far-red enriched vs. White
  misc_feature: MA Experiment 20001768 PARAMETER Experiment Name: At_Far-red-enriched-adult_P Parameter: Organism Value: A. thaliana
  misc_feature: MA Experiment 20001768 PARAMETER Experiment Name: At_Far-red-enriched-adult_P Parameter: Plant Line Value: Columbia
  misc_feature: MA Experiment 20001768 PARAMETER Experiment Name: At_Far-red-enriched-adult_P Parameter: Timepoint (hr) Value: 1
  misc_feature: MA Experiment 20001768 PARAMETER Experiment Name: At_Far-red-enriched-adult_P Parameter: Tissue Value: Aerial
  misc_feature: MA Experiment ID: 20001771 Result: Up-regulated in Transcription
  misc_feature: MA Experiment 20001771 PARAMETER Experiment Name: At_Far-red-enriched-adult_P Parameter: Age (day) Value: 28
  misc_feature: MA Experiment 20001771 PARAMETER Experiment Name: At_Far-red-enriched-adult_P Parameter: Light Value: Far-red enriched vs. White
  misc_feature: MA Experiment 20001771 PARAMETER Experiment Name: At_Far-red-enriched-adult_P Parameter: Organism Value: A. thaliana
  misc_feature: MA Experiment 20001771 PARAMETER Experiment Name: At_Far-red-enriched-adult_P Parameter: Plant Line Value: Columbia
  misc_feature: MA Experiment 20001771 PARAMETER Experiment Name: At_Far-red-enriched-adult_P Parameter: Timepoint (hr) Value: 16
  misc_feature: MA Experiment 20001771 PARAMETER Experiment Name: At_Far-red-enriched-adult_P Parameter: Tissue Value: Aerial
  misc_feature: MA Experiment ID: 20001910 Result: Down-regulated in Transcription
  misc_feature: MA Experiment 20001910 PARAMETER Experiment Name: At_Drought_Reproduction_P Parameter: Age (day) Value: 37
  misc_feature: MA Experiment 20001910 PARAMETER Experiment Name: At_Drought_Reproduction_P Parameter: Organism Value: A. thaliana
  misc_feature: MA Experiment 20001910 PARAMETER Experiment Name: At_Drought_Reproduction_P Parameter: Plant Line Value: WS
  misc_feature: MA Experiment 20001910 PARAMETER Experiment Name: At_Drought_Reproduction_P Parameter: Timepoint (day) Value: 7
  misc_feature: MA Experiment 20001910 PARAMETER Experiment Name: At_Drought_Reproduction_P Parameter: Tissue Value: Flowers
  misc_feature: MA Experiment 20001910 PARAMETER Experiment Name: At_Drought_Reproduction_P Parameter: Treatment Value: Drought vs. No Drought
gctctaatctaaatattaaagaatcaaacttaatctttcacccataatgggtttacaaatattatggttatttcgcaaaatattcatcatcacatacatcttccatgcctcgtgttctccagataaagctggctattacagttttatgaaagatgcaacattagcaccaatgttcgctcggtttgattacataatcatcggaggagggacttcgggttgcgcgttagccgcgacgctatctcaaaacgctagcgttttggttcttgaacgcggtggtgctccctacgacaatcctacggcaacagatatcgaaaactttgccaccacactctcaaacacatcaccgaaatcttggtcgcaactttttatctccgaggacggcgtttacaacactcgtgcacgcgtcctcggtggtggctccgtgttaaacgccgggttctacacacgtgcgggagatgagtacgtgaaggagactgagtggaagactgatgaagtggaagctgcttacgagtgggtcgagaagaaagtggcgtttcaaccgccggttctgggatggcaaacggcgtttaaagatgggcttttggaggctggtgagtttccttacaatggtttcacgtatgatcatatctatgggactaagatcggtggtacgatctttgaccgtgctggtcatagacacacggccgctgatttgttggaatatgctaatccgggcaacattgttgtctacttgcatgcctctgttcacaagatcctcttcaccaccaaaggaaggccaaggccaaaagcatacggagtgatatttcaagacgcgaacggagtgttacacaaggcagagttagagaagaattcaatgaacgaggtgattttgtccgcgggggcgattgggagcccgcaattgttgatgctgagcggcataggtcccgcagctcatctcgcggctcacgggattaaaccgttggtcttagatcatccgatggtagggcaaggtatgggagataatcccatgaatgccatatttattccttctcctacgcccgtggaggtttctctaatacaagtcgttggaatcacaaagtttgaaagttacatagaaggagcaagtggtgtaatcttctcatatagttggactcgtagatttttcgatggtgttttgaattatctcaacgagatgcagacaagccgtactactagtactacatctccaacactgtcgacccaatccatcacagattttttcaatcccatcaatcctctattgaatgctaccacgagagccggtttgatcctccagaaaatcgcgggaccgatctcgagaggtcatttagagcttaggaacacaaacccggatgataatccttcagtaaggttcaactattatcaagagccagaggatctacagatatgtgttgaagggatcaacaccattattaaagtgatcaactccaaggcattctccaaattcaagtacccggacgcgaccatacatggactactcgatctaatgctaagcgttcctaccaatctgaggccgcggcatataacctcgatgttcaatttaaggcagttttgcattgacactgtgatgacaatttggcactaccatggaggttgccaagttggaagagtggttgacaagaattacagagtcttaggcattgattccttaagggtcatcgatggatccacatttctcaagtctccggggactaatcctcaagctactgttatgatgctcggaaggtatatgggccaaaggattcttcaagagagggagatatacaacaaaccggataaagaagcgtgagatattacttgttttgagaaaatcttgatcttggaattgttttaatcaatgtatgattaacttaaagagtatgaatgtgtacatctgttcatgttctgtttctaatatgtataataatggtggaattatgg

SEQ ID NO: 90117 - protein, 586 aa, Arabidopsis thaliana
  peptide (1)..(586): Ceres Seq. ID no. 12722214
  misc_feature (46)..(313): Pfam Name: GMC oxidoreductase Pfam Description: GMC oxidoreductase
  misc_feature (1)..(566): Homolog of NCBI NO: 10177730 NR Description: mandelonitrile lyase-like protein [Arabidopsis
  misc_feature (1)..(585): Homolog of NCBI NO: 18410417 NR Description: mandelonitrile lyase-like protein; protein id: supported by cDNA: gi_15982754 [Arabidopsis thaliana]
  misc_feature (1)..(566): Homolog of NCBI NO: 11358498 NR Description: mandelonitrile lyase homolog - Arabidopsis
  misc_feature (32)..(566): Homolog of NCBI NO: 10177728 NR Description: mandelonitrile lyase-like protein [Arabidopsis
  misc_feature (32)..(566): Homolog of NCBI NO: 15242234 NR Description: mandelonitrile lyase-like protein; protein id:
  misc_feature (159)..(585): Homolog of NCBI NO: 24417440 NR Description: unknown [Arabidopsis thaliana]
  misc_feature (7)..(576): Homolog of NCBI NO: 17978954 NR Description: At1g12570/T12C24_9 [Arabidopsis thaliana]
  misc_feature (7)..(576): Homolog of NCBI NO: 22329512 NR Description: hypothetical protein; protein id: At1g12570.1,
  misc_feature (31)..(576): Homolog of NCBI NO: 9502391 NR Description: T12C24.11 [Arabidopsis thaliana]
  misc_feature (1)..(343): Homolog of NCBI NO: 15982976 NR Description: R-oxynitrile lyase isoenzyme 1 precursor [Prunus
MGLQILWLFRKIFIITYIFHASCSPDKAGYYSFMKDATLAPMFARFDYIIIGGGTSGCALAATLSQNASVLVLERGGAPYDNPTATDIENFATTLSNTSPKSWSQLFISEDGVYNTRARVLGGGSVLNAGFYTRAGDEYVKETEWKTDEVEAAYEWVEKKVAFQPPVLGWQTAFKDGLLEAGEFPYNGFTYDHIYGTKIGGTIFDRAGHRHTAADLLEYANPGNIVVYLHASVHKILFTTKGRPRPKAYGVIFQDANGVLHKAELEKNSMNEVILSAGAIGSPQLLMLSGIGPAAHLAAHGIKPLVLDHPMVGQGMGDNPMNAIFIPSPTPVEVSLIQVVGITKFESYIEGASGVIFSYSWTRRFFDGVLNYLNEMQTSRTTSTTSPTLSTQSITDFFNPINPLLNATTRAGLILQKIAGPISRGHLELRNTNPDDNPSVRFNYYQEPEDLQICVEGINTIIKVINSKAFSKFKYPDATIHGLLDLMLSVPTNLRPRHITSMFNLRQFCIDTVMTIWHYHGGCQVGRVVDKNYRVLGIDSLRVIDGSTFLKSPGTNPQATVMMLGRYMGQRILQEREIYNKPDKEA

SEQ ID NO: 90118 - protein, 553 aa, Arabidopsis thaliana
  peptide (1)..(553): Ceres Seq. ID no. 12722215
  misc_feature (13)..(280): Pfam Name: GMC oxidoreductase Pfam Description: GMC oxidoreductase
  misc_feature (1)..(533): Homolog of NCBI NO: 10177730 NR Description: mandelonitrile lyase-like protein [Arabidopsis
  misc_feature (1)..(552): Homolog of NCBI NO: 18410417 NR Description: mandelonitrile lyase-like protein; protein id: supported by cDNA: gi_15982754 [Arabidopsis thaliana]
  misc_feature (1)..(533): Homolog of NCBI NO: 11358498 NR Description: mandelonitrile lyase homolog - Arabidopsis
  misc_feature (1)..(533): Homolog of NCBI NO: 10177728 NR Description: mandelonitrile lyase-like protein [Arabidopsis
  misc_feature (1)..(533): Homolog of NCBI NO: 15242234 NR Description: mandelonitrile lyase-like protein; protein id:
  misc_feature (126)..(552): Homolog of NCBI NO: 24417440 NR Description: unknown [Arabidopsis thaliana]
  misc_feature (1)..(543): Homolog of NCBI NO: 17978954 NR Description: At1g12570/T12C24_9 [Arabidopsis thaliana]
  misc_feature (1)..(543): Homolog of NCBI NO: 22329512 NR Description: hypothetical protein; protein id: At1g12570.1,
  misc_feature (1)..(543): Homolog of NCBI NO: 9502391 NR Description: T12C24.11 [Arabidopsis thaliana]
  misc_feature (1)..(310): Homolog of NCBI NO: 15982976 NR Description: R-oxynitrile lyase isoenzyme 1 precursor [Prunus
MKDATLAPMFARFDYIIIGGGTSGCALAATLSQNASVLVLERGGAPYDNPTATDIENFATTLSNTSPKSWSQLFISEDGVYNTRARVLGGGSVLNAGFYTRAGDEYVKETEWKTDEVEAAYEWVEKKVAFQPPVLGWQTAFKDGLLEAGEFPYNGFTYDHIYGTKIGGTIFDRAGHRHTAADLLEYANPGNIVVYLHASVHKILFTTKGRPRPKAYGVIFQDANGVLHKAELEKNSMNEVILSAGAIGSPQLLMLSGIGPAAHLAAHGIKPLVLDHPMVGQGMGDNPMNAIFIPSPTPVEVSLIQVVGITKFESYIEGASGVIFSYSWTRRFFDGVLNYLNEMQTSRTTSTTSPTLSTQSITDFFNPINPLLNATTRAGLILQKIAGPISRGHLELRNTNPDDNPSVRFNYYQEPEDLQICVEGINTIIKVINSKAFSKFKYPDATIHGLLDLMLSVPTNLRPRHITSMFNLRQFCIDTVMTIWHYHGGCQVGRVVDKNYRVLGIDSLRVIDGSTFLKSPGTNPQATVMMLGRYMGQRILQEREIYNKPDKEA

SEQ ID NO: 90119 - protein, 545 aa, Arabidopsis thaliana
  peptide (1)..(545): Ceres Seq. ID no. 12722216
  misc_feature (5)..(272): Pfam Name: GMC oxidoreductase Pfam Description: GMC oxidoreductase
  misc_feature (1)..(525): Homolog of NCBI NO: 10177730 NR Description: mandelonitrile lyase-like protein [Arabidopsis
  misc_feature (1)..(544): Homolog of NCBI NO: 18410417 NR Description: mandelonitrile lyase-like protein; protein id: supported by cDNA: gi_15982754 [Arabidopsis thaliana]
  misc_feature (1)..(525): Homolog of NCBI NO: 11358498 NR Description: mandelonitrile lyase homolog - Arabidopsis
  misc_feature (1)..(525): Homolog of NCBI NO: 10177728 NR Description: mandelonitrile lyase-like protein [Arabidopsis
  misc_feature (1)..(525): Homolog of NCBI NO: 15242234 NR Description: mandelonitrile lyase-like protein; protein id:
  misc_feature (118)..(544): Homolog of NCBI NO: 24417440 NR Description: unknown [Arabidopsis thaliana]
  misc_feature (1)..(535): Homolog of NCBI NO: 17978954 NR Description: At1g12570/T12C24_9 [Arabidopsis thaliana]
  misc_feature (1)..(535): Homolog of NCBI NO: 22329512 NR Description: hypothetical protein; protein id: At1g12570.1,
  misc_feature (1)..(535): Homolog of NCBI NO: 9502391 NR Description: T12C24.11 [Arabidopsis thaliana]
  misc_feature (1)..(302): Homolog of NCBI NO: 15982976 NR Description: R-oxynitrile lyase isoenzyme 1 precursor [Prunus
MFARFDYIIIGGGTSGCALAATLSQNASVLVLERGGAPYDNPTATDIENFATTLSNTSPKSWSQLFISEDGVYNTRARVLGGGSVLNAGFYTRAGDEYVKETEWKTDEVEAAYEWVEKKVAFQPPVLGWQTAFKDGLLEAGEFPYNGFTYDHIYGTKIGGTIFDRAGHRHTAADLLEYANPGNIVVYLHASVHKILFTTKGRPRPKAYGVIFQDANGVLHKAELEKNSMNEVILSAGAIGSPQLLMLSGIGPAAHLAAHGIKPLVLDHPMVGQGMGDNPMNAIFIPSPTPVEVSLIQVVGITKFESYIEGASGVIFSYSWTRRFFDGVLNYLNEMQTSRTTSTTSPTLSTQSITDFFNPINPLLNATTRAGLILQKIAGPISRGHLELRNTNPDDNPSVRFNYYQEPEDLQICVEGINTIIKVINSKAFSKFKYPDATIHGLLDLMLSVPTNLRPRHITSMFNLRQFCIDTVMTIWHYHGGCQVGRVVDKNYRVLGIDSLRVIDGSTFLKSPGTNPQATVMMLGRYMGQRILQEREIYNKPDKEA

SEQ ID NO: 90120 - DNA, 675 bp, Arabidopsis thaliana
  misc_feature (1)..(675): Ceres Seq. ID no. 12722221
  misc_feature: MA Experiment ID: 20000437 Result: Up-regulated in Transcription
  misc_feature: MA Experiment 20000437 PARAMETER Experiment Name: At_Drought_P Parameter: Age (day) Value: 8
  misc_feature: MA Experiment 20000437 PARAMETER Experiment Name: At_Drought_P Parameter: Organism Value: A. thaliana
  misc_feature: MA Experiment 20000437 PARAMETER Experiment Name: At_Drought_P Parameter: Plant Line Value: WS
  misc_feature: MA Experiment 20000437 PARAMETER Experiment Name: At_Drought_P Parameter: Timepoint (hr) Value: 24
  misc_feature: MA Experiment 20000437 PARAMETER Experiment Name: At_Drought_P Parameter: Tissue Value: Whole Plant
  misc_feature: MA Experiment 20000437 PARAMETER Experiment Name: At_Drought_P Parameter: Treatment Value: Drought vs. No Drought
  misc_feature: MA Experiment ID: 20000495 Result: Down-regulated in Transcription
  misc_feature: MA Experiment 20000495 PARAMETER Experiment Name: At_Guard_Cells_P Parameter: Harvest Date Value: 8/2/2002
  misc_feature: MA Experiment 20000495 PARAMETER Experiment Name: At_Guard_Cells_P Parameter: Organism Value: A. thaliana
  misc_feature: MA Experiment 20000495 PARAMETER Experiment Name: At_Guard_Cells_P Parameter: Tissue Value: Guard Cells vs. Leaves
  misc_feature: MA Experiment ID: 20001756 Result: Up-regulated in Transcription
  misc_feature: MA Experiment 20001756 PARAMETER Experiment Name: At_50mM_NH4NO3_L-to-H_P Parameter: Timepoint (hr) Value: 4
  misc_feature: MA Experiment 20001756 PARAMETER Experiment Name: At_50mM_NH4NO3_L-to-H_P Parameter: Tissue Value: Leaf
  misc_feature: MA Experiment 20001756 PARAMETER Experiment Name: At_50mM_NH4NO3_L-to-H_P Parameter: Treatment Value: 50mM NH4NO3 vs 100mM Mannitol
  misc_feature: MA Experiment ID: 20001905 Result: Up-regulated in Transcription
  misc_feature: MA Experiment 20001905 PARAMETER Experiment Name: At_Drought_Reproduction_P Parameter: Age (day) Value: 40
  misc_feature: MA Experiment 20001905 PARAMETER Experiment Name: At_Drought_Reproduction_P Parameter: Organism Value: A. thaliana
  misc_feature: MA Experiment 20001905 PARAMETER Experiment Name: At_Drought_Reproduction_P Parameter: Plant Line Value: WS
  misc_feature: MA Experiment 20001905 PARAMETER Experiment Name: At_Drought_Reproduction_P Parameter: Timepoint (day) Value: 10
  misc_feature: MA Experiment 20001905 PARAMETER Experiment Name: At_Drought_Reproduction_P Parameter: Tissue Value: Rosettes
  misc_feature: MA Experiment 20001905 PARAMETER Experiment Name: At_Drought_Reproduction_P Parameter: Treatment Value: Drought vs. No Drought
  misc_feature: MA Experiment ID: 20001911 Result: Up-regulated in Transcription
  misc_feature: MA Experiment 20001911 PARAMETER Experiment Name: At_Drought_Reproduction_P Parameter: Age (day) Value: 40
  misc_feature: MA Experiment 20001911 PARAMETER Experiment Name: At_Drought_Reproduction_P Parameter: Organism Value: A. thaliana
  misc_feature: MA Experiment 20001911 PARAMETER Experiment Name: At_Drought_Reproduction_P Parameter: Plant Line Value: WS
  misc_feature: MA Experiment 20001911 PARAMETER Experiment Name: At_Drought_Reproduction_P Parameter: Timepoint (day) Value: 10
  misc_feature: MA Experiment 20001911 PARAMETER Experiment Name: At_Drought_Reproduction_P Parameter: Tissue Value: Flowers
  misc_feature: MA Experiment 20001911 PARAMETER Experiment Name: At_Drought_Reproduction_P Parameter: Treatment Value: Drought vs. No Drought
atgaatccattttactctacattcccagactcgtttctctcaatctccgatcatagatctccggtttcagacagtagtgagtgttcaccaaagttagcttcaagttgtccaaagaaacgagctgggaggaagaagtttcgtgagacacgtcatccgatttacagaggagttcgtcagaggaattctggtaaatgggtttgtgaagttagagagcctaataagaaatctaggatttggttaggtacttttccgacggttgaaatggctgctcgtgctcatgatgttgctgctttagctcttcgtggtcgctctgcttgtctcaatttcgctgattctgcttggcggcttcgtattcctgagactacttgtcctaaggagattcagaaagctgcgtctgaagctgcaatggcgtttcagaatgagactacgacggagggatctaaaactgcggcggaggcagaggaggcggcaggggagggggtgagggagggggagaggagggcggaggagcagaatggtggtgtgttttatatggatgatgaggcgcttttggggatgcccaacttttttgagaatatggcggaggggatgcttttgccgccgccggaagttggctggaatcataacgactttgacggagtgggtgacgtgtcactctggagttttgacgagtaa

SEQ ID NO: 90121 - protein, 224 aa, Arabidopsis thaliana
  peptide (1)..(224): Ceres Seq. ID no. 12722222
  misc_feature (51)..(115): Pfam Name: AP2 domain Pfam Description: AP2 domain
  misc_feature (1)..(224): Homolog of NCBI NO: 15242244 NR Description: DRE binding protein; protein id: At5g51990.1
  misc_feature (1)..(222): Homolog of NCBI NO: 18416557 NR Description: DRE binding protein (DREB1C); protein id: supported by cDNA: gi_3738227, supported by cDNA: gi_4322227
  misc_feature (5)..(222): Homolog of NCBI NO: 5616086 NR Description: dehydration responsive element binding protein
  misc_feature (6)..(222): Homolog of NCBI NO: 4091984 NR Description: CRT/DRE binding factor 2 [Arabidopsis thaliana]
  misc_feature (5)..(222): Homolog of NCBI NO: 20303013 NR Description: CBF-like protein CBF7 [Brassica napus]
  misc_feature (1)..(222): Homolog of NCBI NO: 18416562 NR Description: C-repeat/DRE binding factor 1 (CBF1) (DREB1B); id: At4g25490.1, supported by cDNA: gi_1899057, supported by gi_3738225 [Arabidopsis thaliana] >gi|7488377|pir||JE0298
  misc_feature (1)..(222): Homolog of NCBI NO: 1899058 NR Description: transcriptional activator CBF1 [Arabidopsis >gi|4091982|gb|AAC99369.1| CRT/CRE binding factor 1 [Arabidopsis
  misc_feature (16)..(222): Homolog of NCBI NO: 38426954 NR Description: DREB2-19 [Brassica napus]
  misc_feature (5)..(222): Homolog of NCBI NO: 20303015 NR Description: CBF-like protein CBF16 [Brassica napus]
  misc_feature (1)..(222): Homolog of NCBI NO: 7484941 NR Description: DRE/CRT-binding protein DREB1A - Arabidopsis
MNPFYSTFPDSFLSISDHRSPVSDSSECSPKLASSCPKKRAGRKKFRETRHPIYRGVRQRNSGKWVCEVREPNKKSRIWLGTFPTVEMAARAHDVAALALRGRSACLNFADSAWRLRIPETTCPKEIQKAASEAAMAFQNETTTEGSKTAAEAEEAAGEGVREGERRAEEQNGGVFYMDDEALLGMPNFFENMAEGMLLPPPEVGWNHNDFDGVGDVSLWSFDE

SEQ ID NO: 90122 - protein, 137 aa, Arabidopsis thaliana
  peptide (1)..(137): Ceres Seq. ID no. 12722223
  misc_feature (1)..(137): Homolog of NCBI NO: 15242244 NR Description: DRE binding protein; protein id: At5g51990.1
  misc_feature (1)..(135): Homolog of NCBI NO: 18416557 NR Description: DRE binding protein (DREB1C); protein id: supported by cDNA: gi_3738227, supported by cDNA: gi_4322227
  misc_feature (1)..(135): Homolog of NCBI NO: 5616086 NR Description: dehydration responsive element binding protein
  misc_feature (1)..(135): Homolog of NCBI NO: 4091984 NR Description: CRT/DRE binding factor 2 [Arabidopsis thaliana]
  misc_feature (1)..(135): Homolog of NCBI NO: 20303013 NR Description: CBF-like protein CBF7 [Brassica napus]
  misc_feature (1)..(135): Homolog of NCBI NO: 18416562 NR Description: C-repeat/DRE binding factor 1 (CBF1) (DREB1B); id: At4g25490.1, supported by cDNA: gi_1899057, supported by gi_3738225 [Arabidopsis thaliana] >gi|7488377|pir||JE0298
  misc_feature (1)..(135): Homolog of NCBI NO: 1899058 NR Description: transcriptional activator CBF1 [Arabidopsis >gi|4091982|gb|AAC99369.1| CRT/CRE binding factor 1 [Arabidopsis
  misc_feature (1)..(135): Homolog of NCBI NO: 38426954 NR Description: DREB2-19 [Brassica napus]
  misc_feature (1)..(135): Homolog of NCBI NO: 20303015 NR Description: CBF-like protein CBF16 [Brassica napus]
  misc_feature (1)..(135): Homolog of NCBI NO: 7484941 NR Description: DRE/CRT-binding protein DREB1A - Arabidopsis
MAARAHDVAALALRGRSACLNFADSAWRLRIPETTCPKEIQKAASEAAMAFQNETTTEGSKTAAEAEEAAGEGVREGERRAEEQNGGVFYMDDEALLGMPNFFENMAEGMLLPPPEVGWNHNDFDGVGDVSLWSFDE

SEQ ID NO: 90123 - DNA, 777 bp, Arabidopsis thaliana
  misc_feature (1)..(777): Ceres Seq. ID no. 12722228
  misc_feature: MA Experiment ID: 20000794 Result: Up-regulated in Transcription
  misc_feature: MA Experiment 20000794 PARAMETER Experiment Name: At_Petals_P Parameter: Age (day) Value: 23-25 days
  misc_feature: MA Experiment 20000794 PARAMETER Experiment Name: At_Petals_P Parameter: Plant Line Value: WS
  misc_feature: MA Experiment 20000794 PARAMETER Experiment Name: At_Petals_P Parameter: Tissue Value: Petals vs. Whole plant
  misc_feature: MA Experiment ID: 20001557 Result: Down-regulated in Transcription
  misc_feature: MA Experiment 20001557 PARAMETER Experiment Name: At_Drought_Soil_Dry_P Parameter: Age (day) Value: 27
  misc_feature: MA Experiment 20001557 PARAMETER Experiment Name: At_Drought_Soil_Dry_P Parameter: Organism Value: A. thaliana
  misc_feature: MA Experiment 20001557 PARAMETER Experiment Name: At_Drought_Soil_Dry_P Parameter: Plant Line Value: WS
  misc_feature: MA Experiment 20001557 PARAMETER Experiment Name: At_Drought_Soil_Dry_P Parameter: Post Timepoint (hr) Value: 3
  misc_feature: MA Experiment 20001557 PARAMETER Experiment Name: At_Drought_Soil_Dry_P Parameter: Post-Treatment Value: Re-Water vs. No Drought
  misc_feature: MA Experiment 20001557 PARAMETER Experiment Name: At_Drought_Soil_Dry_P Parameter: Timepoint (day) Value: 13
  misc_feature: MA Experiment 20001557 PARAMETER Experiment Name: At_Drought_Soil_Dry_P Parameter: Treatment Value: Drought vs. No Drought
atgtacacttcaagtgttggaggagaggttgaccaaaacttaaaatccggagagttgtcgttgaccgggactggctttctcggtgctgttggccggagtttagacttgggagggcaaactgcgttggcattgcgacttctattggcggttttctcttctaagttatcttctgttgctgaccgccctttcggggatgagtttcgtgctgctcggaaagcatctgaggaagttggtgcgcagctggttcttggagatcgacccatcgaaataactctccaaagggcttggaactctttgaaatggggagagaagtttaatctggtgatggctgtgactcgggtaatcacatcgtcatcgggtatatccgcagcggagcttaaggaacaagagaccgatgaaaacagtggaagtttgcagctttacgaacggctaagtttctcatacccggcactcctaatgcctcttatacacgaaagagatacctatcttgcttggtcattgaagagaagtaaggcagtgaatgggtgtaaaacagtggtgggagtgatcgggaaaggacacatgaatggtgtcatctacgcgttggtgtcagactctggggatctccggtttagagatttggtgggaagaggagattcatataatggtggtactggtactacatcgaacggttggattcaaaaggttttaaagagcttcgtaagagacacaattatagggttcttgctatgggagttatatgaacagtatctgatgatgaatcaaaacctttcatga

SEQ ID NO: 90124 - protein, 258 aa, Arabidopsis thaliana; identical to SEQ ID NO: 84911
  peptide (1)..(258): Ceres Seq. ID no. 12722229
  misc_feature (1)..(204): Pfam Name: TraB family Pfam Description: TraB family
  misc_feature (1)..(258): Homolog of NCBI NO: 10177738 NR Description: gene_id:MSG15.11~pir||C69291~similar to unknown
  misc_feature (1)..(258): Homolog of NCBI NO: 19699285 NR Description: AT5g52030/MSG15_11 [Arabidopsis thaliana]
  misc_feature (1)..(258): Homolog of NCBI NO: 22327748 NR Description: putative protein; protein id: At5g52030.1,
  misc_feature (46)..(191): Homolog of NCBI NO: 30679206 NR Description: expressed protein [Arabidopsis thaliana] unknown protein [Arabidopsis thaliana]
  misc_feature (40)..(191): Homolog of NCBI NO: 23111275 NR Description: hypothetical protein [Desulfitobacterium
  misc_feature (44)..(192): Homolog of NCBI NO: 28828782 NR Description: similar to Plasmodium falciparum (isolate 3D7).
  misc_feature (46)..(192): Homolog of NCBI NO: 24217187 NR Description: pheromone shutdown protein [Leptospira serovar lai str. 56601] >gi|24202233|gb|AAN51685.1|AE011601_8
  misc_feature (47)..(192): Homolog of NCBI NO: 21227421 NR Description: Pheromone shutdown protein [Methanosarcina mazei >gi|20905787|gb|AAM31015.1| Pheromone shutdown protein
  misc_feature (47)..(192): Homolog of NCBI NO: 20088907 NR Description: TraB family protein [Methanosarcina acetivorans C2A] >gi|19913750|gb|AAM03462.1| TraB family protein
  misc_feature (47)..(191): Homolog of NCBI NO: 23049850 NR Description: hypothetical protein [Methanosarcina barkeri]

SEQ ID NO: 90125 - protein, 150 aa, Arabidopsis thaliana
  peptide (1)..(150): Ceres Seq. ID no. 12722230
  misc_feature (1)..(96): Pfam Name: TraB family Pfam Description: TraB family
  misc_feature (1)..(150): Homolog of NCBI NO: 10177738 NR Description: gene_id:MSG15.11~pir||C69291~similar to unknown
  misc_feature (1)..(150): Homolog of NCBI NO: 22327748 NR Description: putative protein; protein id: At5g52030.1,
  misc_feature (1)..(150): Homolog of NCBI NO: 19699285 NR Description: AT5g52030/MSG15_11 [Arabidopsis thaliana]
  misc_feature (1)..(83): Homolog of NCBI NO: 30679206 NR Description: expressed protein [Arabidopsis thaliana] unknown protein [Arabidopsis thaliana]
  misc_feature (1)..(83): Homolog of NCBI NO: 23111275 NR Description: hypothetical protein [Desulfitobacterium
  misc_feature (1)..(84): Homolog of NCBI NO: 28828782 NR Description: similar to Plasmodium falciparum (isolate 3D7).
  misc_feature (1)..(84): Homolog of NCBI NO: 24217187 NR Description: pheromone shutdown protein [Leptospira serovar lai str. 56601] >gi|24202233|gb|AAN51685.1|AE011601_8
  misc_feature (1)..(84): Homolog of NCBI NO: 21227421 NR Description: Pheromone shutdown protein [Methanosarcina mazei >gi|20905787|gb|AAM31015.1| Pheromone shutdown protein
  misc_feature (1)..(84): Homolog of NCBI NO: 20088907 NR Description: TraB family protein [Methanosarcina acetivorans C2A] >gi|19913750|gb|AAM03462.1| TraB family protein
  misc_feature (1)..(83): Homolog of NCBI NO: 23049850 NR Description: hypothetical protein [Methanosarcina barkeri]
MAVTRVITSSSGISAAELKEQETDENSGSLQLYERLSFSYPALLMPLIHERDTYLAWSLKRSKAVNGCKTVVGVIGKGHMNGVIYALVSDSGDLRFRDLVGRGDSYNGGTGTTSNGWIQKVLKSFVRDTIIGFLLWELYEQYLMMNQNLS

SEQ ID NO: 90126 - DNA, 1209 bp, Arabidopsis thaliana
  misc_feature (1)..(1209): Ceres Seq. ID no. 12722247
  misc_feature: MA Experiment ID: 20000184 Result: Down-regulated in Transcription
  misc_feature: MA Experiment 20000184 PARAMETER Experiment Name: At_Shoots__P Parameter: Age (day) Value: 7
  misc_feature: MA Experiment 20000184 PARAMETER Experiment Name: At_Shoots__P Parameter: Tissue Value: Shoots vs. Whole Plant
  misc_feature: MA Experiment ID: 20000227 Result: Down-regulated in Transcription
  misc_feature: MA Experiment 20000227 PARAMETER Experiment Name: At_Root-Tips-vs-Tops_P Parameter: Tissue Value: Root Tips vs. Root Tops
  misc_feature: MA Experiment ID: 20000234 Result: Down-regulated in Transcription
  misc_feature: MA Experiment 20000234 PARAMETER Experiment Name: At_Siliques_P Parameter: Age (day) Value: 21
  misc_feature: MA Experiment 20000234 PARAMETER Experiment Name: At_Siliques_P Parameter: Organism Value: A. thaliana
  misc_feature: MA Experiment 20000234 PARAMETER Experiment Name: At_Siliques_P Parameter: Plant Line Value: WS
  misc_feature: MA Experiment 20000234 PARAMETER Experiment Name: At_Siliques_P Parameter: Tissue Value: Less Than 5mm Siliques vs. Whole Plant
  misc_feature: MA Experiment ID: 20000235 Result: Down-regulated in Transcription
  misc_feature: MA Experiment 20000235 PARAMETER Experiment Name: At_Siliques_P Parameter: Age (day) Value: 21
  misc_feature: MA Experiment 20000235 PARAMETER Experiment Name: At_Siliques_P Parameter: Organism Value: A. thaliana
  misc_feature: MA Experiment 20000235 PARAMETER Experiment Name: At_Siliques_P Parameter: Plant Line Value: WS
  misc_feature: MA Experiment 20000235 PARAMETER Experiment Name: At_Siliques_P Parameter: Tissue Value: 5-10mm Siliques vs. Whole Plant
  misc_feature: MA Experiment ID: 20000264 Result: Down-regulated in Transcription
  misc_feature: MA Experiment 20000264 PARAMETER Experiment Name: At_Open_Flower_P Parameter: Age (day) Value: 21
  misc_feature: MA Experiment 20000264 PARAMETER Experiment Name: At_Open_Flower_P Parameter: Plant Line Value: WS
  misc_feature: MA Experiment 20000264 PARAMETER Experiment Name: At_Open_Flower_P Parameter: Tissue Value: Open Flower vs. Whole Plant
  misc_feature: MA Experiment ID: 20000265 Result: Down-regulated in Transcription
  misc_feature: MA Experiment 20000265 PARAMETER Experiment Name: At_Open_Flower_P Parameter: Age (day) Value: 21
  misc_feature: MA Experiment 20000265 PARAMETER Experiment Name: At_Open_Flower_P Parameter: Plant Line Value: WS
  misc_feature: MA Experiment 20000265 PARAMETER Experiment Name: At_Open_Flower_P Parameter: Tissue Value: Closed Flower vs. Whole Plant
  misc_feature: MA Experiment ID: 20000286 Result: Down-regulated in Transcription
  misc_feature: MA Experiment 20000286 PARAMETER Experiment Name: At_Open_Flower_P Parameter: Age (day) Value: 21
  misc_feature: MA Experiment 20000286 PARAMETER Experiment Name: At_Open_Flower_P Parameter: Plant Line Value: WS
  misc_feature: MA Experiment 20000286 PARAMETER Experiment Name: At_Open_Flower_P Parameter: Tissue Value: Half Open vs. Whole Plant
  misc_feature: MA Experiment ID: 20001555 Result: Down-regulated in Transcription
  misc_feature: MA Experiment 20001555 PARAMETER Experiment Name: At_Drought_Soil_Dry_P Parameter: Age (day) Value: 24
  misc_feature: MA Experiment 20001555 PARAMETER Experiment Name: At_Drought_Soil_Dry_P Parameter: Organism Value: A. thaliana
  misc_feature: MA Experiment 20001555 PARAMETER Experiment Name: At_Drought_Soil_Dry_P Parameter: Plant Line Value: WS
  misc_feature: MA Experiment 20001555 PARAMETER Experiment Name: At_Drought_Soil_Dry_P Parameter: Post Timepoint (hr) Value: None
  misc_feature: MA Experiment 20001555 PARAMETER Experiment Name: At_Drought_Soil_Dry_P Parameter: Post-Treatment Value: None
  misc_feature: MA Experiment 20001555 PARAMETER Experiment Name: At_Drought_Soil_Dry_P Parameter: Timepoint (day) Value: 10
  misc_feature: MA Experiment 20001555 PARAMETER Experiment Name: At_Drought_Soil_Dry_P Parameter: Treatment Value: Drought vs. No Drought
  misc_feature: MA Experiment ID: 20001556 Result: Down-regulated in Transcription
  misc_feature: MA Experiment 20001556 PARAMETER Experiment Name: At_Drought_Soil_Dry_P Parameter: Age (day) Value: 26
  misc_feature: MA Experiment 20001556 PARAMETER Experiment Name: At_Drought_Soil_Dry_P Parameter: Organism Value: A. thaliana
  misc_feature: MA Experiment 20001556 PARAMETER Experiment Name: At_Drought_Soil_Dry_P Parameter: Plant Line Value: WS
  misc_feature: MA Experiment 20001556 PARAMETER Experiment Name: At_Drought_Soil_Dry_P Parameter: Post Timepoint (hr) Value: None
  misc_feature: MA Experiment 20001556 PARAMETER Experiment Name: At_Drought_Soil_Dry_P Parameter: Post-Treatment Value: None
  misc_feature: MA Experiment 20001556 PARAMETER Experiment Name: At_Drought_Soil_Dry_P Parameter: Timepoint (day) Value: 12
  misc_feature: MA Experiment 20001556 PARAMETER Experiment Name: At_Drought_Soil_Dry_P Parameter: Treatment Value: Drought vs. No Drought
  misc_feature: MA Experiment ID: 20001557 Result: Down-regulated in Transcription
  misc_feature: MA Experiment 20001557 PARAMETER Experiment Name: At_Drought_Soil_Dry_P Parameter: Age (day) Value: 27
  misc_feature: MA Experiment 20001557 PARAMETER Experiment Name: At_Drought_Soil_Dry_P Parameter: Organism Value: A. thaliana
  misc_feature: MA Experiment 20001557 PARAMETER Experiment Name: At_Drought_Soil_Dry_P Parameter: Plant Line Value: WS
  misc_feature: MA Experiment 20001557 PARAMETER Experiment Name: At_Drought_Soil_Dry_P Parameter: Post Timepoint (hr) Value: 3
  misc_feature: MA Experiment 20001557 PARAMETER Experiment Name: At_Drought_Soil_Dry_P Parameter: Post-Treatment Value: Re-Water vs. No Drought
  misc_feature: MA Experiment 20001557 PARAMETER Experiment Name: At_Drought_Soil_Dry_P Parameter: Timepoint (day) Value: 13
  misc_feature: MA Experiment 20001557 PARAMETER Experiment Name: At_Drought_Soil_Dry_P Parameter: Treatment Value: Drought vs. No Drought
  misc_feature: MA Experiment ID: 20001558 Result: Down-regulated in Transcription
  misc_feature: MA Experiment 20001558 PARAMETER Experiment Name: At_Drought_Soil_Dry_P Parameter: Age (day) Value: 27
  misc_feature: MA Experiment 20001558 PARAMETER Experiment Name: At_Drought_Soil_Dry_P Parameter: Organism Value: A. thaliana
  misc_feature: MA Experiment 20001558 PARAMETER Experiment Name: At_Drought_Soil_Dry_P Parameter: Plant Line Value: WS
  misc_feature: MA Experiment 20001558 PARAMETER Experiment Name: At_Drought_Soil_Dry_P Parameter: Post Timepoint (hr) Value: 6
  misc_feature: MA Experiment 20001558 PARAMETER Experiment Name: At_Drought_Soil_Dry_P Parameter: Post-Treatment Value: Re-Water vs. No Drought
  misc_feature: MA Experiment 20001558 PARAMETER Experiment Name: At_Drought_Soil_Dry_P Parameter: Timepoint (day) Value: 13
  misc_feature: MA Experiment 20001558 PARAMETER Experiment Name: At_Drought_Soil_Dry_P Parameter: Treatment Value: Drought vs. No Drought
  misc_feature: MA Experiment ID: 20001560 Result: Down-regulated in Transcription
  misc_feature: MA Experiment 20001560 PARAMETER Experiment Name: At_Drought_Soil_Dry_P Parameter: Age (day) Value: 28
  misc_feature: MA Experiment 20001560 PARAMETER Experiment Name: At_Drought_Soil_Dry_P Parameter: Organism Value: A. thaliana
  misc_feature: MA Experiment 20001560 PARAMETER Experiment Name: At_Drought_Soil_Dry_P Parameter: Plant Line Value: WS
  misc_feature: MA Experiment 20001560 PARAMETER Experiment Name: At_Drought_Soil_Dry_P Parameter: Post Timepoint (hr) Value: None
  misc_feature: MA Experiment 20001560 PARAMETER Experiment Name: At_Drought_Soil_Dry_P Parameter: Post-Treatment Value: None
  misc_feature: MA Experiment 20001560 PARAMETER Experiment Name: At_Drought_Soil_Dry_P Parameter: Timepoint (day) Value: 14
  misc_feature: MA Experiment 20001560 PARAMETER Experiment Name: At_Drought_Soil_Dry_P Parameter: Treatment Value: Drought vs. No Drought
  misc_feature: MA Experiment ID: 20001904 Result: Down-regulated in Transcription
  misc_feature: MA Experiment 20001904 PARAMETER Experiment Name: At_Drought_Reproduction_P Parameter: Age (day) Value: 37
  misc_feature: MA Experiment 20001904 PARAMETER Experiment Name: At_Drought_Reproduction_P Parameter: Organism Value: A. thaliana
  misc_feature: MA Experiment 20001904 PARAMETER Experiment Name: At_Drought_Reproduction_P Parameter: Plant Line Value: WS
  misc_feature: MA Experiment 20001904 PARAMETER Experiment Name: At_Drought_Reproduction_P Parameter: Timepoint (day) Value: 7
  misc_feature: MA Experiment 20001904 PARAMETER Experiment Name: At_Drought_Reproduction_P Parameter: Tissue Value: Rosettes
  misc_feature: MA Experiment 20001904 PARAMETER Experiment Name: At_Drought_Reproduction_P Parameter: Treatment Value: Drought vs. No Drought
  misc_feature: MA Experiment ID: 20001905 Result: Down-regulated in Transcription
  misc_feature: MA Experiment 20001905 PARAMETER Experiment Name: At_Drought_Reproduction_P Parameter: Age (day) Value: 40
  misc_feature: MA Experiment 20001905 PARAMETER Experiment Name: At_Drought_Reproduction_P Parameter: Organism Value: A. thaliana
  misc_feature: MA Experiment 20001905 PARAMETER Experiment Name: At_Drought_Reproduction_P Parameter: Plant Line Value: WS
  misc_feature: MA Experiment 20001905 PARAMETER Experiment Name: At_Drought_Reproduction_P Parameter: Timepoint (day) Value: 10
  misc_feature: MA Experiment 20001905 PARAMETER Experiment Name: At_Drought_Reproduction_P Parameter: Tissue Value: Rosettes
  misc_feature: MA Experiment 20001905 PARAMETER Experiment Name: At_Drought_Reproduction_P Parameter: Treatment Value: Drought vs. No Drought
agacaaagaacaaaagaatcgtaaatatgtcaaacccatctctttcatccatatattttctacttctccaccacatcaaacccaaatcttgaatacatacagatcaaagaaaaggaaagatcaaagagaaaatcatatatactatatcatctaatctttaccaatatatgggggcggcttcatcgagcatcgtccgatccgaaccttttgccggaaagttatgcggcctcgaagatgtgcctgagaactgtataacagcaatgttcatgtacatggagccaccggagatctgcctgcttgctagggtaaataaatcatttcatagggcgtcgagatccgatgccgtgtgggaagacaagcttcctagtaactacaagtttctggtccgaagaattcttgaagatcaacaacaagtaggagtaaaagacaaacttatttaccgcaagaaagagatctatgcaaggctttgccgaccaaacctcttcgacaccggcacaaaggaagcatggttggacaagagaagtgggaaagtgtttttggcgatatcaccaaaggcaatgaagataaccggcattgatgatcgccgatattgggaacatatttcttccgatgaatccagatttggatcaataacttatctccggcaaatatggtggttagaagcagttggaaaaatcagattcgaatttgcacccggaaaatacagtttacttttcaagatacaattaggcaaacctattagaaagtgtgggaggaaaacatgtagtttggaccaagttcatggctgggacatcaaaccggtccggtttcagttgtctacatcggatggccaatgcgctatgtcggaacgacatttggatgagtcggggaggtgggtttatcatcatgcgggtgacttcgtcgtagagaatcagaactcacccgtttgggtcaaattctctatgctccagatagattgtacacataccaaaggtggtttatgtttagattgtgtgatcatatgtccatttgagtatagagggaaatacaaatattccgattaaatgtttttagaggttctgttgatatgttagttttttttttggggggtcaaagatatgattttttttaggatatgtgtttttgtcaatacataaagtctgtattgattacgtaaaaatgtgaatttttttgcagatgcagttctagttgagaatgttaagatattgt

SEQ ID NO: 90127 - protein, 291 aa, Arabidopsis thaliana
  peptide (1)..(291): Ceres Seq. ID no. 12722248
  misc_feature (1)..(291): Homolog of NCBI NO: 15242282 NR Description: putative protein; protein id: At5g52120.1, by cDNA: gi_18175687, supported by cDNA: gi_20465820 [Arabidopsis >gi|18175688|gb|AAL59911.1| unknown protein [Arabidopsis
  misc_feature (1)..(282): Homolog of NCBI NO: 30695337 NR Description: F-box protein (lectin-related) [Arabidopsis
  misc_feature (21)..(282): Homolog of NCBI NO: 23397334 NR Description: unknown protein [Arabidopsis thaliana]
  misc_feature (24)..(284): Homolog of NCBI NO: 38567911 NR Description: OSJNBa0088I22.7 [Oryza sativa (japonica
  misc_feature (20)..(280): Homolog of NCBI NO: 37536186 NR Description: unknown protein [Oryza sativa (japonica
  misc_feature (20)..(280): Homolog of NCBI NO: 15221677 NR Description: unknown protein; protein id: At1g63090.1
  misc_feature (20)..(288): Homolog of NCBI NO: 15222051 NR Description: hypothetical protein; protein id: At1g12710.1 thaliana] >gi|9502385|gb|AAF88092.1|AC025417_20 T12C24.23 thaliana] >gi|26450401|dbj|BAC42315.1| unknown protein
  misc_feature (20)..(280): Homolog of NCBI NO: 15231726 NR Description: putative protein; protein id: At3g53000.1
  misc_feature (104)..(280): Homolog of NCBI NO: 27754673 NR Description: unknown protein [Arabidopsis thaliana]
  misc_feature (22)..(190): Homolog of NCBI NO: 15226911 NR Description: lectin-like protein; protein id: At2g02250.1
MGAASSSIVRSEPFAGKLCGLEDVPENCITAMFMYMEPPEICLLARVNKSFHRASRSDAVWEDKLPSNYKFLVRRILEDQQQVGVKDKLIYRKKEIYARLCRPNLFDTGTKEAWLDKRSGKVFLAISPKAMKITGIDDRRYWEHISSDESRFGSITYLRQIWWLEAVGKIRFEFAPGKYSLLFKIQLGKPIRKCGRKTCSLDQVHGWDIKPVRFQLSTSDGQCAMSERHLDESGRWVYHHAGDFVVENQNSPVWVKFSMLQIDCTHTKGGLCLDCVIICPFEYRGKYKYSD

SEQ ID NO: 90128 - protein, 260 aa, Arabidopsis thaliana
  peptide (1)..(260): Ceres Seq. ID no. 12722249
  misc_feature (1)..(260): Homolog of NCBI NO: 15242282 NR Description: putative protein; protein id: At5g52120.1, by cDNA: gi_18175687, supported by cDNA: gi_20465820 [Arabidopsis >gi|18175688|gb|AAL59911.1| unknown protein [Arabidopsis
  misc_feature (1)..(251): Homolog of NCBI NO: 30695337 NR Description: F-box protein (lectin-related) [Arabidopsis
  misc_feature (1)..(251): Homolog of NCBI NO: 23397334 NR Description: unknown protein [Arabidopsis thaliana]
  misc_feature (1)..(253): Homolog of NCBI NO: 38567911 NR Description: OSJNBa0088I22.7 [Oryza sativa (japonica
  misc_feature (1)..(249): Homolog of NCBI NO: 37536186 NR Description: unknown protein [Oryza sativa (japonica
  misc_feature (1)..(249): Homolog of NCBI NO: 15221677 NR Description: unknown protein; protein id: At1g63090.1
  misc_feature (1)..(257): Homolog of NCBI NO: 15222051 NR Description: hypothetical protein; protein id: At1g12710.1 thaliana] >gi|9502385|gb|AAF88092.1|AC025417_20 T12C24.23 thaliana] >gi|26450401|dbj|BAC42315.1| unknown protein
  misc_feature (1)..(249): Homolog of NCBI NO: 15231726 NR Description: putative protein; protein id: At3g53000.1
  misc_feature (73)..(249): Homolog of NCBI NO: 27754673 NR Description: unknown protein [Arabidopsis thaliana]
  misc_feature (1)..(159): Homolog of NCBI NO: 15226911 NR Description: lectin-like protein; protein id: At2g02250.1
MFMYMEPPEICLLARVNKSFHRASRSDAVWEDKLPSNYKFLVRRILEDQQQVGVKDKLIYRKKEIYARLCRPNLFDTGTKEAWLDKRSGKVFLAISPKAMKITGIDDRRYWEHISSDESRFGSITYLRQIWWLEAVGKIRFEFAPGKYSLLFKIQLGKPIRKCGRKTCSLDQVHGWDIKPVRFQLSTSDGQCAMSERHLDESGRWVYHHAGDFVVENQNSPVWVKFSMLQIDCTHTKGGLCLDCVIICPFEYRGKYKYSD

SEQ ID NO: 90129 - protein, 258 aa, Arabidopsis thaliana
  peptide (1)..(258): Ceres Seq. ID no. 12722250
  misc_feature (1)..(258): Homolog of NCBI NO: 15242282 NR Description: putative protein; protein id: At5g52120.1, by cDNA: gi_18175687, supported by cDNA: gi_20465820 [Arabidopsis >gi|18175688|gb|AAL59911.1| unknown protein [Arabidopsis
  misc_feature (1)..(249): Homolog of NCBI NO: 30695337 NR Description: F-box protein (lectin-related) [Arabidopsis
  misc_feature (1)..(249): Homolog of NCBI NO: 23397334 NR Description: unknown protein [Arabidopsis thaliana]
  misc_feature (1)..(251): Homolog of NCBI NO: 38567911 NR Description: OSJNBa0088I22.7 [Oryza sativa (japonica
  misc_feature (1)..(247): Homolog of NCBI NO: 37536186 NR Description: unknown protein [Oryza sativa (japonica
  misc_feature (1)..(247): Homolog of NCBI NO: 15221677 NR Description: unknown protein; protein id: At1g63090.1
  misc_feature (1)..(255): Homolog of NCBI NO: 15222051 NR Description: hypothetical protein; protein id: At1g12710.1 thaliana] >gi|9502385|gb|AAF88092.1|AC025417_20 T12C24.23 thaliana] >gi|26450401|dbj|BAC42315.1| unknown protein
  misc_feature (1)..(247): Homolog of NCBI NO: 15231726 NR Description: putative protein; protein id: At3g53000.1
  misc_feature (71)..(247): Homolog of NCBI NO: 27754673 NR Description: unknown protein [Arabidopsis thaliana]
  misc_feature (1)..(157): Homolog of NCBI NO: 15226911 NR Description: lectin-like protein; protein id: At2g02250.1
MYMEPPEICLLARVNKSFHRASRSDAVWEDKLPSNYKFLVRRILEDQQQVGVKDKLIYRKKEIYARLCRPNLFDTGTKEAWLDKRSGKVFLAISPKAMKITGIDDRRYWEHISSDESRFGSITYLRQIWWLEAVGKIRFEFAPGKYSLLFKIQLGKPIRKCGRKTCSLDQVHGWDIKPVRFQLSTSDGQCAMSERHLDESGRWVYHHAGDFVVENQNSPVWVKFSMLQIDCTHTKGGLCLDCVIICPFEYRGKYKYSD

SEQ ID NO: 90130 - DNA, 858 bp, Arabidopsis thaliana
  misc_feature (1)..(858): Ceres Seq. ID no. 12722257
  misc_feature: MA Experiment ID: 20000184 Result: Up-regulated in Transcription
  misc_feature: MA Experiment 20000184 PARAMETER Experiment Name: At_Shoots__P Parameter: Age (day) Value: 7
  misc_feature: MA Experiment 20000184 PARAMETER Experiment Name: At_Shoots__P Parameter: Tissue Value: Shoots vs. Whole Plant
  misc_feature: MA Experiment ID: 20000185 Result: Up-regulated in Transcription
  misc_feature: MA Experiment 20000185 PARAMETER Experiment Name: At_Roots__P Parameter: Age (day) Value: 7 vs. 21
  misc_feature: MA Experiment 20000185 PARAMETER Experiment Name: At_Roots__P Parameter: Organism Value: A. thaliana
  misc_feature: MA Experiment 20000185 PARAMETER Experiment Name: At_Roots__P Parameter: Tissue Value: Roots vs. Whole Plant
  misc_feature: MA Experiment ID: 20000439 Result: Up-regulated in Transcription
  misc_feature: MA Experiment 20000439 PARAMETER Experiment Name: At_Roots__P Parameter: Age (day) Value: 14 vs. 21
  misc_feature: MA Experiment 20000439 PARAMETER Experiment Name: At_Roots__P Parameter: Organism Value: A. thaliana
  misc_feature: MA Experiment 20000439 PARAMETER Experiment Name: At_Roots__P Parameter: Tissue Value: Roots vs. Whole Plant
atgaccaaatctggagagagaccaaaacagagacagaggaaagggttatggtcacctgaagaagaccagaagctcaagagtttcatcctctctcgtggccatgcttgctggaccactgttcccatcctagctggattgcaaaggaatgggaaaagctgcagattaaggtggattaattacctaagaccaggactaaagagggggtcgtttagtgaagaagaagaagagaccatcttgactttacattcttccttgggtaacaagtggtctcggattgcaaaatatttaccgggaagaacagacaacgagattaagaactattggcattcctatctgaagaagagatggctcaaatctcaaccacaactcaaaagccaaatatcagacctcacagaatctccttcttcactactttcttgcgggaaaagaaatctggaaaccgaaaccctagatcacgtgatctccttccagaaattttcagagaatccaacttcatcaccatccaaagaaagcaacaacaacatgatcatgaacaacagtaataacttgcctaaactgttcttctctgagtggatcagttcttcaaatccacacatcgattactcctctgcttttacagattccaagcacattaatgaaactcaagatcaaatcaatgaagaggaagtgatgatgatcaataacaacaactactcttcacttgaggatgtcatgctccgtacagattttttgcagcctgatcatgaatatgcaaattattattcttctggagatttcttcatcaacagtgaccaaaattatgtctaagaagagtgaatatgatcgtaagaggaacataagctagttacttgtgttaca

SEQ ID NO: 90131 - protein, 268 aa, Arabidopsis thaliana
  peptide (1)..(268): Ceres Seq. ID no. 12722258
  misc_feature (14)..(61): Pfam Name: Myb-like DNA-binding domain Pfam Description: Myb-like DNA-binding domain
  misc_feature (1)..(268): Homolog of NCBI NO: 15242947 NR Description: myb family transcription factor(MYB19); protein At5g52260.1 [Arabidopsis thaliana] >gi|8885539|dbj|BAA97469.1|
  misc_feature (54)..(268): Homolog of NCBI NO: 11358531 NR Description: myb-related transcription factor MYB19 [imported] Arabidopsis thaliana (fragment) >gi|3941428|gb|AAC83590.1|
  misc_feature (2)..(248): Homolog of NCBI NO: 15235149 NR Description: myb family transcription factor; protein id:
  misc_feature (2)..(248): Homolog of NCBI NO: 25387539 NR Description: myb-like protein [imported] - Arabidopsis thaliana
  misc_feature (54)..(248): Homolog of NCBI NO: 11358530 NR Description: myb-related transcription factor MYB18 [imported] Arabidopsis thaliana (fragment) >gi|3941426|gb|AAC83589.1|
  misc_feature (7)..(180): Homolog of NCBI NO: 15229055 NR Description: myb family transcription factor; protein id:
  misc_feature (9)..(233): Homolog of NCBI NO: 15223612 NR Description: myb family transcription factor; protein id: supported by cDNA: 250386. [Arabidopsis thaliana]
  misc_feature (9)..(151): Homolog of NCBI NO: 34902542 NR Description: putative transcription factor (myb) [Oryza sativa
  misc_feature (1)..(115): Homolog of NCBI NO: 28927688 NR Description: putative Myb-like DNA-binding protein [Oryza
  misc_feature (1)..(115): Homolog of NCBI NO: 34913340 NR Description: contains ESTs to Oryza sativa chromosome 1, OSJNBa0026J14.1~unknown protein
MTKSGERPKQRQRKGLWSPEEDQKLKSFILSRGHACWTTVPILAGLQRNGKSCRLRWINYLRPGLKRGSFSEEEEETILTLHSSLGNKWSRIAKYLPGRTDNEIKNYWHSYLKKRWLKSQPQLKSQISDLTESPSSLLSCGKRNLETETLDHVISFQKFSENPTSSPSKESNNNMIMNNSNNLPKLFFSEWISSSNPHIDYSSAFTDSKHINETQDQINEEEVMMINNNNYSSLEDVMLRTDFLQPDHEYANYYSSGDFFINSDQNYV

SEQ ID NO: 90132 - DNA, 1560 bp, Arabidopsis thaliana
  misc_feature (1)..(1560): Ceres Seq. ID no. 12722285
  misc_feature: MA Experiment ID: 20000286 Result: Up-regulated in Transcription
  misc_feature: MA Experiment 20000286 PARAMETER Experiment Name: At_Open_Flower_P Parameter: Age (day) Value: 21
  misc_feature: MA Experiment 20000286 PARAMETER Experiment Name: At_Open_Flower_P Parameter: Plant Line Value: WS
  misc_feature: MA Experiment 20000286 PARAMETER Experiment Name: At_Open_Flower_P Parameter: Tissue Value: Half Open vs. Whole Plant
atggagttttttgagatgtctcgagtttggtacatattcttcaaagttttcgtcgtagttatttgcctcatgttcttgaagctctttctgcgttgttggatatggccagttcgagctcaaaagaagcttagaggaaacggatttgttggtccagctcctagttttccatttggaaaccttaatgacatgaagaaactgaaaatggcctcggttgtggtggataatagcaaatcttccaccatcatcaatcatgacatacactctattgcacttccacatttcgctcggtggcaacaagaatacgggaaagtatttgtgtactggctagggatagagccgttcgtgtacgtggccgatcctgaattcttgagtgttatgtcgaaaggggtattggggaagagttggggaaaaccaaatgtttttaagaaagacagagagccaatgtttggtaccggtttggttatggtcgaaggagatgattggacacgacatcgccacatcatcactcctgcatttgcccctcttaatcttaaggttatgacaaatatgatggtggaatcagtctccaatatgttggaccgatggggcatacaaataaactcgggtaatcccgaattcgacatggagagcgagatcataggaacagccggtgagattatcgccaagacaagcttcggtgtcacgggagaaaatggaactcaagtcctcaaaaacctaagagccgtgcaattcgctctcttcaactcaaatcgctacgtaggcgtgccattcagcaacattttgagttacaagcaaaccgttaaagcgaaggggctaggtcatgagatagatggtctccttttgtcgttcataaacaaacggaagatatctttggctgaaggagatgaccaaggccacgatcttctcggaatgttgcttaaggccgatcagaaagggaattttacggcgaaagagcttgtggacgaatgcaagacattcttcttcgctggccacgagacaacggctttagcactaacgtggacgtttatgcttcttgcgatccatcccgagtggcaagacacgatcagggaagagattagagaagtcatcggagattccaagattgagtataacaaacttgccggtctaaaaaagatgagttgggtaatgaacgaggttctccggctatatccaccggcaccgaacgcacaacgacaagcccgaaatgacattgaagtgaacggacgagtgattccaaacggaacaaacatttggattgatgtggtggcgatgcaccacgacgttgagttgtggggagatgacgttaacgagtttaagcctgagagattcgacggtaatttgcacggtggttgtaagaataaaatgggttacatgccgtttggattcggagggagaatgtgtatcggtcggaatttgaccaccatggagtacaagattgtcttgtcgttggttttgtcccggttcgaaatctcggtttcgcccggttatcgccattctccgacgtatatgctttctcttagaccgggttacggtttgcctctaattatacgaccactttag

SEQ ID NO: 90133 - protein, 519 aa, Arabidopsis thaliana
  peptide (1)..(519): Ceres Seq. ID no. 12722286
  misc_feature (1)..(519): Homolog of NCBI NO: 22327780 NR Description: cytochrome p450 family; protein id: At5g52400.1
  misc_feature (1)..(519): Homolog of NCBI NO: 10177406 NR Description: cytochrome P-450-like protein [Arabidopsis
  misc_feature (211)..(519): Homolog of NCBI NO: 10799820 NR Description: putative cytochrome P-450 [Persea americana]
  misc_feature (16)..(519): Homolog of NCBI NO: 15240917 NR Description: cytochrome p450, putative; protein id: At5g38450.1
  misc_feature (16)..(519): Homolog of NCBI NO: 15219831 NR Description: cytochrome P450, putative; protein id: [Arabidopsis thaliana] >gi|25282618|pir||A96695 hypothetical
  misc_feature (6)..(519): Homolog of NCBI NO: 38112707 NR Description: cytochrome P450 [Triticum aestivum]
  misc_feature (17)..(519): Homolog of NCBI NO: 13661756 NR Description: putative cytochrome P450 [Lolium rigidum]
  misc_feature (18)..(519): Homolog of NCBI NO: 13661758 NR Description: putative cytochrome P450 [Lolium rigidum]
  misc_feature (34)..(519): Homolog of NCBI NO: 22324446 NR Description: putative cytochrome P450 [Oryza sativa (japonica
  misc_feature (6)..(519): Homolog of NCBI NO: 18407219 NR Description: cytochrome P450, putative; protein id: supported by cDNA: gi_13605860, supported by cDNA: gi_20147140 thaliana] >gi|13605861|gb|AAK32916.1|AF367329_1
MEFFEMSRVWYIFFKVFVVVICLMFLKLFLRCWIWPVRAQKKLRGNGFVGPAPSFPFGNLNDMKKLKMASVVVDNSKSSTIINHDIHSIALPHFARWQQEYGKVFVYWLGIEPFVYVADPEFLSVMSKGVLGKSWGKPNVFKKDREPMFGTGLVMVEGDDWTRHRHIITPAFAPLNLKVMTNMMVESVSNMLDRWGIQINSGNPEFDMESEIIGTAGEIIAKTSFGVTGENGTQVLKNLRAVQFALFNSNRYVGVPFSNILSYKQTVKAKGLGHEIDGLLLSFINKRKISLAEGDDQGHDLLGMLLKADQKGNFTAKELVDECKTFFFAGHETTALALTWTFMLLAIHPEWQDTIREEIREVIGDSKIEYNKLAGLKKMSWVMNEVLRLYPPAPNAQRQARNDIEVNGRVIPNGTNIWIDVVAMHHDVELWGDDVNEFKPERFDGNLHGGCKNKMGYMPFGFGGRMCIGRNLTTMEYKIVLSLVLSRFEISVSPGYRHSPTYMLSLRPGYGLPLIIRPL

SEQ ID NO: 90134 - protein, 514 aa, Arabidopsis thaliana
  peptide (1)..(514): Ceres Seq. ID no. 12722287
  misc_feature (1)..(514): Homolog of NCBI NO: 22327780 NR Description: cytochrome p450 family; protein id: At5g52400.1
  misc_feature (1)..(514): Homolog of NCBI NO: 10177406 NR Description: cytochrome P-450-like protein [Arabidopsis
  misc_feature (206)..(514): Homolog of NCBI NO: 10799820 NR Description: putative cytochrome P-450 [Persea americana]
  misc_feature (11)..(514): Homolog of NCBI NO: 15240917 NR Description: cytochrome p450, putative; protein id: At5g38450.1
  misc_feature (11)..(514): Homolog of NCBI NO: 15219831 NR Description: cytochrome P450, putative; protein id: [Arabidopsis thaliana] >gi|25282618|pir||A96695 hypothetical
  misc_feature (1)..(514): Homolog of NCBI NO: 38112707 NR Description: cytochrome P450 [Triticum aestivum]
  misc_feature (12)..(514): Homolog of NCBI NO: 13661756 NR Description: putative cytochrome P450 [Lolium rigidum]
  misc_feature (13)..(514): Homolog of NCBI NO: 13661758 NR Description: putative cytochrome P450 [Lolium rigidum]
  misc_feature (29)..(514): Homolog of NCBI NO: 22324446 NR Description: putative cytochrome P450 [Oryza sativa (japonica
  misc_feature (1)..(514): Homolog of NCBI NO: 18407219 NR Description: cytochrome P450, putative; protein id: supported by cDNA: gi_13605860, supported by cDNA: gi_20147140 thaliana] >gi|13605861|gb|AAK32916.1|AF367329_1
MSRVWYIFFKVFVVVICLMFLKLFLRCWIWPVRAQKKLRGNGFVGPAPSFPFGNLNDMKKLKMASVVVDNSKSSTIINHDIHSIALPHFARWQQEYGKVFVYWLGIEPFVYVADPEFLSVMSKGVLGKSWGKPNVFKKDREPMFGTGLVMVEGDDWTRHRHIITPAFAPLNLKVMTNMMVESVSNMLDRWGIQINSGNPEFDMESEIIGTAGEIIAKTSFGVTGENGTQVLKNLRAVQFALFNSNRYVGVPFSNILSYKQTVKAKGLGHEIDGLLLSFINKRKISLAEGDDQGHDLLGMLLKADQKGNFTAKELVDECKTFFFAGHETTALALTWTFMLLAIHPEWQDTIREEIREVIGDSKIEYNKLAGLKKMSWVMNEVLRLYPPAPNAQRQARNDIEVNGRVIPNGTNIWIDVVAMHHDVELWGDDVNEFKPERFDGNLHGGCKNKMGYMPFGFGGRMCIGRNLTTMEYKIVLSLVLSRFEISVSPGYRHSPTYMLSLRPGYGLPLIIRPL

SEQ ID NO: 90135 - protein, 496 aa, Arabidopsis thaliana
  peptide (1)..(496): Ceres Seq. ID no. 12722288
  misc_feature (1)..(496): Homolog of NCBI NO: 22327780 NR Description: cytochrome p450 family; protein id: At5g52400.1
  misc_feature (1)..(496): Homolog of NCBI NO: 10177406 NR Description: cytochrome P-450-like protein [Arabidopsis
  misc_feature (188)..(496): Homolog of NCBI NO: 10799820 NR Description: putative cytochrome P-450 [Persea americana]
  misc_feature (1)..(496): Homolog of NCBI NO: 15240917 NR Description: cytochrome p450, putative; protein id: At5g38450.1
  misc_feature (1)..(496): Homolog of NCBI NO: 15219831 NR Description: cytochrome P450, putative; protein id: [Arabidopsis thaliana] >gi|25282618|pir||A96695 hypothetical
  misc_feature (1)..(496): Homolog of NCBI NO: 38112707 NR Description: cytochrome P450 [Triticum aestivum]
  misc_feature (1)..(496): Homolog of NCBI NO: 13661756 NR Description: putative cytochrome P450 [Lolium rigidum]
  misc_feature (1)..(496): Homolog of NCBI NO: 13661758 NR Description: putative cytochrome P450 [Lolium rigidum]
  misc_feature (11)..(496): Homolog of NCBI NO: 22324446 NR Description: putative cytochrome P450 [Oryza sativa (japonica
  misc_feature (1)..(496): Homolog of NCBI NO: 18407219 NR Description: cytochrome P450, putative; protein id: supported by cDNA: gi_13605860, supported by cDNA: gi_20147140 thaliana] >gi|13605861|gb|AAK32916.1|AF367329_1
MFLKLFLRCWIWPVRAQKKLRGNGFVGPAPSFPFGNLNDMKKLKMASVVVDNSKSSTIINHDIHSIALPHFARWQQEYGKVFVYWLGIEPFVYVADPEFLSVMSKGVLGKSWGKPNVFKKDREPMFGTGLVMVEGDDWTRHRHIITPAFAPLNLKVMTNMMVESVSNMLDRWGIQINSGNPEFDMESEIIGTAGEIIAKTSFGVTGENGTQVLKNLRAVQFALFNSNRYVGVPFSNILSYKQTVKAKGLGHEIDGLLLSFINKRKISLAEGDDQGHDLLGMLLKADQKGNFTAKELVDECKTFFFAGHETTALALTWTFMLLAIHPEWQDTIREEIREVIGDSKIEYNKLAGLKKMSWVMNEVLRLYPPAPNAQRQARNDIEVNGRVIPNGTNIWIDVVAMHHDVELWGDDVNEFKPERFDGNLHGGCKNKMGYMPFGFGGRMCIGRNLTTMEYKIVLSLVLSRFEISVSPGYRHSPTYMLSLRPGYGLPLIIRPL

SEQ ID NO: 90136 - DNA, 1018 bp, Arabidopsis thaliana
  misc_feature (1)..(1018): Ceres Seq. ID no. 12722293
  misc_feature: MA Experiment ID: 20000166 Result: Up-regulated in Transcription
  misc_feature: MA Experiment 20000166 PARAMETER Experiment Name: At_100uM_ABA_P Parameter: Age (day) Value: 14
  misc_feature: MA Experiment 20000166 PARAMETER Experiment Name: At_100uM_ABA_P Parameter: Organism Value: A. thaliana
  misc_feature: MA Experiment 20000166 PARAMETER Experiment Name: At_100uM_ABA_P Parameter: Plant Line Value: WS
  misc_feature: MA Experiment 20000166 PARAMETER Experiment Name: At_100uM_ABA_P Parameter: Timepoint (hr) Value: 1
  misc_feature: MA Experiment 20000166 PARAMETER Experiment Name: At_100uM_ABA_P Parameter: Tissue Value: Aerial
  misc_feature: MA Experiment 20000166 PARAMETER Experiment Name: At_100uM_ABA_P Parameter: Treatment Value: 100uM ABA vs. No Treatment
  misc_feature: MA Experiment ID: 20000171 Result: Down-regulated in Transcription
  misc_feature: MA Experiment 20000171 PARAMETER Experiment Name: At_42deg_Heat_P Parameter: Age (day) Value: 14
  misc_feature: MA Experiment 20000171 PARAMETER Experiment Name: At_42deg_Heat_P Parameter: Organism Value: A. thaliana
  misc_feature: MA Experiment 20000171 PARAMETER Experiment Name: At_42deg_Heat_P Parameter: Plant Line Value: WS
  misc_feature: MA Experiment 20000171 PARAMETER Experiment Name: At_42deg_Heat_P Parameter: Temperature (deg C) Value: 42 vs. 22
  misc_feature: MA Experiment 20000171 PARAMETER Experiment Name: At_42deg_Heat_P Parameter: Timepoint (hr) Value: 1
  misc_feature: MA Experiment 20000171 PARAMETER Experiment Name: At_42deg_Heat_P Parameter: Tissue Value: Aerial
  misc_feature: MA Experiment ID: 20000180 Result: Down-regulated in Transcription
  misc_feature: MA Experiment 20000180 PARAMETER Experiment Name: At_Germinating_Seeds_P Parameter: Age (hr) Value: 24 vs. 0
  misc_feature: MA Experiment 20000180 PARAMETER Experiment Name: At_Germinating_Seeds_P Parameter: Tissue Value: Germinating Seeds
  misc_feature: MA Experiment ID: 20000184 Result: Up-regulated in Transcription
  misc_feature: MA Experiment 20000184 PARAMETER Experiment Name: At_Shoots__P Parameter: Age (day) Value: 7
  misc_feature: MA Experiment 20000184 PARAMETER Experiment Name: At_Shoots__P Parameter: Tissue Value: Shoots vs. Whole Plant
  misc_feature: MA Experiment ID: 20000227 Result: Down-regulated in Transcription
  misc_feature: MA Experiment 20000227 PARAMETER Experiment Name: At_Root-Tips-vs-Tops_P Parameter: Tissue Value: Root Tips vs. Root Tops
  misc_feature: MA Experiment ID: 20000438 Result: Up-regulated in Transcription
  misc_feature: MA Experiment 20000438 PARAMETER Experiment Name: At_Shoots__P Parameter: Age (day) Value: 14
  misc_feature: MA Experiment 20000438 PARAMETER Experiment Name: At_Shoots__P Parameter: Tissue Value: Shoots vs. Whole Plant
  misc_feature: MA Experiment ID: 20001248 Result: Down-regulated in Transcription
  misc_feature: MA Experiment 20001248 PARAMETER Experiment Name: At_Far-red-induction_P Parameter: Age (day) Value: 7
  misc_feature: MA Experiment 20001248 PARAMETER Experiment Name: At_Far-red-induction_P Parameter: Light Value: Far-red vs. White
  misc_feature: MA Experiment 20001248 PARAMETER Experiment Name: At_Far-red-induction_P Parameter: Organism Value: A. thaliana
  misc_feature: MA Experiment 20001248 PARAMETER Experiment Name: At_Far-red-induction_P Parameter: Plant Line Value: Columbia
  misc_feature: MA Experiment 20001248 PARAMETER Experiment Name: At_Far-red-induction_P Parameter: Timepoint (hr) Value: 4
  misc_feature: MA Experiment 20001248 PARAMETER Experiment Name: At_Far-red-induction_P Parameter: Tissue Value: Whole Plant
  misc_feature: MA Experiment ID: 20001555 Result: Up-regulated in Transcription
  misc_feature: MA Experiment 20001555 PARAMETER Experiment Name: At_Drought_Soil_Dry_P Parameter: Age (day) Value: 24
  misc_feature: MA Experiment 20001555 PARAMETER Experiment Name: At_Drought_Soil_Dry_P Parameter: Organism Value: A. thaliana
  misc_feature: MA Experiment 20001555 PARAMETER Experiment Name: At_Drought_Soil_Dry_P Parameter: Plant Line Value: WS
  misc_feature: MA Experiment 20001555 PARAMETER Experiment Name: At_Drought_Soil_Dry_P Parameter: Post Timepoint (hr) Value: None
  misc_feature: MA Experiment 20001555 PARAMETER Experiment Name: At_Drought_Soil_Dry_P Parameter: Post-Treatment Value: None
  misc_feature: MA Experiment 20001555 PARAMETER Experiment Name: At_Drought_Soil_Dry_P Parameter: Timepoint (day) Value: 10
  misc_feature: MA Experiment 20001555 PARAMETER Experiment Name: At_Drought_Soil_Dry_P Parameter: Treatment Value: Drought vs. No Drought
  misc_feature: MA Experiment ID: 20001556 Result: Up-regulated in Transcription
  misc_feature: MA Experiment 20001556 PARAMETER Experiment Name: At_Drought_Soil_Dry_P Parameter: Age (day) Value: 26
  misc_feature: MA Experiment 20001556 PARAMETER Experiment Name: At_Drought_Soil_Dry_P Parameter: Organism Value: A. thaliana
  misc_feature: MA Experiment 20001556 PARAMETER Experiment Name: At_Drought_Soil_Dry_P Parameter: Plant Line Value: WS
  misc_feature: MA Experiment 20001556 PARAMETER Experiment Name: At_Drought_Soil_Dry_P Parameter: Post Timepoint (hr) Value: None
  misc_feature: MA Experiment 20001556 PARAMETER Experiment Name: At_Drought_Soil_Dry_P Parameter: Post-Treatment Value: None
  misc_feature: MA Experiment 20001556 PARAMETER Experiment Name: At_Drought_Soil_Dry_P Parameter: Timepoint (day) Value: 12
  misc_feature: MA Experiment 20001556 PARAMETER Experiment Name: At_Drought_Soil_Dry_P Parameter: Treatment Value: Drought vs. No Drought
  misc_feature: MA Experiment ID: 20001757 Result: Up-regulated in Transcription
  misc_feature: MA Experiment 20001757 PARAMETER Experiment Name: At_50mM_NH4NO3_L-to-H_P Parameter: Timepoint (hr) Value: 6
  misc_feature: MA Experiment 20001757 PARAMETER Experiment Name: At_50mM_NH4NO3_L-to-H_P Parameter: Tissue Value: Leaf
  misc_feature: MA Experiment 20001757 PARAMETER Experiment Name: At_50mM_NH4NO3_L-to-H_P Parameter: Treatment Value: 50mM NH4NO3 vs 100mM Mannitol
  misc_feature: MA Experiment ID: 20001911 Result: Up-regulated in Transcription
  misc_feature: MA Experiment 20001911 PARAMETER Experiment Name: At_Drought_Reproduction_P Parameter: Age (day) Value: 40
  misc_feature: MA Experiment 20001911 PARAMETER Experiment Name: At_Drought_Reproduction_P Parameter: Organism Value: A. thaliana
  misc_feature: MA Experiment 20001911 PARAMETER Experiment Name: At_Drought_Reproduction_P Parameter: Plant Line Value: WS
  misc_feature: MA Experiment 20001911 PARAMETER Experiment Name: At_Drought_Reproduction_P Parameter: Timepoint (day) Value: 10
  misc_feature: MA Experiment 20001911 PARAMETER Experiment Name: At_Drought_Reproduction_P Parameter: Tissue Value: Flowers
  misc_feature: MA Experiment 20001911 PARAMETER Experiment Name: At_Drought_Reproduction_P Parameter: Treatment Value: Drought vs. No Drought
acattttcccgagaaaacaaaaaaaaaaaacttacaccaaaacgatgtctggaggtgtcggtccaacgtacaacgacataaccttacccaaagaagaagaagaagaacatcaaacccaatccacctcaacagtatcatccaccggaaaacccgccggattcttctcattccgacaactaaacatcctcgcaataatcatcgttctctccgcaagtggtctcgtaacaatccaagatttcatattcacgatcctcactctcatctacttcttcttcctctcgaaacttatcttcccaccacacaacaatccaaaccgtgacgctcctctcacaagctccacaaacaaaatcttccgtatctatgttacagcggcggggatcgtcgggcttatcattccgatctgttacatcttcgaaggaatcgttgaggatgataagaacggtgttagcgcagctgcaccgcacgtgtttcttttagcgagtcagatttttatggaaggattagcgaccatgtttggcttctctgctccggcgaggattcttgttccgattgtttacaacgccaggagggttttgactcttgtggagtggattatgagtgagttctcgagggaggatgtgacggggacggtttctgcgcggcggatgtatgccgggaaagttttggcggcggctaatttagggatttggtcgtttaatctctttggtgttttgattccggtttatctacccagagcgtttaagaggtattacggttctgataaggaggattgaaatcccggtttagttccggttccaataaggagagtcaaaacccggtttaattcctttgtggttcacagctcttgttgttttccctttttgttctgtatattatttcgatgttttcttttgaacaattcagtttatgtagtagttcacagttgtattagatttcttacgataataaccgaatctatgtttctgaaagaacagaaatgaaaatgttttagtaatgatatagaataagaccattcacg

SEQ ID NO: 90137 - protein, 256 aa, Arabidopsis thaliana
  peptide (1)..(256): Ceres Seq. ID no. 12722294
  misc_feature (15)..(256): Homolog of NCBI NO: 18423389 NR Description: expressed protein; protein id: At5g52420.1, by cDNA: gi_15146255, supported by cDNA: gi_19699159 [Arabidopsis >gi|10177408|dbj|BAB10539.1| gene_id:K24M7.17~unknown protein
  misc_feature (15)..(256): Homolog of NCBI NO: 15146256 NR Description: AT5g52420/K24M7_17 [Arabidopsis thaliana]
  misc_feature (15)..(256): Homolog of NCBI NO: 37536624 NR Description: unknown protein [Oryza sativa (japonica
  misc_feature (28)..(256): Homolog of NCBI NO: 15237854 NR Description: unknown protein; protein id: At5g23920.1 thaliana] >gi|10176859|dbj|BAB10065.1| gene_id:MRO11.4~unknown [Arabidopsis thaliana] >gi|29028832|gb|AAO64795.1| At5g23920
  misc_feature (15)..(250): Homolog of NCBI NO: 15217782 NR Description: unknown protein; protein id: At1g27990.1
  misc_feature (15)..(250): Homolog of NCBI NO: 38347228 NR Description: OSJNBa0044M19.10 [Oryza sativa (japonica
IFPRKQKKKTYTKTMSGGVGPTYNDITLPKEEEEEHQTQSTSTVSSTGKPAGFFSFRQLNILAIIIVLSASGLVTIQDFIFTILTLIYFFFLSKLIFPPHNNPNRDAPLTSSTNKIFRIYVTAAGIVGLIIPICYIFEGIVEDDKNGVSAAAPHVFLLASQIFMEGLATMFGFSAPARILVPIVYNARRVLTLVEWIMSEFSREDVTGTVSARRMYAGKVLAAANLGIWSFNLFGVLIPVYLPRAFKRYYGSDKED

SEQ ID NO: 90138 - protein, 242 aa, Arabidopsis thaliana
  peptide (1)..(242): Ceres Seq. ID no. 12722295
  misc_feature (1)..(242): Homolog of NCBI NO: 18423389 NR Description: expressed protein; protein id: At5g52420.1, by cDNA: gi_15146255, supported by cDNA: gi_19699159 [Arabidopsis >gi|10177408|dbj|BAB10539.1| gene_id:K24M7.17~unknown protein
  misc_feature (1)..(242): Homolog of NCBI NO: 15146256 NR Description: AT5g52420/K24M7_17 [Arabidopsis thaliana]
  misc_feature (1)..(242): Homolog of NCBI NO: 37536624 NR Description: unknown protein [Oryza sativa (japonica
  misc_feature (14)..(242): Homolog of NCBI NO: 15237854 NR Description: unknown protein; protein id: At5g23920.1 thaliana] >gi|10176859|dbj|BAB10065.1| gene_id:MRO11.4~unknown [Arabidopsis thaliana] >gi|29028832|gb|AAO64795.1| At5g23920
  misc_feature (1)..(236): Homolog of NCBI NO: 15217782 NR Description: unknown protein; protein id: At1g27990.1
  misc_feature (1)..(236): Homolog of NCBI NO: 38347228 NR Description: OSJNBa0044M19.10 [Oryza sativa (japonica
MSGGVGPTYNDITLPKEEEEEHQTQSTSTVSSTGKPAGFFSFRQLNILAIIIVLSASGLVTIQDFIFTILTLIYFFFLSKLIFPPHNNPNRDAPLTSSTNKIFRIYVTAAGIVGLIIPICYIFEGIVEDDKNGVSAAAPHVFLLASQIFMEGLATMFGFSAPARILVPIVYNARRVLTLVEWIMSEFSREDVTGTVSARRMYAGKVLAAANLGIWSFNLFGVLIPVYLPRAFKRYYGSDKED

SEQ ID NO: 90139 - DNA, 879 bp, Arabidopsis thaliana
  misc_feature (1)..(879): Ceres Seq. ID no. 12722305
  misc_feature: MA Experiment ID: 20000171 Result: Up-regulated in Transcription
  misc_feature: MA Experiment 20000171 PARAMETER Experiment Name: At_42deg_Heat_P Parameter: Age (day) Value: 14
  misc_feature: MA Experiment 20000171 PARAMETER Experiment Name: At_42deg_Heat_P Parameter: Organism Value: A. thaliana
  misc_feature: MA Experiment 20000171 PARAMETER Experiment Name: At_42deg_Heat_P Parameter: Plant Line Value: WS
  misc_feature: MA Experiment 20000171 PARAMETER Experiment Name: At_42deg_Heat_P Parameter: Temperature (deg C) Value: 42 vs. 22
  misc_feature: MA Experiment 20000171 PARAMETER Experiment Name: At_42deg_Heat_P Parameter: Timepoint (hr) Value: 1
  misc_feature: MA Experiment 20000171 PARAMETER Experiment Name: At_42deg_Heat_P Parameter: Tissue Value: Aerial
atgaaacctccccaaagaggacgtggtggtggtgttagaggtggaagaggtttagccagaggcggtgaaggaagtgccgtaagaggcagtggaagaggcggcgaaagtggccgtggaagagggcctggaagagttaaaagtgaatcggacggtggaattaagggaggaagcaaagtgttagtgacaccacacaggcacgcaggagtgtttgttgccaaaagtaaagcagatgctcttgtaaccaagaacttagttcctggtgaaatcatttacaatgagaagagaatctttgttcagaacgaagaccgatctactgttgaatacagagtttggaaccctcatagatctaagttagctgatgctattaccactggtgttgataacatttggatcaaacctggtgttaaagttctgtaccttggtgcttcttctggatacaccgtgtctcatgtctctgacattgttggtccagagggatgtgtttacgctgttgagcattctgatatttgtggtaaagttttgatgaacatggcggagaagagaactaatgttataccaatcattgaagatgctagacatcctgctaaatatagaatgcttgtgggaatggttgatatcatattctctgatgttaatcaccctgagcaagctaacatattaagtctcaatgcttcttatttcctcaaatctggagggcactttatgatctctataaaggcgaattctatagactcaacaattgcagcagaaactgtgtatcagatggaagtggagaagttacaaatggaagagttgagaccaacagagatattgcatcttgactcttgtgaggaaaagcatgcttgtgtttttggtggatatcgcttgcctaggaagtaa

SEQ ID NO: 90140 - protein, 292 aa, Arabidopsis thaliana
  peptide (1)..(292): Ceres Seq. ID no. 12722306
  misc_feature (57)..(289): Pfam Name: Fibrillarin Pfam Description: Fibrillarin
  misc_feature (1)..(292): Homolog of NCBI NO: 18423398 NR Description: fibrillarin 3 (AtFib3); protein id: At5g52490.1
  misc_feature (1)..(292): Homolog of NCBI NO: 30696189 NR Description: fibrillarin 1 (Fib1) (SKIP7) [Arabidopsis >gi|9965653|gb|AAG10103.1|AF233443_1 fibrillarin 1 [Arabidopsis
  misc_feature (7)..(292): Homolog of NCBI NO: 18416588 NR Description: fibrillarin 2 (AtFib2); protein id: At4g25630.1, by cDNA: 11319., supported by cDNA: gi_15028154, supported by
  misc_feature (7)..(292): Homolog of NCBI NO: 15028155 NR Description: putative fibrillarin 2 protein AtFib2
  misc_feature (1)..(292): Homolog of NCBI NO: 6003681 NR Description: fibrillarin homolog [Arabidopsis thaliana]
  misc_feature (52)..(292): Homolog of NCBI NO: 2982266 NR Description: probable fibrillarin [Picea mariana]
  misc_feature (6)..(292): Homolog of NCBI NO: 30353806 NR Description: Unknown (protein for MGC:56145) [Danio rerio]
  misc_feature (6)..(292): Homolog of NCBI NO: 27924365 NR Description: Unknown (protein for IMAGE:5543421) [Xenopus
  misc_feature (6)..(292): Homolog of NCBI NO: 119856 NR Description: Fibrillarin >gi|2134062|pir||I51417 fibrillarin -
  misc_feature (6)..(292): Homolog of NCBI NO: 3399667 NR Description: FBRL_HUMAN; 34 KD NUCLEOLAR SCLERODERMA ANTIGEN
MKPPQRGRGGGVRGGRGLARGGEGSAVRGSGRGGESGRGRGPGRVKSESDGGIKGGSKVLVTPHRHAGVFVAKSKADALVTKNLVPGEIIYNEKRIFVQNEDRSTVEYRVWNPHRSKLADAITTGVDNIWIKPGVKVLYLGASSGYTVSHVSDIVGPEGCVYAVEHSDICGKVLMNMAEKRTNVIPIIEDARHPAKYRMLVGMVDIIFSDVNHPEQANILSLNASYFLKSGGHFMISIKANSIDSTIAAETVYQMEVEKLQMEELRPTEILHLDSCEEKHACVFGGYRLPRK

SEQ ID NO: 90141 - DNA, 1116 bp, Arabidopsis thaliana
  misc_feature (1)..(1116): Ceres Seq. ID no. 12722311
  misc_feature: MA Experiment ID: 20000439 Result: Up-regulated in Transcription
  misc_feature: MA Experiment 20000439 PARAMETER Experiment Name: At_Roots__P Parameter: Age (day) Value: 14 vs. 21
  misc_feature: MA Experiment 20000439 PARAMETER Experiment Name: At_Roots__P Parameter: Organism Value: A. thaliana
  misc_feature: MA Experiment 20000439 PARAMETER Experiment Name: At_Roots__P Parameter: Tissue Value: Roots vs. Whole Plant
  misc_feature: MA Experiment ID: 20000794 Result: Up-regulated in Transcription
  misc_feature: MA Experiment 20000794 PARAMETER Experiment Name: At_Petals_P Parameter: Age (day) Value: 23-25 days
  misc_feature: MA Experiment 20000794 PARAMETER Experiment Name: At_Petals_P Parameter: Plant Line Value: WS
  misc_feature: MA Experiment 20000794 PARAMETER Experiment Name: At_Petals_P Parameter: Tissue Value: Petals vs. Whole plant
  misc_feature: MA Experiment ID: 20001905 Result: Up-regulated in Transcription
  misc_feature: MA Experiment 20001905 PARAMETER Experiment Name: At_Drought_Reproduction_P Parameter: Age (day) Value: 40
  misc_feature: MA Experiment 20001905 PARAMETER Experiment Name: At_Drought_Reproduction_P Parameter: Organism Value: A. thaliana
  misc_feature: MA Experiment 20001905 PARAMETER Experiment Name: At_Drought_Reproduction_P Parameter: Plant Line Value: WS
  misc_feature: MA Experiment 20001905 PARAMETER Experiment Name: At_Drought_Reproduction_P Parameter: Timepoint (day) Value: 10
  misc_feature: MA Experiment 20001905 PARAMETER Experiment Name: At_Drought_Reproduction_P Parameter: Tissue Value: Rosettes
  misc_feature: MA Experiment 20001905 PARAMETER Experiment Name: At_Drought_Reproduction_P Parameter: Treatment Value: Drought vs. No Drought
atggaaatcgcgacggcgatcgcggaagggaaaacagagatagcgacggagattttggcgcgtgtttctcaaacgcctaatcttgagaggaattcagaggagaagcttgttgatttcatggtggctgcgcttcgatcgaggatagcttctccagtgacggaattgtatgggaaggagcatttaatctcgactcaattgctctacgagctctctccttgtttcaaactcggtttcgaggccgcgaatctcgccattctcgacgccgccgataacaacgacggtggaatgatgataccgcacgttatcgatttcgatatcggagaaggtggacaatacgttaaccttctccgtacattatccacgcgccggaatggtaaaagtcagagtcagaattctccggtggttaagatcaccgccgtggcgaacaacgtttacggatgtttagtcgatgacggtggagaagagaggttaaaagccgtcggagatttgttgagccaactcggtgatcgactcggtatctccgtaagtttcaacgtggtgacgagtttacgactcggtgatctgaatcgtgaatctctcgggtgtgatcccgacgagactttggctgtgaacttagctttcaagctttatcgtgttcccgacgaaagcgtatgcacggagaatccaagagacgaacttctccggcgcgtgaagggacttaaaccgcgcgtggttactctagtggagcaagaaatgaattcgaatacggcgccgtttttagggagagtgagtgagtcatgcgcgtgttacggtgcgttgcttgagtcggtcgagtctacggttcctagtacgaattccgaccgtgccaaagttgaggaaggaattggccggaagctagtaaacgcggtggcgtgcgaaggaatcgatcgtatagagcggtgcgaggtgttcgggaaatggcgaatgcggatgagcatggctgggtttgagttaatgccattgagtgagaagatagcggagtcgatgaagagtcgtggaaaccgagtccacccgggctttaccgttaaagaagataacggaggtgtgtgctttggttggatgggacgggcactcactgtcgcatccgcttggcgttaa

SEQ ID NO: 90142 - protein, 371 aa, Arabidopsis thaliana
  peptide (1)..(371): Ceres Seq. ID no. 12722312
  misc_feature (1)..(282): Pfam Name: GRAS family transcription factor Pfam Description: GRAS family transcription factor
  misc_feature (1)..(371): Homolog of NCBI NO: 11358830 NR Description: scarecrow-like protein 8 [imported] - Arabidopsis
  misc_feature (1)..(371): Homolog of NCBI NO: 20466440 NR Description: SCARECROW transcriptional regulator-like
  misc_feature (1)..(371): Homolog of NCBI NO: 30696193 NR Description: scarecrow-like transcription factor 8 (SCL8)
  misc_feature (100)..(371): Homolog of NCBI NO: 38345865 NR Description: OSJNBa0064M23.7 [Oryza sativa (japonica
  misc_feature (2)..(123): Homolog of NCBI NO: 38345865 NR Description: OSJNBa0064M23.7 [Oryza sativa (japonica
  misc_feature (2)..(371): Homolog of NCBI NO: 29367345 NR Description: scarecrow transcriptional regulator-like protein
  misc_feature (2)..(371): Homolog of NCBI NO: 34907424 NR Description: scarecrow-like protein [Oryza sativa (japonica
  misc_feature (4)..(371): Homolog of NCBI NO: 15218990 NR Description: scarecrow-like 1; protein id: At1g21450.1, by cDNA: 109490., supported by cDNA: gi_15027952, supported by
  misc_feature (24)..(371): Homolog of NCBI NO: 11358822 NR Description: scarecrow-like protein 1 [imported] - Arabidopsis
  misc_feature (4)..(371): Homolog of NCBI NO: 15238903 NR Description: SCARECROW gene regulator-like; protein id: supported by cDNA: gi_8132288 [Arabidopsis thaliana] phytochrome A signal transduction 1 protein [Arabidopsis
MEIATAIAEGKTEIATEILARVSQTPNLERNSEEKLVDFMVAALRSRIASPVTELYGKEHLISTQLLYELSPCFKLGFEAANLAILDAADNNDGGMMIPHVIDFDIGEGGQYVNLLRTLSTRRNGKSQSQNSPVVKITAVANNVYGCLVDDGGEERLKAVGDLLSQLGDRLGISVSFNVVTSLRLGDLNRESLGCDPDETLAVNLAFKLYRVPDESVCTENPRDELLRRVKGLKPRVVTLVEQEMNSNTAPFLGRVSESCACYGALLESVESTVPSTNSDRAKVEEGIGRKLVNAVACEGIDRIERCEVFGKWRMRMSMAGFELMPLSEKIAESMKSRGNRVHPGFTVKEDNGGVCFGWMGRALTVASAWR

SEQ ID NO: 90143 - protein, 332 aa, Arabidopsis thaliana
  peptide (1)..(332): Ceres Seq. ID no. 12722313
  misc_feature (1)..(243): Pfam Name: GRAS family transcription factor Pfam Description: GRAS family transcription factor
  misc_feature (1)..(332): Homolog of NCBI NO: 11358830 NR Description: scarecrow-like protein 8 [imported] - Arabidopsis
  misc_feature (1)..(332): Homolog of NCBI NO: 20466440 NR Description: SCARECROW transcriptional regulator-like
  misc_feature (1)..(332): Homolog of NCBI NO: 30696193 NR Description: scarecrow-like transcription factor 8 (SCL8)
  misc_feature (61)..(332): Homolog of NCBI NO: 38345865 NR Description: OSJNBa0064M23.7 [Oryza sativa (japonica
  misc_feature (1)..(84): Homolog of NCBI NO: 38345865 NR Description: OSJNBa0064M23.7 [Oryza sativa (japonica
  misc_feature (1)..(332): Homolog of NCBI NO: 29367345 NR Description: scarecrow transcriptional regulator-like protein
  misc_feature (1)..(332): Homolog of NCBI NO: 34907424 NR Description: scarecrow-like protein [Oryza sativa (japonica
  misc_feature (1)..(332): Homolog of NCBI NO: 15218990 NR Description: scarecrow-like 1; protein id: At1g21450.1, by cDNA: 109490., supported by cDNA: gi_15027952, supported by
  misc_feature (1)..(332): Homolog of NCBI NO: 11358822 NR Description: scarecrow-like protein 1 [imported] - Arabidopsis
  misc_feature (1)..(332): Homolog of NCBI NO: 15238903 NR Description: SCARECROW gene regulator-like; protein id: supported by cDNA: gi_8132288 [Arabidopsis thaliana] phytochrome A signal transduction 1 protein [Arabidopsis
MVAALRSRIASPVTELYGKEHLISTQLLYELSPCFKLGFEAANLAILDAADNNDGGMMIPHVIDFDIGEGGQYVNLLRTLSTRRNGKSQSQNSPVVKITAVANNVYGCLVDDGGEERLKAVGDLLSQLGDRLGISVSFNVVTSLRLGDLNRESLGCDPDETLAVNLAFKLYRVPDESVCTENPRDELLRRVKGLKPRVVTLVEQEMNSNTAPFLGRVSESCACYGALLESVESTVPSTNSDRAKVEEGIGRKLVNAVACEGIDRIERCEVFGKWRMRMSMAGFELMPLSEKIAESMKSRGNRVHPGFTVKEDNGGVCFGWMGRALTVASAWR

SEQ ID NO: 90144 - protein, 276 aa, Arabidopsis thaliana
  peptide (1)..(276): Ceres Seq. ID no. 12722314
  misc_feature (1)..(187): Pfam Name: GRAS family transcription factor Pfam Description: GRAS family transcription factor
  misc_feature (1)..(276): Homolog of NCBI NO: 11358830 NR Description: scarecrow-like protein 8 [imported] - Arabidopsis
  misc_feature (1)..(276): Homolog of NCBI NO: 20466440 NR Description: SCARECROW transcriptional regulator-like
  misc_feature (1)..(276): Homolog of NCBI NO: 30696193 NR Description: scarecrow-like transcription factor 8 (SCL8)
  misc_feature (5)..(276): Homolog of NCBI NO: 38345865 NR Description: OSJNBa0064M23.7 [Oryza sativa (japonica
  misc_feature (1)..(28): Homolog of NCBI NO: 38345865 NR Description: OSJNBa0064M23.7 [Oryza sativa (japonica
  misc_feature (1)..(276): Homolog of NCBI NO: 29367345 NR Description: scarecrow transcriptional regulator-like protein
  misc_feature (1)..(276): Homolog of NCBI NO: 34907424 NR Description: scarecrow-like protein [Oryza sativa (japonica
  misc_feature (1)..(276): Homolog of NCBI NO: 15218990 NR Description: scarecrow-like 1; protein id: At1g21450.1, by cDNA: 109490., supported by cDNA: gi_15027952, supported by
  misc_feature (1)..(276): Homolog of NCBI NO: 11358822 NR Description: scarecrow-like protein 1 [imported] - Arabidopsis
  misc_feature (1)..(276): Homolog of NCBI NO: 15238903 NR Description: SCARECROW gene regulator-like; protein id: supported by cDNA: gi_8132288 [Arabidopsis thaliana] phytochrome A signal transduction 1 protein [Arabidopsis
MMIPHVIDFDIGEGGQYVNLLRTLSTRRNGKSQSQNSPVVKITAVANNVYGCLVDDGGEERLKAVGDLLSQLGDRLGISVSFNVVTSLRLGDLNRESLGCDPDETLAVNLAFKLYRVPDESVCTENPRDELLRRVKGLKPRVVTLVEQEMNSNTAPFLGRVSESCACYGALLESVESTVPSTNSDRAKVEEGIGRKLVNAVACEGIDRIERCEVFGKWRMRMSMAGFELMPLSEKIAESMKSRGNRVHPGFTVKEDNGGVCFGWMGRALTVASAWR

SEQ ID NO: 90145 - DNA, 1767 bp, Arabidopsis thaliana
  misc_feature (1)..(1767): Ceres Seq. ID no. 12722327
  misc_feature: MA Experiment ID: 20000173 Result: Down-regulated in Transcription
  misc_feature: MA Experiment 20000173 PARAMETER Experiment Name: At_42deg_Heat_P Parameter: Age (day) Value: 14
  misc_feature: MA Experiment 20000173 PARAMETER Experiment Name: At_42deg_Heat_P Parameter: Organism Value: A. thaliana
  misc_feature: MA Experiment 20000173 PARAMETER Experiment Name: At_42deg_Heat_P Parameter: Plant Line Value: WS
  misc_feature: MA Experiment 20000173 PARAMETER Experiment Name: At_42deg_Heat_P Parameter: Temperature (deg C) Value: 42 vs. 22
  misc_feature: MA Experiment 20000173 PARAMETER Experiment Name: At_42deg_Heat_P Parameter: Timepoint (hr) Value: 6
  misc_feature: MA Experiment 20000173 PARAMETER Experiment Name: At_42deg_Heat_P Parameter: Tissue Value: Aerial
  misc_feature: MA Experiment ID: 20001248 Result: Up-regulated in Transcription
  misc_feature: MA Experiment 20001248 PARAMETER Experiment Name: At_Far-red-induction_P Parameter: Age (day) Value: 7
  misc_feature: MA Experiment 20001248 PARAMETER Experiment Name: At_Far-red-induction_P Parameter: Light Value: Far-red vs. White
  misc_feature: MA Experiment 20001248 PARAMETER Experiment Name: At_Far-red-induction_P Parameter: Organism Value: A. thaliana
  misc_feature: MA Experiment 20001248 PARAMETER Experiment Name: At_Far-red-induction_P Parameter: Plant Line Value: Columbia
  misc_feature: MA Experiment 20001248 PARAMETER Experiment Name: At_Far-red-induction_P Parameter: Timepoint (hr) Value: 4
  misc_feature: MA Experiment 20001248 PARAMETER Experiment Name: At_Far-red-induction_P Parameter: Tissue Value: Whole Plant
atggctctgaattcttcagctttcttcgttccatgtcacaattacaatcaaatctgtgatcttcttctttcttcagctcgaaccagatcaactattaaaggacttcagcttcatggctatgtcgttaaatcaggcctttctcttatccctctcgtcgctaacaacctcattaatttctactccaaatcacagcttccgtttgattctcgtcgagcttttgaagatagcccacaaaaaagttcgacgacttggagttcaatcatctcttgttttgcccagaacgagcttccatggatgtcactcgagtttcttaaaaaaatgatggcgggaaaccttagacctgatgatcatgttcttccatcagctacaaagtcgtgtgcgattttgagtcgttgtgatattggtagatcagttcattgtctatcgatgaagactgggtatgatgctgatgtgtttgtggggagttctttggttgatatgtatgcgaaatgtggagaaattgtttatgcgaggaagatgttcgacgaaatgcctcagagaaatgttgttacttggagtgggatgatgtatgggtatgcacaaatgggtgaaaatgaggaagctttgtggttgtttaaagaagctttgtttgagaatctcgctgttaatgattactcgttttcgagtgttattagtgtttgtgcaaattcgactctacttgagttaggtagacagattcatggattgagtattaagtctagctttgattcttctagctttgtgggaagttctttagtctcgttgtattcaaagtgtggtgttcctgaaggagcttatcaagtttttaacgaggtgcctgtgaagaatctcgggatttggaacgctatgctcaaggcgtatgcgcaacattcacatactcaaaaggttattgaattgttcaaaaggatgaagctttctggaatgaaaccaaatttcataacttttttgaatgtgctcaatgcttgtagtcacgcgggtctagttgatgaagggagatactactttgatcagatgaaagaatcgaggattgagccgacggataagcattacgcttccttggtggatatgttaggacgagctggtagattacaagaagcacttgaagttatcactaatatgccgattgatcccacggaatctgtatggggagctttattaacgagttgtacagtccacaagaacacagagcttgcagcatttgcagcagacaaggtcttcgaattaggaccagtgagttccggtatgcacatttcgttatccaatgcttatgcagccgatggtagattcgaagacgcagctaaagctagaaaattgcttcgagaccgaggggaaaagaaggaaacagggctaagttgggttgaagaaaggaacaaggttcatacatttgcagctggagaaagacgtcatgagaaaagcaaggagatatatgagaagctggctgagttaggggaagagatggagaaagcgggttacattgcagacacaagctatgttctgagagaagtggatggtgacgagaagaatcaaaccataaggtatcatagtgagagattagctattgcttttggactgatcacgtttccagctgatagaccgatccgagtaatgaagaatctgcgtgtttgcggtgattgccataacgcgatcaagttcatgtccgtatgtacgagacgagtgatcattgtgagagataataatcggtttcatcggtttgaagatggcaagtgttcttgtaatgactattggtga

SEQ ID NO: 90146 - protein, 588 aa, Arabidopsis thaliana
  peptide (1)..(588): Ceres Seq. ID no. 12722328
  misc_feature (82)..(116): Pfam Name: PPR repeat Pfam Description: PPR repeat
  misc_feature (18)..(588): Homolog of NCBI NO: 34911828 NR Description: selenium-binding protein-like [Oryza sativa
  misc_feature (21)..(587): Homolog of NCBI NO: 37534806 NR Description: putative PPR-repeat containing protein [Oryza
  misc_feature (32)..(588): Homolog of NCBI NO: 15229561 NR Description: hypothetical protein; protein id: At3g24000.1 thaliana] >gi|9294669|dbj|BAB03018.1| contains similarity to
  misc_feature (54)..(588): Homolog of NCBI NO: 15235498 NR Description: hypothetical protein; protein id: At4g02750.1
  misc_feature (24)..(588): Homolog of NCBI NO: 37535570 NR Description: hypothetical protein [Oryza sativa (japonica group)] >gi|16905194|gb|AAL31064.1| hypothetical protein [Oryza >gi|31432781|gb|AAP54374.1| hypothetical protein [Oryza sativa
  misc_feature (26)..(588): Homolog of NCBI NO: 34365551 NR Description: At4g14850 [Arabidopsis thaliana]
  misc_feature (14)..(573): Homolog of NCBI NO: 15238326 NR Description: putative protein; protein id: At5g04780.1
  misc_feature (70)..(588): Homolog of NCBI NO: 22093801 NR Description: hypothetical protein~predicted by
  misc_feature (36)..(588): Homolog of NCBI NO: 15226200 NR Description: putative selenium-binding protein; protein id:
  misc_feature (34)..(588): Homolog of NCBI NO: 34915012 NR Description: P0458A05.10 [Oryza sativa (japonica
MALNSSAFFVPCHNYNQICDLLLSSARTRSTIKGLQLHGYVVKSGLSLIPLVANNLINFYSKSQLPFDSRRAFEDSPQKSSTTWSSIISCFAQNELPWMSLEFLKKMMAGNLRPDDHVLPSATKSCAILSRCDIGRSVHCLSMKTGYDADVFVGSSLVDMYAKCGEIVYARKMFDEMPQRNVVTWSGMMYGYAQMGENEEALWLFKEALFENLAVNDYSFSSVISVCANSTLLELGRQIHGLSIKSSFDSSSFVGSSLVSLYSKCGVPEGAYQVFNEVPVKNLGIWNAMLKAYAQHSHTQKVIELFKRMKLSGMKPNFITFLNVLNACSHAGLVDEGRYYFDQMKESRIEPTDKHYASLVDMLGRAGRLQEALEVITNMPIDPTESVWGALLTSCTVHKNTELAAFAADKVFELGPVSSGMHISLSNAYAADGRFEDAAKARKLLRDRGEKKETGLSWVEERNKVHTFAAGERRHEKSKEIYEKLAELGEEMEKAGYIADTSYVLREVDGDEKNQTIRYHSERLAIAFGLITFPADRPIRVMKNLRVCGDCHNAIKFMSVCTRRVIIVRDNNRFHRFEDGKCSCNDYW

SEQ ID NO: 90147 - protein, 490 aa, Arabidopsis thaliana
  peptide (1)..(490): Ceres Seq. ID no. 12722329
  misc_feature (1)..(490): Homolog of NCBI NO: 34911828 NR Description: selenium-binding protein-like [Oryza sativa
  misc_feature (1)..(489): Homolog of NCBI NO: 37534806 NR Description: putative PPR-repeat containing protein [Oryza
  misc_feature (1)..(490): Homolog of NCBI NO: 15229561 NR Description: hypothetical protein; protein id: At3g24000.1 thaliana] >gi|9294669|dbj|BAB03018.1| contains similarity to
  misc_feature (1)..(490): Homolog of NCBI NO: 15235498 NR Description: hypothetical protein; protein id: At4g02750.1
  misc_feature (1)..(490): Homolog of NCBI NO: 37535570 NR Description: hypothetical protein [Oryza sativa (japonica group)] >gi|16905194|gb|AAL31064.1| hypothetical protein [Oryza >gi|31432781|gb|AAP54374.1| hypothetical protein [Oryza sativa
  misc_feature (1)..(490): Homolog of NCBI NO: 34365551 NR Description: At4g14850 [Arabidopsis thaliana]
  misc_feature (1)..(475): Homolog of NCBI NO: 15238326 NR Description: putative protein; protein id: At5g04780.1
  misc_feature (1)..(490): Homolog of NCBI NO: 22093801 NR Description: hypothetical protein~predicted by
  misc_feature (1)..(490): Homolog of NCBI NO: 15226200 NR Description: putative selenium-binding protein; protein id:
  misc_feature (1)..(490): Homolog of NCBI NO: 34915012 NR Description: P0458A05.10 [Oryza sativa (japonica
MSLEFLKKMMAGNLRPDDHVLPSATKSCAILSRCDIGRSVHCLSMKTGYDADVFVGSSLVDMYAKCGEIVYARKMFDEMPQRNVVTWSGMMYGYAQMGENEEALWLFKEALFENLAVNDYSFSSVISVCANSTLLELGRQIHGLSIKSSFDSSSFVGSSLVSLYSKCGVPEGAYQVFNEVPVKNLGIWNAMLKAYAQHSHTQKVIELFKRMKLSGMKPNFITFLNVLNACSHAGLVDEGRYYFDQMKESRIEPTDKHYASLVDMLGRAGRLQEALEVITNMPIDPTESVWGALLTSCTVHKNTELAAFAADKVFELGPVSSGMHISLSNAYAADGRFEDAAKARKLLRDRGEKKETGLSWVEERNKVHTFAAGERRHEKSKEIYEKLAELGEEMEKAGYIADTSYVLREVDGDEKNQTIRYHSERLAIAFGLITFPADRPIRVMKNLRVCGDCHNAIKFMSVCTRRVIIVRDNNRFHRFEDGKCSCNDYW

SEQ ID NO: 90148 - protein, 482 aa, Arabidopsis thaliana
  peptide (1)..(482): Ceres Seq. ID no. 12722330
  misc_feature (1)..(482): Homolog of NCBI NO: 34911828 NR Description: selenium-binding protein-like [Oryza sativa
  misc_feature (1)..(481): Homolog of NCBI NO: 37534806 NR Description: putative PPR-repeat containing protein [Oryza
  misc_feature (1)..(482): Homolog of NCBI NO: 15229561 NR Description: hypothetical protein; protein id: At3g24000.1 thaliana] >gi|9294669|dbj|BAB03018.1| contains similarity to
  misc_feature (1)..(482): Homolog of NCBI NO: 15235498 NR Description: hypothetical protein; protein id: At4g02750.1
  misc_feature (1)..(482): Homolog of NCBI NO: 37535570 NR Description: hypothetical protein [Oryza sativa (japonica group)] >gi|16905194|gb|AAL31064.1| hypothetical protein [Oryza >gi|31432781|gb|AAP54374.1| hypothetical protein [Oryza sativa
  misc_feature (1)..(482): Homolog of NCBI NO: 34365551 NR Description: At4g14850 [Arabidopsis thaliana]
  misc_feature (1)..(467): Homolog of NCBI NO: 15238326 NR Description: putative protein; protein id: At5g04780.1
  misc_feature (1)..(482): Homolog of NCBI NO: 22093801 NR Description: hypothetical protein~predicted by
  misc_feature (1)..(482): Homolog of NCBI NO: 15226200 NR Description: putative selenium-binding protein; protein id:
  misc_feature (1)..(482): Homolog of NCBI NO: 34915012 NR Description: P0458A05.10 [Oryza sativa (japonica
MMAGNLRPDDHVLPSATKSCAILSRCDIGRSVHCLSMKTGYDADVFVGSSLVDMYAKCGEIVYARKMFDEMPQRNVVTWSGMMYGYAQMGENEEALWLFKEALFENLAVNDYSFSSVISVCANSTLLELGRQIHGLSIKSSFDSSSFVGSSLVSLYSKCGVPEGAYQVFNEVPVKNLGIWNAMLKAYAQHSHTQKVIELFKRMKLSGMKPNFITFLNVLNACSHAGLVDEGRYYFDQMKESRIEPTDKHYASLVDMLGRAGRLQEALEVITNMPIDPTESVWGALLTSCTVHKNTELAAFAADKVFELGPVSSGMHISLSNAYAADGRFEDAAKARKLLRDRGEKKETGLSWVEERNKVHTFAAGERRHEKSKEIYEKLAELGEEMEKAGYIADTSYVLREVDGDEKNQTIRYHSERLAIAFGLITFPADRPIRVMKNLRVCGDCHNAIKFMSVCTRRVIIVRDNNRFHRFEDGKCSCNDYW

SEQ ID NO: 90149 - DNA, 2682 bp, Arabidopsis thaliana
  misc_feature (1)..(2682): Ceres Seq. ID no. 12722353
  misc_feature: MA Experiment ID: 20000315 Result: Down-regulated in Transcription
  misc_feature: MA Experiment 20000315 PARAMETER Experiment Name: At_14day_Shoots-Roots_Sub_P Parameter: Age (day) Value: 14
  misc_feature: MA Experiment 20000315 PARAMETER Experiment Name: At_14day_Shoots-Roots_Sub_P Parameter: Organism Value: A. thaliana
  misc_feature: MA Experiment 20000315 PARAMETER Experiment Name: At_14day_Shoots-Roots_Sub_P Parameter: Plant Line Value: WS
  misc_feature: MA Experiment 20000315 PARAMETER Experiment Name: At_14day_Shoots-Roots_Sub_P Parameter: Tissue Value: Shoots vs. Whole Plant
  misc_feature: MA Experiment ID: 20000328 Result: Down-regulated in Transcription
  misc_feature: MA Experiment 20000328 PARAMETER Experiment Name: At_42deg_Heat_Sub_P Parameter: Age (day) Value: 14
  misc_feature: MA Experiment 20000328 PARAMETER Experiment Name: At_42deg_Heat_Sub_P Parameter: Organism Value: A. thaliana
  misc_feature: MA Experiment 20000328 PARAMETER Experiment Name: At_42deg_Heat_Sub_P Parameter: Plant Line Value: WS
  misc_feature: MA Experiment 20000328 PARAMETER Experiment Name: At_42deg_Heat_Sub_P Parameter: Temperature (deg C) Value: 42 vs. 22
  misc_feature: MA Experiment 20000328 PARAMETER Experiment Name: At_42deg_Heat_Sub_P Parameter: Timepoint (hr) Value: 6
  misc_feature: MA Experiment 20000328 PARAMETER Experiment Name: At_42deg_Heat_Sub_P Parameter: Tissue Value: Aerial
atgacgagcaaagtagtagcagcagcagcttctgcatttctctctcgcactaacgaattgggtaatcttcaaaaatcatgtattcggattctctccttctgcgaatcgaattcatcacgtattggtttacacatccactgcccagtaataaagtttggtcttttagagaatctcgacttatgcaacaatcttttgagtctttacttaaaaaccgatggtatatggaatgcacgtaaactgttcgatgaaatgtctcacagaactgttttcgcatggacagttatgatctctgcttttaccaagagccaagagtttgcatcagcgctttcgttgtttgaggaaatgatggcttcgggaacacacccgaacgaattcactttttcctcggtggtaagatcttgtgctggtttaagagatattagttacggaggtcgagttcatggctctgttataaagactgggtttgagggaaactcagttgttggaagcagcttgagtgatttgtattctaagtgtgggcagtttaaggaagcttgtgagctatttagttctcttcagaacgcggatactatctcgtggacgatgatgatatcttctttagtgggagctcgtaaatggagagaagcgttgcagttttactctgagatggttaaagctggtgttcctcctaacgagttcacatttgttaagcttttaggtgcctcttcctttctcggtttggagtttggtaaaacgattcatagcaacataattgtcaggggaattccgctgaatgtggtattgaagacatctctcgttgatttctactcgcagttttctaaaatggaggatgctgtgagggtgttgaattcgagtggagaacaagacgtgtttctttggacgtctgtggtatcagggtttgtaaggaacttgagagccaaggaagctgttggcacgtttcttgagatgcgaagtttgggtttgcaaccaaataacttcacatactctgcaatcttgagcttgtgttctgctgttcgttcgctggattttgggaaacagattcactcacagacaattaaggttggcttcgaggatagcactgatgttggaaatgcacttgtagatatgtatatgaagtgctcggcatcagaagtagaagcttcgagagtctttggagcaatggtttcaccaaacgtcgtctcttggacaacgttaatcttaggtcttgttgatcacgggttcgtgcaagattgttttggactgctgatggagatggtaaaacgagaggtagaacccaatgttgttaccctatccggtgttctccgagcctgtagcaaattgagacatgtaaggcgggtattagagattcatgcatatctactcagaagacacgtagatggtgaaatggtagtagggaattcacttgtcgatgcatatgccagctcgaggaaggtggattatgcctggaatgtgattaggtcgatgaaaaggagggataatatcacatacacgagcttggtaacaaggtttaatgagttgggcaagcatgaaatggcactgagtgtcatcaattatatgtatggtgatggaatcagaatggatcagttaagcttacccgggtttatctcagcttcagccaacttgggcgctcttgaaactgggaaacatcttcattgttactccgtgaaatccgggttttctggtgcggcttcggttttaaatagtctcgttgacatgtatagtaaatgtggtagcttggaagatgcaaagaaagtttttgaagaaatagctacgcctgatgtggtttcttggaacgggttggtatctggtttggcatcaaacggttttatttcatctgctctatctgcatttgaggagatgaggatgaaagaaaccgagcccgattcagtaacgttcctgatattgctctctgcttgtagtaatggaagattgactgacttgggccttgagtatttccaagtaatgaaaaagatttataacattgagccacaggtagagcactatgttcatctagttggtatcttaggtcgtgctggacggctagaggaagcaacaggagttgtagagacaatgcatttaaaaccaaatgctatgatcttcaaaacgttgttgagagcttgtagataccgtggaaatctgtctttaggagaagatatggctaacaaaggcttagcacttgcaccatctgatccagccttgtacattcttttggctgacctatacgacgaatctggaaaaccagagttagctcaaaagactcgaaatttgatgactgagaagcgcttgagtaaaaagctaggcaagagcactgtggaggttcaaggaaaagttcacagctttgtcagtgaggatgttactagagtggataaaacgaatgggatttacgcagagatagaatcgataaaggaagagatcaaaaggtttggttcaccatacagaggtaatgaaaacgcaagctttcacagtgcaaaacaagctgttgtgtatggttttatctatgcgtcaccagaagccccggttcatgttgttaagaacaaaattctgtgtaaggactgccatgagttcgtgtccatcttgactcggttagtcgataagaaaataactgtaagagatgggaatcaggttcatatctttaagaatggcgaatgttcttgcaaaagggaagaaacatcatttgtttaa

SEQ ID NO: 90150 - protein, 893 aa, Arabidopsis thaliana
  peptide (1)..(893): Ceres Seq. ID no. 12722354
  misc_feature (393)..(427): Pfam Name: PPR repeat Pfam Description: PPR repeat
  misc_feature (42)..(885): Homolog of NCBI NO: 38606535 NR Description: OSJNBa0016O02.23 [Oryza sativa (japonica
  misc_feature (30)..(886): Homolog of NCBI NO: 15236324 NR Description: putative protein; protein id: At4g13650.1
  misc_feature (36)..(886): Homolog of NCBI NO: 15228590 NR Description: hypothetical protein; protein id: At3g03580.1 thaliana] >gi|6091764|gb|AAF03474.1|AC009327_13 hypothetical [Arabidopsis thaliana] >gi|28393735|gb|AAO42278.1| unknown
  misc_feature (170)..(885): Homolog of NCBI NO: 15234095 NR Description: putative protein; protein id: At4g33170.1
  misc_feature (36)..(236): Homolog of NCBI NO: 15234095 NR Description: putative protein; protein id: At4g33170.1
  misc_feature (92)..(885): Homolog of NCBI NO: 30694644 NR Description: pentatricopeptide (PPR) repeat-containing protein
  misc_feature (92)..(885): Homolog of NCBI NO: 30794008 NR Description: unknown protein [Arabidopsis thaliana]
  misc_feature (79)..(807): Homolog of NCBI NO: 15229419 NR Description: putative protein; protein id: At3g63370.1
  misc_feature (45)..(886): Homolog of NCBI NO: 34903762 NR Description: unnamed protein product [Oryza sativa (japonica group)] >gi|7340873|dbj|BAA92963.1| unnamed protein product
  misc_feature (45)..(806): Homolog of NCBI NO: 15235115 NR Description: putative protein; protein id: At4g39530.1
MTSKVVAAAASAFLSRTNELGNLQKSCIRILSFCESNSSRIGLHIHCPVIKFGLLENLDLCNNLLSLYLKTDGIWNARKLFDEMSHRTVFAWTVMISAFTKSQEFASALSLFEEMMASGTHPNEFTFSSVVRSCAGLRDISYGGRVHGSVIKTGFEGNSVVGSSLSDLYSKCGQFKEACELFSSLQNADTISWTMMISSLVGARKWREALQFYSEMVKAGVPPNEFTFVKLLGASSFLGLEFGKTIHSNIIVRGIPLNVVLKTSLVDFYSQFSKMEDAVRVLNSSGEQDVFLWTSVVSGFVRNLRAKEAVGTFLEMRSLGLQPNNFTYSAILSLCSAVRSLDFGKQIHSQTIKVGFEDSTDVGNALVDMYMKCSASEVEASRVFGAMVSPNVVSWTTLILGLVDHGFVQDCFGLLMEMVKREVEPNVVTLSGVLRACSKLRHVRRVLEIHAYLLRRHVDGEMVVGNSLVDAYASSRKVDYAWNVIRSMKRRDNITYTSLVTRFNELGKHEMALSVINYMYGDGIRMDQLSLPGFISASANLGALETGKHLHCYSVKSGFSGAASVLNSLVDMYSKCGSLEDAKKVFEEIATPDVVSWNGLVSGLASNGFISSALSAFEEMRMKETEPDSVTFLILLSACSNGRLTDLGLEYFQVMKKIYNIEPQVEHYVHLVGILGRAGRLEEATGVVETMHLKPNAMIFKTLLRACRYRGNLSLGEDMANKGLALAPSDPALYILLADLYDESGKPELAQKTRNLMTEKRLSKKLGKSTVEVQGKVHSFVSEDVTRVDKTNGIYAEIESIKEEIKRFGSPYRGNENASFHSAKQAVVYGFIYASPEAPVHVVKNKILCKDCHEFVSILTRLVDKKITVRDGNQVHIFKNGECSCKREETSFV

SEQ ID NO: 90151 - protein, 810 aa, Arabidopsis thaliana
  peptide (1)..(810): Ceres Seq. ID no. 12722355
  misc_feature (310)..(344): Pfam Name: PPR repeat Pfam Description: PPR repeat
  misc_feature (1)..(802): Homolog of NCBI NO: 38606535 NR Description: OSJNBa0016O02.23 [Oryza sativa (japonica
  misc_feature (1)..(803): Homolog of NCBI NO: 15236324 NR Description: putative protein; protein id: At4g13650.1
  misc_feature (1)..(803): Homolog of NCBI NO: 15228590 NR Description: hypothetical protein; protein id: At3g03580.1 thaliana] >gi|6091764|gb|AAF03474.1|AC009327_13 hypothetical [Arabidopsis thaliana] >gi|28393735|gb|AAO42278.1| unknown
  misc_feature (87)..(802): Homolog of NCBI NO: 15234095 NR Description: putative protein; protein id: At4g33170.1
  misc_feature (1)..(153): Homolog of NCBI NO: 15234095 NR Description: putative protein; protein id: At4g33170.1
  misc_feature (9)..(802): Homolog of NCBI NO: 30694644 NR Description: pentatricopeptide (PPR) repeat-containing protein
  misc_feature (9)..(802): Homolog of NCBI NO: 30794008 NR Description: unknown protein [Arabidopsis thaliana]
  misc_feature (1)..(724): Homolog of NCBI NO: 15229419 NR Description: putative protein; protein id: At3g63370.1
  misc_feature (1)..(803): Homolog of NCBI NO: 34903762 NR Description: unnamed protein product [Oryza sativa (japonica group)] >gi|7340873|dbj|BAA92963.1| unnamed protein product
  misc_feature (1)..(723): Homolog of NCBI NO: 15235115 NR Description: putative protein; protein id: At4g39530.1
MSHRTVFAWTVMISAFTKSQEFASALSLFEEMMASGTHPNEFTFSSVVRSCAGLRDISYGGRVHGSVIKTGFEGNSVVGSSLSDLYSKCGQFKEACELFSSLQNADTISWTMMISSLVGARKWREALQFYSEMVKAGVPPNEFTFVKLLGASSFLGLEFGKTIHSNIIVRGIPLNVVLKTSLVDFYSQFSKMEDAVRVLNSSGEQDVFLWTSVVSGFVRNLRAKEAVGTFLEMRSLGLQPNNFTYSAILSLCSAVRSLDFGKQIHSQTIKVGFEDSTDVGNALVDMYMKCSASEVEASRVFGAMVSPNVVSWTTLILGLVDHGFVQDCFGLLMEMVKREVEPNVVTLSGVLRACSKLRHVRRVLEIHAYLLRRHVDGEMVVGNSLVDAYASSRKVDYAWNVIRSMKRRDNITYTSLVTRFNELGKHEMALSVINYMYGDGIRMDQLSLPGFISASANLGALETGKHLHCYSVKSGFSGAASVLNSLVDMYSKCGSLEDAKKVFEEIATPDVVSWNGLVSGLASNGFISSALSAFEEMRMKETEPDSVTFLILLSACSNGRLTDLGLEYFQVMKKIYNIEPQVEHYVHLVGILGRAGRLEEATGVVETMHLKPNAMIFKTLLRACRYRGNLSLGEDMANKGLALAPSDPALYILLADLYDESGKPELAQKTRNLMTEKRLSKKLGKSTVEVQGKVHSFVSEDVTRVDKTNGIYAEIESIKEEIKRFGSPYRGNENASFHSAKQAVVYGFIYASPEAPVHVVKNKILCKDCHEFVSILTRLVDKKITVRDGNQVHIFKNGECSCKREETSFV

SEQ ID NO: 90152 - protein, 799 aa, Arabidopsis thaliana
  peptide (1)..(799): Ceres Seq. ID no. 12722356
  misc_feature (299)..(333): Pfam Name: PPR repeat Pfam Description: PPR repeat
  misc_feature (1)..(791): Homolog of NCBI NO: 38606535 NR Description: OSJNBa0016O02.23 [Oryza sativa (japonica
  misc_feature (1)..(792): Homolog of NCBI NO: 15236324 NR Description: putative protein; protein id: At4g13650.1
  misc_feature (1)..(792): Homolog of NCBI NO: 15228590 NR Description: hypothetical protein; protein id: At3g03580.1 thaliana] >gi|6091764|gb|AAF03474.1|AC009327_13 hypothetical [Arabidopsis thaliana] >gi|28393735|gb|AAO42278.1| unknown
  misc_feature (76)..(791): Homolog of NCBI NO: 15234095 NR Description: putative protein; protein id: At4g33170.1
  misc_feature (1)..(142): Homolog of NCBI NO: 15234095 NR Description: putative protein; protein id: At4g33170.1
  misc_feature (1)..(791): Homolog of NCBI NO: 30694644 NR Description: pentatricopeptide (PPR) repeat-containing protein
  misc_feature (1)..(791): Homolog of NCBI NO: 30794008 NR Description: unknown protein [Arabidopsis thaliana]
  misc_feature (1)..(713): Homolog of NCBI NO: 15229419 NR Description: putative protein; protein id: At3g63370.1
  misc_feature (1)..(792): Homolog of NCBI NO: 34903762 NR Description: unnamed protein product [Oryza sativa (japonica group)] >gi|7340873|dbj|BAA92963.1| unnamed protein product
  misc_feature (1)..(712): Homolog of NCBI NO: 15235115 NR Description: putative protein; protein id: At4g39530.1
MISAFTKSQEFASALSLFEEMMASGTHPNEFTFSSVVRSCAGLRDISYGGRVHGSVIKTGFEGNSVVGSSLSDLYSKCGQFKEACELFSSLQNADTISWTMMISSLVGARKWREALQFYSEMVKAGVPPNEFTFVKLLGASSFLGLEFGKTIHSNIIVRGIPLNVVLKTSLVDFYSQFSKMEDAVRVLNSSGEQDVFLWTSVVSGFVRNLRAKEAVGTFLEMRSLGLQPNNFTYSAILSLCSAVRSLDFGKQIHSQTIKVGFEDSTDVGNALVDMYMKCSASEVEASRVFGAMVSPNVVSWTTLILGLVDHGFVQDCFGLLMEMVKREVEPNVVTLSGVLRACSKLRHVRRVLEIHAYLLRRHVDGEMVVGNSLVDAYASSRKVDYAWNVIRSMKRRDNITYTSLVTRFNELGKHEMALSVINYMYGDGIRMDQLSLPGFISASANLGALETGKHLHCYSVKSGFSGAASVLNSLVDMYSKCGSLEDAKKVFEEIATPDVVSWNGLVSGLASNGFISSALSAFEEMRMKETEPDSVTFLILLSACSNGRLTDLGLEYFQVMKKIYNIEPQVEHYVHLVGILGRAGRLEEATGVVETMHLKPNAMIFKTLLRACRYRGNLSLGEDMANKGLALAPSDPALYILLADLYDESGKPELAQKTRNLMTEKRLSKKLGKSTVEVQGKVHSFVSEDVTRVDKTNGIYAEIESIKEEIKRFGSPYRGNENASFHSAKQAVVYGFIYASPEAPVHVVKNKILCKDCHEFVSILTRLVDKKITVRDGNQVHIFKNGECSCKREETSFV

SEQ ID NO: 90153 - DNA, 2616 bp, Arabidopsis thaliana
  misc_feature (1)..(2616): Ceres Seq. ID no. 12722373
  misc_feature: MA Experiment ID: 20000184 Result: Down-regulated in Transcription
  misc_feature: MA Experiment 20000184 PARAMETER Experiment Name: At_Shoots__P Parameter: Age (day) Value: 7
  misc_feature: MA Experiment 20000184 PARAMETER Experiment Name: At_Shoots__P Parameter: Tissue Value: Shoots vs. Whole Plant
  misc_feature: MA Experiment ID: 20000185 Result: Down-regulated in Transcription
  misc_feature: MA Experiment 20000185 PARAMETER Experiment Name: At_Roots__P Parameter: Age (day) Value: 7 vs. 21
  misc_feature: MA Experiment 20000185 PARAMETER Experiment Name: At_Roots__P Parameter: Organism Value: A. thaliana
  misc_feature: MA Experiment 20000185 PARAMETER Experiment Name: At_Roots__P Parameter: Tissue Value: Roots vs. Whole Plant
  misc_feature: MA Experiment ID: 20000439 Result: Down-regulated in Transcription
  misc_feature: MA Experiment 20000439 PARAMETER Experiment Name: At_Roots__P Parameter: Age (day) Value: 14 vs. 21
  misc_feature: MA Experiment 20000439 PARAMETER Experiment Name: At_Roots__P Parameter: Organism Value: A. thaliana
  misc_feature: MA Experiment 20000439 PARAMETER Experiment Name: At_Roots__P Parameter: Tissue Value: Roots vs. Whole Plant
ggaaactccttccccgtcctctctgtcctctgataaaggcttcactttcatcattcaatctcttcttcttctttcttcttcatcactctctctctttctccaatttcttcattttatcagcttcctctcttctttagtttctgggtcactttagtttcgctctttccgaggaaaaacaaaacaaagatttgatttttctttttggtgggtttaaacagtgatttcttcttttgcccttttattggttcttattgttctcctcaaaagtctacaggattgtcggaagcaaacacacttgtccatgttcgggttatgaatttccctctaattggtgaagaagacacatgaagcagtgaaatctctgtttgtattgaatcttattagtctcaaactatgaatttccgacaagagaagtttgtaaggtttcaagattggaagtcggataagacttcctccgacgtggaatattccggtaaaaacgagattcaaactggaatattccagagaacaataagctcaatctccgacaagttttacagaagctttgaatcaagctctgcaaggatcaaactattcaaaagatcttacaagtcttactcttttaaagaagctgtttcaaaagggattggttctactcacaaaattcttgacccacaaggaccttttcttcagagatggaacaagatctttgttttagcttgtatcatcgctgtctcgcttgaccctttgttcttctacgtgcctatcatcgatgatgctaagaaatgtcttggtattgacaagaaaatggaaataacagcaagcgttttgcgctctttcactgatgttttttatgtccttcacatcattttccagttccgtactggctttatcgctccttcgtctcgtgtttttgggagaggtgttcttgttgaggacaagcgagagatcgctaaacgttacttgtcctcacatttcataattgacattcttgctgttcttccgcttccgcagatggtgattttgataatcattccacatatgagaggttcatcgtctttgaacacgaagaatatgttgaagtttattgttttcttccaatatataccgaggtttataagaatatatccgctctacaaggaagttacaagaacttcaggcatactcactgagacagcttgggctggagctgctttcaatctcttcctctacatgcttgctagtcatgtgtttggtgctttctggtatttgttctcaatcgaacgcgaaacggtgtgctggaaacaagcttgtgagaggaataaccctccgtgcatttcgaagttgttgtactgtgaccctgaaactgcaggaggcaatgctttcctcaatgagtcttgtccgattcagacaccaaacacaacactcttcgactttgggatattccttgacgcacttcaatccggtgtagtggaatctcaagatttccctcaaaagtttttttactgtttctggtggggtctgcagaacctcagttcgctcggtcagaaccttaaaacaagtacatatatttgggaaatctgtttcgcggtgttcatttctattgcggggctggttttgttctccttcttgattggaaatatgcagacgtatctgcaatccactaccacgagattggaggagatgagggtaaagagaagagacgcagaacaatggatgtcacaccgtttgctacctgagaacttgagaaaaagaatccggcgatacgagcagtacaaatggcaagagacaagaggtgttgacgaagagaatcttcttagtaatcttcccaaagatcttagacgcgacatcaaacgtcatctctgtctcgcccttctcatgcgggtccccatgtttgagaaaatggacgaacagcttcttgatgcgctctgtgaccgtttgcaacctgtgttatacacagaggaaagctacatagtaagagaaggagatccggtagacgaaatgctcttcataatgcgcgggaagcttctaacaatcacaacaaacggtggaagaaccggttttttaaattccgagtatcttggagccggtgatttctgtggtgaggagcttttaacctgggctttagacccacactcatcctcaaacctcccaatctcaacaagaactgttcgagctctcatggaagttgaagctttcgcacttaaagctgatgacctcaaattcgtggcttcccagttcagacgtcttcacagcaaacagctaagacatactttcaggtactactcacaacaatggaagacttgggccgcttgcttcatacaagccgcttggagaagatacattaagaagaaactcgaagagtctcttaaagaagaagagaatcggttgcaggatgctttggctaaagaagcttgtggaagttccccaagcctcggtgctacaatatacgcatcacggtttgctgcaaatatcttgcgcacaatacgtaggagcggatcagtaaggaaaccaaggatgccggaacgaatgccacctatgctacttcagaaaccagcagagccagatttcaacagtgatgattaattaattagcatatatgtatatgaaagattttattgcgaaccatagagccaatatataaatataagtcttttt

SEQ ID NO: 90154 - protein, 716 aa, Arabidopsis thaliana
  peptide (1)..(716): Ceres Seq. ID no. 12722374
  misc_feature (135)..(403): Pfam Name: Ion transport protein Pfam Description: Ion transport protein
  misc_feature (1)..(716): Homolog of NCBI NO: 6969231 NR Description: cyclic nucleotide-gated calmodulin-binding ion
  misc_feature (152)..(716): Homolog of NCBI NO: 24943196 NR Description: cyclic nucleotide-gated channel C [Phaseolus
  misc_feature (4)..(716): Homolog of NCBI NO: 7489415 NR Description: probable calmodulin binding transport protein - >gi|3169012|emb|CAA05637.1| putative calmodulin binding
  misc_feature (5)..(714): Homolog of NCBI NO: 6969229 NR Description: cyclic nucleotide-gated calmodulin-binding ion
  misc_feature (1)..(713): Homolog of NCBI NO: 22328204 NR Description: cyclic nucleotide-regulated ion channel,
  misc_feature (61)..(715): Homolog of NCBI NO: 18378827 NR Description: cyclic nucleotide-regulated ion channel; protein
  misc_feature (64)..(713): Homolog of NCBI NO: 7484881 NR Description: cyclic nucleotide gated channel homolog F3I3.30 -
  misc_feature (1)..(716): Homolog of NCBI NO: 25408996 NR Description: hypothetical protein At2g46430 [imported] -
  misc_feature (1)..(716): Homolog of NCBI NO: 18407073 NR Description: cyclic nucleotide-regulated ion channel (CNGC3); id: At2g46430.1, supported by cDNA: gi_16648780, supported by
  misc_feature (1)..(716): Homolog of NCBI NO: 18400426 NR Description: cyclic nucleotide-regulated ion channel (CNGC6); id: At2g23980.1, supported by cDNA: gi_14532659 [Arabidopsis
MNFRQEKFVRFQDWKSDKTSSDVEYSGKNEIQTGIFQRTISSISDKFYRSFESSSARIKLFKRSYKSYSFKEAVSKGIGSTHKILDPQGPFLQRWNKIFVLACIIAVSLDPLFFYVPIIDDAKKCLGIDKKMEITASVLRSFTDVFYVLHIIFQFRTGFIAPSSRVFGRGVLVEDKREIAKRYLSSHFIIDILAVLPLPQMVILIIIPHMRGSSSLNTKNMLKFIVFFQYIPRFIRIYPLYKEVTRTSGILTETAWAGAAFNLFLYMLASHVFGAFWYLFSIERETVCWKQACERNNPPCISKLLYCDPETAGGNAFLNESCPIQTPNTTLFDFGIFLDALQSGVVESQDFPQKFFYCFWWGLQNLSSLGQNLKTSTYIWEICFAVFISIAGLVLFSFLIGNMQTYLQSTTTRLEEMRVKRRDAEQWMSHRLLPENLRKRIRRYEQYKWQETRGVDEENLLSNLPKDLRRDIKRHLCLALLMRVPMFEKMDEQLLDALCDRLQPVLYTEESYIVREGDPVDEMLFIMRGKLLTITTNGGRTGFLNSEYLGAGDFCGEELLTWALDPHSSSNLPISTRTVRALMEVEAFALKADDLKFVASQFRRLHSKQLRHTFRYYSQQWKTWAACFIQAAWRRYIKKKLEESLKEEENRLQDALAKEACGSSPSLGATIYASRFAANILRTIRRSGSVRKPRMPERMPPMLLQKPAEPDFNSDD

SEQ ID NO: 90155 - protein, 585 aa, Arabidopsis thaliana
  peptide (1)..(585): Ceres Seq. ID no. 12722375
  misc_feature (4)..(272): Pfam Name: Ion transport protein Pfam Description: Ion transport protein
  misc_feature (1)..(585): Homolog of NCBI NO: 6969231 NR Description: cyclic nucleotide-gated calmodulin-binding ion
  misc_feature (21)..(585): Homolog of NCBI NO: 24943196 NR Description: cyclic nucleotide-gated channel C [Phaseolus
  misc_feature (1)..(585): Homolog of NCBI NO: 7489415 NR Description: probable calmodulin binding transport protein - >gi|3169012|emb|CAA05637.1| putative calmodulin binding
  misc_feature (1)..(583): Homolog of NCBI NO: 6969229 NR Description: cyclic nucleotide-gated calmodulin-binding ion
  misc_feature (1)..(582): Homolog of NCBI NO: 22328204 NR Description: cyclic nucleotide-regulated ion channel,
  misc_feature (1)..(584): Homolog of NCBI NO: 18378827 NR Description: cyclic nucleotide-regulated ion channel; protein
  misc_feature (1)..(582): Homolog of NCBI NO: 7484881 NR Description: cyclic nucleotide gated channel homolog F3I3.30 -
  misc_feature (1)..(585): Homolog of NCBI NO: 25408996 NR Description: hypothetical protein At2g46430 [imported] -
  misc_feature (1)..(585): Homolog of NCBI NO: 18407073 NR Description: cyclic nucleotide-regulated ion channel (CNGC3); id: At2g46430.1, supported by cDNA: gi_16648780, supported by
  misc_feature (1)..(585): Homolog of NCBI NO: 18400426 NR Description: cyclic nucleotide-regulated ion channel (CNGC6); id: At2g23980.1, supported by cDNA: gi_14532659 [Arabidopsis
MEITASVLRSFTDVFYVLHIIFQFRTGFIAPSSRVFGRGVLVEDKREIAKRYLSSHFIIDILAVLPLPQMVILIIIPHMRGSSSLNTKNMLKFIVFFQYIPRFIRIYPLYKEVTRTSGILTETAWAGAAFNLFLYMLASHVFGAFWYLFSIERETVCWKQACERNNPPCISKLLYCDPETAGGNAFLNESCPIQTPNTTLFDFGIFLDALQSGVVESQDFPQKFFYCFWWGLQNLSSLGQNLKTSTYIWEICFAVFISIAGLVLFSFLIGNMQTYLQSTTTRLEEMRVKRRDAEQWMSHRLLPENLRKRIRRYEQYKWQETRGVDEENLLSNLPKDLRRDIKRHLCLALLMRVPMFEKMDEQLLDALCDRLQPVLYTEESYIVREGDPVDEMLFIMRGKLLTITTNGGRTGFLNSEYLGAGDFCGEELLTWALDPHSSSNLPISTRTVRALMEVEAFALKADDLKFVASQFRRLHSKQLRHTFRYYSQQWKTWAACFIQAAWRRYIKKKLEESLKEEENRLQDALAKEACGSSPSLGATIYASRFAANILRTIRRSGSVRKPRMPERMPPMLLQKPAEPDFNSDD

SEQ ID NO: 90156 - protein, 516 aa, Arabidopsis thaliana
  peptide (1)..(516): Ceres Seq. ID no. 12722376
  misc_feature (1)..(203): Pfam Name: Ion transport protein Pfam Description: Ion transport protein
  misc_feature (1)..(516): Homolog of NCBI NO: 6969231 NR Description: cyclic nucleotide-gated calmodulin-binding ion
  misc_feature (1)..(516): Homolog of NCBI NO: 24943196 NR Description: cyclic nucleotide-gated channel C [Phaseolus
  misc_feature (1)..(516): Homolog of NCBI NO: 7489415 NR Description: probable calmodulin binding transport protein - >gi|3169012|emb|CAA05637.1| putative calmodulin binding
  misc_feature (1)..(514): Homolog of NCBI NO: 6969229 NR Description: cyclic nucleotide-gated calmodulin-binding ion
  misc_feature (1)..(513): Homolog of NCBI NO: 22328204 NR Description: cyclic nucleotide-regulated ion channel,
  misc_feature (1)..(515): Homolog of NCBI NO: 18378827 NR Description: cyclic nucleotide-regulated ion channel; protein
  misc_feature (1)..(513): Homolog of NCBI NO: 7484881 NR Description: cyclic nucleotide gated channel homolog F3I3.30 -
  misc_feature (1)..(516): Homolog of NCBI NO: 25408996 NR Description: hypothetical protein At2g46430 [imported] -
  misc_feature (1)..(516): Homolog of NCBI NO: 18407073 NR Description: cyclic nucleotide-regulated ion channel (CNGC3); id: At2g46430.1, supported by cDNA: gi_16648780, supported by
  misc_feature (1)..(516): Homolog of NCBI NO: 18400426 NR Description: cyclic nucleotide-regulated ion channel (CNGC6); id: At2g23980.1, supported by cDNA: gi_14532659 [Arabidopsis
MVILIIIPHMRGSSSLNTKNMLKFIVFFQYIPRFIRIYPLYKEVTRTSGILTETAWAGAAFNLFLYMLASHVFGAFWYLFSIERETVCWKQACERNNPPCISKLLYCDPETAGGNAFLNESCPIQTPNTTLFDFGIFLDALQSGVVESQDFPQKFFYCFWWGLQNLSSLGQNLKTSTYIWEICFAVFISIAGLVLFSFLIGNMQTYLQSTTTRLEEMRVKRRDAEQWMSHRLLPENLRKRIRRYEQYKWQETRGVDEENLLSNLPKDLRRDIKRHLCLALLMRVPMFEKMDEQLLDALCDRLQPVLYTEESYIVREGDPVDEMLFIMRGKLLTITTNGGRTGFLNSEYLGAGDFCGEELLTWALDPHSSSNLPISTRTVRALMEVEAFALKADDLKFVASQFRRLHSKQLRHTFRYYSQQWKTWAACFIQAAWRRYIKKKLEESLKEEENRLQDALAKEACGSSPSLGATIYASRFAANILRTIRRSGSVRKPRMPERMPPMLLQKPAEPDFNSDD

SEQ ID NO: 90157 - DNA, 1951 bp, Arabidopsis thaliana
  misc_feature (1)..(1951): Ceres Seq. ID no. 12722399
  misc_feature: MA Experiment ID: 20000234 Result: Down-regulated in Transcription
  misc_feature: MA Experiment 20000234 PARAMETER Experiment Name: At_Siliques_P Parameter: Age (day) Value: 21
  misc_feature: MA Experiment 20000234 PARAMETER Experiment Name: At_Siliques_P Parameter: Organism Value: A. thaliana
  misc_feature: MA Experiment 20000234 PARAMETER Experiment Name: At_Siliques_P Parameter: Plant Line Value: WS
  misc_feature: MA Experiment 20000234 PARAMETER Experiment Name: At_Siliques_P Parameter: Tissue Value: Less Than 5mm Siliques vs. Whole Plant
  misc_feature: MA Experiment ID: 20000264 Result: Down-regulated in Transcription
  misc_feature: MA Experiment 20000264 PARAMETER Experiment Name: At_Open_Flower_P Parameter: Age (day) Value: 21
  misc_feature: MA Experiment 20000264 PARAMETER Experiment Name: At_Open_Flower_P Parameter: Plant Line Value: WS
  misc_feature: MA Experiment 20000264 PARAMETER Experiment Name: At_Open_Flower_P Parameter: Tissue Value: Open Flower vs. Whole Plant
  misc_feature: MA Experiment ID: 20000286 Result: Down-regulated in Transcription
  misc_feature: MA Experiment 20000286 PARAMETER Experiment Name: At_Open_Flower_P Parameter: Age (day) Value: 21
  misc_feature: MA Experiment 20000286 PARAMETER Experiment Name: At_Open_Flower_P Parameter: Plant Line Value: WS
  misc_feature: MA Experiment 20000286 PARAMETER Experiment Name: At_Open_Flower_P Parameter: Tissue Value: Half Open vs. Whole Plant
  misc_feature: MA Experiment ID: 20000439 Result: Down-regulated in Transcription
  misc_feature: MA Experiment 20000439 PARAMETER Experiment Name: At_Roots__P Parameter: Age (day) Value: 14 vs. 21
  misc_feature: MA Experiment 20000439 PARAMETER Experiment Name: At_Roots__P Parameter: Organism Value: A. thaliana
  misc_feature: MA Experiment 20000439 PARAMETER Experiment Name: At_Roots__P Parameter: Tissue Value: Roots vs. Whole Plant
  misc_feature: MA Experiment ID: 20000527 Result: Down-regulated in Transcription
  misc_feature: MA Experiment 20000527 PARAMETER Experiment Name: At_10percent_PEG_P Parameter: Age (day) Value: 20
  misc_feature: MA Experiment 20000527 PARAMETER Experiment Name: At_10percent_PEG_P Parameter: Organism Value: A. thaliana
  misc_feature: MA Experiment 20000527 PARAMETER Experiment Name: At_10percent_PEG_P Parameter: Plant Line Value: WS
  misc_feature: MA Experiment 20000527 PARAMETER Experiment Name: At_10percent_PEG_P Parameter: Timepoint (day) Value: 20
  misc_feature: MA Experiment 20000527 PARAMETER Experiment Name: At_10percent_PEG_P Parameter: Tissue Value: Whole Plant
  misc_feature: MA Experiment 20000527 PARAMETER Experiment Name: At_10percent_PEG_P Parameter: Treatment Value: 10percent PEG vs. No Treatment
  misc_feature: MA Experiment ID: 20001248 Result: Down-regulated in Transcription
  misc_feature: MA Experiment 20001248 PARAMETER Experiment Name: At_Far-red-induction_P Parameter: Age (day) Value: 7
  misc_feature: MA Experiment 20001248 PARAMETER Experiment Name: At_Far-red-induction_P Parameter: Light Value: Far-red vs. White
  misc_feature: MA Experiment 20001248 PARAMETER Experiment Name: At_Far-red-induction_P Parameter: Organism Value: A. thaliana
  misc_feature: MA Experiment 20001248 PARAMETER Experiment Name: At_Far-red-induction_P Parameter: Plant Line Value: Columbia
  misc_feature: MA Experiment 20001248 PARAMETER Experiment Name: At_Far-red-induction_P Parameter: Timepoint (hr) Value: 4
  misc_feature: MA Experiment 20001248 PARAMETER Experiment Name: At_Far-red-induction_P Parameter: Tissue Value: Whole Plant
  misc_feature: MA Experiment ID: 20001556 Result: Down-regulated in Transcription
  misc_feature: MA Experiment 20001556 PARAMETER Experiment Name: At_Drought_Soil_Dry_P Parameter: Age (day) Value: 26
  misc_feature: MA Experiment 20001556 PARAMETER Experiment Name: At_Drought_Soil_Dry_P Parameter: Organism Value: A. thaliana
  misc_feature: MA Experiment 20001556 PARAMETER Experiment Name: At_Drought_Soil_Dry_P Parameter: Plant Line Value: WS
  misc_feature: MA Experiment 20001556 PARAMETER Experiment Name: At_Drought_Soil_Dry_P Parameter: Post Timepoint (hr) Value: None
  misc_feature: MA Experiment 20001556 PARAMETER Experiment Name: At_Drought_Soil_Dry_P Parameter: Post-Treatment Value: None
  misc_feature: MA Experiment 20001556 PARAMETER Experiment Name: At_Drought_Soil_Dry_P Parameter: Timepoint (day) Value: 12
  misc_feature: MA Experiment 20001556 PARAMETER Experiment Name: At_Drought_Soil_Dry_P Parameter: Treatment Value: Drought vs. No Drought
  misc_feature: MA Experiment ID: 20001905 Result: Down-regulated in Transcription
  misc_feature: MA Experiment 20001905 PARAMETER Experiment Name: At_Drought_Reproduction_P Parameter: Age (day) Value: 40
  misc_feature: MA Experiment 20001905 PARAMETER Experiment Name: At_Drought_Reproduction_P Parameter: Organism Value: A. thaliana
  misc_feature: MA Experiment 20001905 PARAMETER Experiment Name: At_Drought_Reproduction_P Parameter: Plant Line Value: WS
  misc_feature: MA Experiment 20001905 PARAMETER Experiment Name: At_Drought_Reproduction_P Parameter: Timepoint (day) Value: 10
  misc_feature: MA Experiment 20001905 PARAMETER Experiment Name: At_Drought_Reproduction_P Parameter: Tissue Value: Rosettes
  misc_feature: MA Experiment 20001905 PARAMETER Experiment Name: At_Drought_Reproduction_P Parameter: Treatment Value: Drought vs. No Drought
  misc_feature: MA Experiment ID: 20001906 Result: Down-regulated in Transcription
  misc_feature: MA Experiment 20001906 PARAMETER Experiment Name: At_Drought_Reproduction_P Parameter: Age (day) Value: 35
  misc_feature: MA Experiment 20001906 PARAMETER Experiment Name: At_Drought_Reproduction_P Parameter: Organism Value: A. thaliana
  misc_feature: MA Experiment 20001906 PARAMETER Experiment Name: At_Drought_Reproduction_P Parameter: Plant Line Value: WS
  misc_feature: MA Experiment 20001906 PARAMETER Experiment Name: At_Drought_Reproduction_P Parameter: Timepoint (day) Value: 5
  misc_feature: MA Experiment 20001906 PARAMETER Experiment Name: At_Drought_Reproduction_P Parameter: Tissue Value: Siliques
  misc_feature: MA Experiment 20001906 PARAMETER Experiment Name: At_Drought_Reproduction_P Parameter: Treatment Value: Drought vs. No Drought
  misc_feature: MA Experiment ID: 20001908 Result: Down-regulated in Transcription
  misc_feature: MA Experiment 20001908 PARAMETER Experiment Name: At_Drought_Reproduction_P Parameter: Age (day) Value: 40
  misc_feature: MA Experiment 20001908 PARAMETER Experiment Name: At_Drought_Reproduction_P Parameter: Organism Value: A. thaliana
  misc_feature: MA Experiment 20001908 PARAMETER Experiment Name: At_Drought_Reproduction_P Parameter: Plant Line Value: WS
  misc_feature: MA Experiment 20001908 PARAMETER Experiment Name: At_Drought_Reproduction_P Parameter: Timepoint (day) Value: 10
  misc_feature: MA Experiment 20001908 PARAMETER Experiment Name: At_Drought_Reproduction_P Parameter: Tissue Value: Siliques
  misc_feature: MA Experiment 20001908 PARAMETER Experiment Name: At_Drought_Reproduction_P Parameter: Treatment Value: Drought vs. No Drought
gttcccttaacaaactctaaaccaaaaaaaaaaaaaaaaactatgggttacgacaggctcggtccatccggaccatcaaacccgaaccagaaggaccctgccacgtcactcccggaactacagaagaaaactaaaacgaagctgattctcttcactttggccgttttggtagttggagtagtctgcttcggtatctttgccggcatccgagccgtagactcgggtaaaaccgagccgaaactaacccgtaaaccgacccaagcaatctcccgaacctgtagcaaatccttatacccgaacctatgcatcgacacacttcttgactttccgggatctttaaccgccgacgagaacgagctcattcacatatcattcaacgcaacgcttcaaaaattcagcaaagctctttatacttcttcgacgatcacatacactcagatgcccccacgtgtacggtcagcttacgattcttgccttgagttacttgatgattcagtggacgcgctcacacgcgctctttcctccgtcgttgtcgtctccggagatgagtctcattccgatgtgatgacgtggcttagctctgcgatgactaaccacgacacttgcactgacggattcgatgaaattgaaggtcaaggaggagaagtgaaggatcaagtgatcggagcggttaaagatttgtcggagatggtgagtaattgtttggctatattcgccggaaaagttaaggatttatctggagttccggtggtgaataataggaagttacttgggactgaagaaacagaggaattacctaattggttgaagagagaagacagagagcttcttggtactccaacgtcggcgattcaagctgatatcacggtgtcgaaagacggtagcggaacgtttaagacgatcgcggaggcgatcaagaaagccccggagcatagtagccgacgattcgtcatctacgttaaagcaggaagatacgaagaagagaatctgaaagttggtaggaagaagacaaacttgatgttcatcggggacggcaagggtaaaacggtcataaccggtgggaaaagtatcgccgatgatctaactacttttcacaccgccactttcgctgcgactggtgctggatttatagtgagggacatgacgtttgagaattacgccggaccggctaagcatcaggccgtggcactccgtgttggtggagaccacgcggtggtttaccgttgcaacattatcggttaccaagacgcgctttacgtacattctaaccgacagtttttccgcgaatgcgaaatttatggaacggtcgattttatattcgggaatgcggctgtgatcttacagagttgtaacatttatgcgcgtaaaccaatggctcagcagaagattactattacggctcagaaccgaaaagatccgaatcagaatacggggatttcgattcatgcttgtaagctactagcaacaccggatcttgaagcctctaagggtagttatccgacgtatctcggccgtccgtggaagttgtattctagagttgtgtacatgatgtcggatatgggtgaccatattgacccgcgaggatggttggagtggaatggtccgtttgcattggactcgttgtactatggtgagtatatgaacaaagggttgggttcaggaattggtcaacgagtcaaatggcctggttatcatgttattacctcaacggtagaggctagtaagtttacggtggctcagttcatttctggttcttcgtggttgccatccaccggtgtgtccttcttctccgggttgtcacaatagattgtctcagccttgtatgttacgtatacgaatgattttatgtacaaactcaagatctgtaatatagtccataagccattttaagtgtacttattatatgacaggacatcttcttgaatgaaataaagatatgatttgaatatgt

SEQ ID NO: 90158 - protein, 601 aa, Arabidopsis thaliana
  peptide (1)..(601): Ceres Seq. ID no. 12722400
  misc_feature (287)..(585): Pfam Name: Pectinesterase Pfam Description: Pectinesterase
  misc_feature (15)..(600): Homolog of NCBI NO: 15229105 NR Description: pectinesterase - like protein; protein id: supported by cDNA: gi_16648928 [Arabidopsis thaliana]
  misc_feature (110)..(600): Homolog of NCBI NO: 34904380 NR Description: unnamed protein product [Oryza sativa (japonica group)] >gi|8467996|dbj|BAA96597.1| unnamed protein product
  misc_feature (43)..(599): Homolog of NCBI NO: 8671350 NR Description: pectin methylesterase [Nicotiana tabacum]
  misc_feature (43)..(599): Homolog of NCBI NO: 29602797 NR Description: pectin methyl-esterase [Nicotiana benthamiana]
  misc_feature (43)..(599): Homolog of NCBI NO: 6689892 NR Description: pectin methyl esterase [Solanum tuberosum]
  misc_feature (43)..(595): Homolog of NCBI NO: 15220955 NR Description: pectin methylesterase (PMEU1), putative; protein At1g53830.1, supported by cDNA: gi_13605622 [Arabidopsis >gi|17865767|sp|Q42534|PME2_ARATH Pectinesterase 2 precursor
  misc_feature (43)..(599): Homolog of NCBI NO: 2098711 NR Description: pectinesterase [Citrus sinensis]
  misc_feature (43)..(599): Homolog of NCBI NO: 6174912 NR Description: Pectinesterase 1.1 precursor (Pectin
  misc_feature (43)..(599): Homolog of NCBI NO: 6093740 NR Description: Pectinesterase U1 precursor (Pectin
  misc_feature (43)..(595): Homolog of NCBI NO: 2129667 NR Description: pectinesterase (EC 3.1.1.11) 2 precursor - thaliana (fragment) >gi|903894|gb|AAC50023.1| ATPME2 precursor
VPLTNSKPKKKKKTMGYDRLGPSGPSNPNQKDPATSLPELQKKTKTKLILFTLAVLVVGVVCFGIFAGIRAVDSGKTEPKLTRKPTQAISRTCSKSLYPNLCIDTLLDFPGSLTADENELIHISFNATLQKFSKALYTSSTITYTQMPPRVRSAYDSCLELLDDSVDALTRALSSVVVVSGDESHSDVMTWLSSAMTNHDTCTDGFDEIEGQGGEVKDQVIGAVKDLSEMVSNCLAIFAGKVKDLSGVPVVNNRKLLGTEETEELPNWLKREDRELLGTPTSAIQADITVSKDGSGTFKTIAEAIKKAPEHSSRRFVIYVKAGRYEEENLKVGRKKTNLMFIGDGKGKTVITGGKSIADDLTTFHTATFAATGAGFIVRDMTFENYAGPAKHQAVALRVGGDHAVVYRCNIIGYQDALYVHSNRQFFRECEIYGTVDFIFGNAAVILQSCNIYARKPMAQQKITITAQNRKDPNQNTGISIHACKLLATPDLEASKGSYPTYLGRPWKLYSRVVYMMSDMGDHIDPRGWLEWNGPFALDSLYYGEYMNKGLGSGIGQRVKWPGYHVITSTVEASKFTVAQFISGSSWLPSTGVSFFSGLSQ

SEQ ID NO: 90159 - protein, 587 aa, Arabidopsis thaliana
  peptide (1)..(587): Ceres Seq. ID no. 12722401
  misc_feature (273)..(571): Pfam Name: Pectinesterase Pfam Description: Pectinesterase
  misc_feature (1)..(586): Homolog of NCBI NO: 15229105 NR Description: pectinesterase - like protein; protein id: supported by cDNA: gi_16648928 [Arabidopsis thaliana]
  misc_feature (96)..(586): Homolog of NCBI NO: 34904380 NR Description: unnamed protein product [Oryza sativa (japonica group)] >gi|8467996|dbj|BAA96597.1| unnamed protein product
  misc_feature (29)..(585): Homolog of NCBI NO: 8671350 NR Description: pectin methylesterase [Nicotiana tabacum]
  misc_feature (29)..(585): Homolog of NCBI NO: 29602797 NR Description: pectin methyl-esterase [Nicotiana benthamiana]
  misc_feature (29)..(585): Homolog of NCBI NO: 6689892 NR Description: pectin methyl esterase [Solanum tuberosum]
  misc_feature (29)..(581): Homolog of NCBI NO: 15220955 NR Description: pectin methylesterase (PMEU1), putative; protein At1g53830.1, supported by cDNA: gi_13605622 [Arabidopsis >gi|17865767|sp|Q42534|PME2_ARATH Pectinesterase 2 precursor
  misc_feature (29)..(585): Homolog of NCBI NO: 2098711 NR Description: pectinesterase [Citrus sinensis]
  misc_feature (29)..(585): Homolog of NCBI NO: 6174912 NR Description: Pectinesterase 1.1 precursor (Pectin
  misc_feature (29)..(585): Homolog of NCBI NO: 6093740 NR Description: Pectinesterase U1 precursor (Pectin
  misc_feature (29)..(581): Homolog of NCBI NO: 2129667 NR Description: pectinesterase (EC 3.1.1.11) 2 precursor - thaliana (fragment) >gi|903894|gb|AAC50023.1| ATPME2 precursor
MGYDRLGPSGPSNPNQKDPATSLPELQKKTKTKLILFTLAVLVVGVVCFGIFAGIRAVDSGKTEPKLTRKPTQAISRTCSKSLYPNLCIDTLLDFPGSLTADENELIHISFNATLQKFSKALYTSSTITYTQMPPRVRSAYDSCLELLDDSVDALTRALSSVVVVSGDESHSDVMTWLSSAMTNHDTCTDGFDEIEGQGGEVKDQVIGAVKDLSEMVSNCLAIFAGKVKDLSGVPVVNNRKLLGTEETEELPNWLKREDRELLGTPTSAIQADITVSKDGSGTFKTIAEAIKKAPEHSSRRFVIYVKAGRYEEENLKVGRKKTNLMFIGDGKGKTVITGGKSIADDLTTFHTATFAATGAGFIVRDMTFENYAGPAKHQAVALRVGGDHAVVYRCNIIGYQDALYVHSNRQFFRECEIYGTVDFIFGNAAVILQSCNIYARKPMAQQKITITAQNRKDPNQNTGISIHACKLLATPDLEASKGSYPTYLGRPWKLYSRVVYMMSDMGDHIDPRGWLEWNGPFALDSLYYGEYMNKGLGSGIGQRVKWPGYHVITSTVEASKFTVAQFISGSSWLPSTGVSFFSGLSQ

SEQ ID NO: 90160 - protein, 455 aa, Arabidopsis thaliana
  peptide (1)..(455): Ceres Seq. ID no. 12722402
  misc_feature (141)..(439): Pfam Name: Pectinesterase Pfam Description: Pectinesterase
  misc_feature (1)..(454): Homolog of NCBI NO: 15229105 NR Description: pectinesterase - like protein; protein id: supported by cDNA: gi_16648928 [Arabidopsis thaliana]
  misc_feature (1)..(454): Homolog of NCBI NO: 34904380 NR Description: unnamed protein product [Oryza sativa (japonica group)] >gi|8467996|dbj|BAA96597.1| unnamed protein product
  misc_feature (1)..(453): Homolog of NCBI NO: 8671350 NR Description: pectin methylesterase [Nicotiana tabacum]
  misc_feature (1)..(453): Homolog of NCBI NO: 29602797 NR Description: pectin methyl-esterase [Nicotiana benthamiana]
  misc_feature (1)..(453): Homolog of NCBI NO: 6689892 NR Description: pectin methyl esterase [Solanum tuberosum]
  misc_feature (1)..(449): Homolog of NCBI NO: 15220955 NR Description: pectin methylesterase (PMEU1), putative; protein At1g53830.1, supported by cDNA: gi_13605622 [Arabidopsis >gi|17865767|sp|Q42534|PME2_ARATH Pectinesterase 2 precursor
  misc_feature (1)..(453): Homolog of NCBI NO: 2098711 NR Description: pectinesterase [Citrus sinensis]
  misc_feature (1)..(453): Homolog of NCBI NO: 6174912 NR Description: Pectinesterase 1.1 precursor (Pectin
  misc_feature (1)..(453): Homolog of NCBI NO: 6093740 NR Description: Pectinesterase U1 precursor (Pectin
  misc_feature (1)..(449): Homolog of NCBI NO: 2129667 NR Description: pectinesterase (EC 3.1.1.11) 2 precursor - thaliana (fragment) >gi|903894|gb|AAC50023.1| ATPME2 precursor
MPPRVRSAYDSCLELLDDSVDALTRALSSVVVVSGDESHSDVMTWLSSAMTNHDTCTDGFDEIEGQGGEVKDQVIGAVKDLSEMVSNCLAIFAGKVKDLSGVPVVNNRKLLGTEETEELPNWLKREDRELLGTPTSAIQADITVSKDGSGTFKTIAEAIKKAPEHSSRRFVIYVKAGRYEEENLKVGRKKTNLMFIGDGKGKTVITGGKSIADDLTTFHTATFAATGAGFIVRDMTFENYAGPAKHQAVALRVGGDHAVVYRCNIIGYQDALYVHSNRQFFRECEIYGTVDFIFGNAAVILQSCNIYARKPMAQQKITITAQNRKDPNQNTGISIHACKLLATPDLEASKGSYPTYLGRPWKLYSRVVYMMSDMGDHIDPRGWLEWNGPFALDSLYYGEYMNKGLGSGIGQRVKWPGYHVITSTVEASKFTVAQFISGSSWLPSTGVSFFSGLSQ

SEQ ID NO: 90161 - DNA, 1357 bp, Arabidopsis thaliana
  misc_feature (1)..(1357): Ceres Seq. ID no. 12722652
  misc_feature: MA Experiment ID: 108573 Result: Up-regulated in Transcription
  misc_feature: MA Experiment 108573 PARAMETER Experiment Name: At_Drought_cDNA_P Parameter: Timepoint (hr) Value: 6
  misc_feature: MA Experiment 108573 PARAMETER Experiment Name: At_Drought_cDNA_P Parameter: Tissue Value: Aerial
  misc_feature: MA Experiment 108573 PARAMETER Experiment Name: At_Drought_cDNA_P Parameter: Treatment Value: Drought vs. No Drought
  misc_feature: MA Experiment ID: 108576 Result: Up-regulated in Transcription
  misc_feature: MA Experiment 108576 PARAMETER Experiment Name: At_42deg_Heat_cDNA_P Parameter: Temperature (deg C) Value: 42 vs. 22
  misc_feature: MA Experiment 108576 PARAMETER Experiment Name: At_42deg_Heat_cDNA_P Parameter: Timepoint (hr) Value: 1
  misc_feature: MA Experiment 108576 PARAMETER Experiment Name: At_42deg_Heat_cDNA_P Parameter: Tissue Value: Aerial
  misc_feature: MA Experiment ID: 108577 Result: Up-regulated in Transcription
  misc_feature: MA Experiment 108577 PARAMETER Experiment Name: At_42deg_Heat_cDNA_P Parameter: Temperature (deg C) Value: 42 vs. 22
  misc_feature: MA Experiment 108577 PARAMETER Experiment Name: At_42deg_Heat_cDNA_P Parameter: Timepoint (hr) Value: 6
  misc_feature: MA Experiment 108577 PARAMETER Experiment Name: At_42deg_Heat_cDNA_P Parameter: Tissue Value: Aerial
  misc_feature: MA Experiment ID: 108579 Result: Down-regulated in Transcription
  misc_feature: MA Experiment 108579 PARAMETER Experiment Name: At_4deg_Cold_cDNA_P Parameter: Temperature (deg C) Value: 4 vs. 22
  misc_feature: MA Experiment 108579 PARAMETER Experiment Name: At_4deg_Cold_cDNA_P Parameter: Timepoint (hr) Value: 6
  misc_feature: MA Experiment 108579 PARAMETER Experiment Name: At_4deg_Cold_cDNA_P Parameter: Tissue Value: Aerial
  misc_feature: MA Experiment ID: 20000093 Result: Up-regulated in Transcription
  misc_feature: MA Experiment 20000093 PARAMETER Experiment Name: At_42deg_Heat_cDNA_P Parameter: Temperature (deg C) Value: 42 vs. 22
  misc_feature: MA Experiment 20000093 PARAMETER Experiment Name: At_42deg_Heat_cDNA_P Parameter: Timepoint (hr) Value: 0.5
  misc_feature: MA Experiment 20000093 PARAMETER Experiment Name: At_42deg_Heat_cDNA_P Parameter: Tissue Value: Aerial
  misc_feature: MA Experiment ID: 20000112 Result: Up-regulated in Transcription
  misc_feature: MA Experiment 20000112 PARAMETER Experiment Name: At_42deg_Heat_cDNA_P Parameter: Temperature (deg C) Value: 42 vs. 22
  misc_feature: MA Experiment 20000112 PARAMETER Experiment Name: At_42deg_Heat_cDNA_P Parameter: Timepoint (hr) Value: 2
  misc_feature: MA Experiment 20000112 PARAMETER Experiment Name: At_42deg_Heat_cDNA_P Parameter: Tissue Value: Aerial
  misc_feature: MA Experiment ID: 20000171 Result: Up-regulated in Transcription
  misc_feature: MA Experiment 20000171 PARAMETER Experiment Name: At_42deg_Heat_P Parameter: Age (day) Value: 14
  misc_feature: MA Experiment 20000171 PARAMETER Experiment Name: At_42deg_Heat_P Parameter: Organism Value: A. thaliana
  misc_feature: MA Experiment 20000171 PARAMETER Experiment Name: At_42deg_Heat_P Parameter: Plant Line Value: WS
  misc_feature: MA Experiment 20000171 PARAMETER Experiment Name: At_42deg_Heat_P Parameter: Temperature (deg C) Value: 42 vs. 22
  misc_feature: MA Experiment 20000171 PARAMETER Experiment Name: At_42deg_Heat_P Parameter: Timepoint (hr) Value: 1
  misc_feature: MA Experiment 20000171 PARAMETER Experiment Name: At_42deg_Heat_P Parameter: Tissue Value: Aerial
  misc_feature: MA Experiment ID: 20000173 Result: Up-regulated in Transcription
  misc_feature: MA Experiment 20000173 PARAMETER Experiment Name: At_42deg_Heat_P Parameter: Age (day) Value: 14
  misc_feature: MA Experiment 20000173 PARAMETER Experiment Name: At_42deg_Heat_P Parameter: Organism Value: A. thaliana
  misc_feature: MA Experiment 20000173 PARAMETER Experiment Name: At_42deg_Heat_P Parameter: Plant Line Value: WS
  misc_feature: MA Experiment 20000173 PARAMETER Experiment Name: At_42deg_Heat_P Parameter: Temperature (deg C) Value: 42 vs. 22
  misc_feature: MA Experiment 20000173 PARAMETER Experiment Name: At_42deg_Heat_P Parameter: Timepoint (hr) Value: 6
  misc_feature: MA Experiment 20000173 PARAMETER Experiment Name: At_42deg_Heat_P Parameter: Tissue Value: Aerial
  misc_feature: MA Experiment ID: 20000234 Result: Down-regulated in Transcription
  misc_feature: MA Experiment 20000234 PARAMETER Experiment Name: At_Siliques_P Parameter: Age (day) Value: 21
  misc_feature: MA Experiment 20000234 PARAMETER Experiment Name: At_Siliques_P Parameter: Organism Value: A. thaliana
  misc_feature: MA Experiment 20000234 PARAMETER Experiment Name: At_Siliques_P Parameter: Plant Line Value: WS
  misc_feature: MA Experiment 20000234 PARAMETER Experiment Name: At_Siliques_P Parameter: Tissue Value: Less Than 5mm Siliques vs. Whole Plant
  misc_feature: MA Experiment ID: 20000235 Result: Down-regulated in Transcription
  misc_feature: MA Experiment 20000235 PARAMETER Experiment Name: At_Siliques_P Parameter: Age (day) Value: 21
  misc_feature: MA Experiment 20000235 PARAMETER Experiment Name: At_Siliques_P Parameter: Organism Value: A. thaliana
  misc_feature: MA Experiment 20000235 PARAMETER Experiment Name: At_Siliques_P Parameter: Plant Line Value: WS
  misc_feature: MA Experiment 20000235 PARAMETER Experiment Name: At_Siliques_P Parameter: Tissue Value: 5-10mm Siliques vs. Whole Plant
  misc_feature: MA Experiment ID: 20000264 Result: Down-regulated in Transcription
  misc_feature: MA Experiment 20000264 PARAMETER Experiment Name: At_Open_Flower_P Parameter: Age (day) Value: 21
  misc_feature: MA Experiment 20000264 PARAMETER Experiment Name: At_Open_Flower_P Parameter: Plant Line Value: WS
  misc_feature: MA Experiment 20000264 PARAMETER Experiment Name: At_Open_Flower_P Parameter: Tissue Value: Open Flower vs. Whole Plant
  misc_feature: MA Experiment ID: 20000265 Result: Down-regulated in Transcription
  misc_feature: MA Experiment 20000265 PARAMETER Experiment Name: At_Open_Flower_P Parameter: Age (day) Value: 21
  misc_feature: MA Experiment 20000265 PARAMETER Experiment Name: At_Open_Flower_P Parameter: Plant Line Value: WS
  misc_feature: MA Experiment 20000265 PARAMETER Experiment Name: At_Open_Flower_P Parameter: Tissue Value: Closed Flower vs. Whole Plant
  misc_feature: MA Experiment ID: 20000286 Result: Down-regulated in Transcription
  misc_feature: MA Experiment 20000286 PARAMETER Experiment Name: At_Open_Flower_P Parameter: Age (day) Value: 21
  misc_feature: MA Experiment 20000286 PARAMETER Experiment Name: At_Open_Flower_P Parameter: Plant Line Value: WS
  misc_feature: MA Experiment 20000286 PARAMETER Experiment Name: At_Open_Flower_P Parameter: Tissue Value: Half Open vs. Whole Plant
  misc_feature: MA Experiment ID: 20001450 Result: Up-regulated in Transcription
  misc_feature: MA Experiment 20001450 PARAMETER Experiment Name: At_Far-red-induction_P Parameter: Age (day) Value: 7
  misc_feature: MA Experiment 20001450 PARAMETER Experiment Name: At_Far-red-induction_P Parameter: Light Value: Far-red vs. White
  misc_feature: MA Experiment 20001450 PARAMETER Experiment Name: At_Far-red-induction_P Parameter: Organism Value: A. thaliana
  misc_feature: MA Experiment 20001450 PARAMETER Experiment Name: At_Far-red-induction_P Parameter: Plant Line Value: Columbia
  misc_feature: MA Experiment 20001450 PARAMETER Experiment Name: At_Far-red-induction_P Parameter: Timepoint (hr) Value: 8
  misc_feature: MA Experiment 20001450 PARAMETER Experiment Name: At_Far-red-induction_P Parameter: Tissue Value: Whole Plant
  misc_feature: MA Experiment ID: 20001557 Result: Down-regulated in Transcription
  misc_feature: MA Experiment 20001557 PARAMETER Experiment Name: At_Drought_Soil_Dry_P Parameter: Age (day) Value: 27
  misc_feature: MA Experiment 20001557 PARAMETER Experiment Name: At_Drought_Soil_Dry_P Parameter: Organism Value: A. thaliana
  misc_feature: MA Experiment 20001557 PARAMETER Experiment Name: At_Drought_Soil_Dry_P Parameter: Plant Line Value: WS
  misc_feature: MA Experiment 20001557 PARAMETER Experiment Name: At_Drought_Soil_Dry_P Parameter: Post Timepoint (hr) Value: 3
  misc_feature: MA Experiment 20001557 PARAMETER Experiment Name: At_Drought_Soil_Dry_P Parameter: Post-Treatment Value: Re-Water vs. No Drought
  misc_feature: MA Experiment 20001557 PARAMETER Experiment Name: At_Drought_Soil_Dry_P Parameter: Timepoint (day) Value: 13
  misc_feature: MA Experiment 20001557 PARAMETER Experiment Name: At_Drought_Soil_Dry_P Parameter: Treatment Value: Drought vs. No Drought
  misc_feature: MA Experiment ID: 20001558 Result: Down-regulated in Transcription
  misc_feature: MA Experiment 20001558 PARAMETER Experiment Name: At_Drought_Soil_Dry_P Parameter: Age (day) Value: 27
  misc_feature: MA Experiment 20001558 PARAMETER Experiment Name: At_Drought_Soil_Dry_P Parameter: Organism Value: A. thaliana
  misc_feature: MA Experiment 20001558 PARAMETER Experiment Name: At_Drought_Soil_Dry_P Parameter: Plant Line Value: WS
  misc_feature: MA Experiment 20001558 PARAMETER Experiment Name: At_Drought_Soil_Dry_P Parameter: Post Timepoint (hr) Value: 6
  misc_feature: MA Experiment 20001558 PARAMETER Experiment Name: At_Drought_Soil_Dry_P Parameter: Post-Treatment Value: Re-Water vs. No Drought
  misc_feature: MA Experiment 20001558 PARAMETER Experiment Name: At_Drought_Soil_Dry_P Parameter: Timepoint (day) Value: 13
  misc_feature: MA Experiment 20001558 PARAMETER Experiment Name: At_Drought_Soil_Dry_P Parameter: Treatment Value: Drought vs. No Drought
  misc_feature: MA Experiment ID: 20001560 Result: Down-regulated in Transcription
  misc_feature: MA Experiment 20001560 PARAMETER Experiment Name: At_Drought_Soil_Dry_P Parameter: Age (day) Value: 28
  misc_feature: MA Experiment 20001560 PARAMETER Experiment Name: At_Drought_Soil_Dry_P Parameter: Organism Value: A. thaliana
  misc_feature: MA Experiment 20001560 PARAMETER Experiment Name: At_Drought_Soil_Dry_P Parameter: Plant Line Value: WS
  misc_feature: MA Experiment 20001560 PARAMETER Experiment Name: At_Drought_Soil_Dry_P Parameter: Post Timepoint (hr) Value: None
  misc_feature: MA Experiment 20001560 PARAMETER Experiment Name: At_Drought_Soil_Dry_P Parameter: Post-Treatment Value: None
  misc_feature: MA Experiment 20001560 PARAMETER Experiment Name: At_Drought_Soil_Dry_P Parameter: Timepoint (day) Value: 14
  misc_feature: MA Experiment 20001560 PARAMETER Experiment Name: At_Drought_Soil_Dry_P Parameter: Treatment Value: Drought vs. No Drought
  misc_feature: MA Experiment ID: 20001911 Result: Up-regulated in Transcription
  misc_feature: MA Experiment 20001911 PARAMETER Experiment Name: At_Drought_Reproduction_P Parameter: Age (day) Value: 40
  misc_feature: MA Experiment 20001911 PARAMETER Experiment Name: At_Drought_Reproduction_P Parameter: Organism Value: A. thaliana
  misc_feature: MA Experiment 20001911 PARAMETER Experiment Name: At_Drought_Reproduction_P Parameter: Plant Line Value: WS
  misc_feature: MA Experiment 20001911 PARAMETER Experiment Name: At_Drought_Reproduction_P Parameter: Timepoint (day) Value: 10
  misc_feature: MA Experiment 20001911 PARAMETER Experiment Name: At_Drought_Reproduction_P Parameter: Tissue Value: Flowers
  misc_feature: MA Experiment 20001911 PARAMETER Experiment Name: At_Drought_Reproduction_P Parameter: Treatment Value: Drought vs. No Drought
cattattacaccaccgttggcctccgacgacggctcaagcctatcttcgtcgccggcttctccgatggttaccaatcgcgtagacgtcttctggcacgaaggaatgctccgacacgacgccgtagaaggcgtcttcgacactggatacgaccctggattcctcgacgtattggagaagcacccggagaacgccgatcgcgtcaggaacatgctttcgattctccgacgcggtcccatcgctcctcatgtcaattggtttaccggtcttccagcaatcgtttcggagcttctaatgtttcacacttcagagtacattgagaagctagtggaggcagataaatcaggagaaaggtgtgaaattgccgcaggtactttcatgagcccaggctcgtgggaagctgctcttcttgcagctggaacaactctttcagcaatgcaacatattcttgattgccatgggaaaattgcatatgctctggtacgcccaccaggtcaccactcacagcctactcaggctgatgggtattgcttcctcaacaacgctgctcttgctgtcaagctggcattgaattcgggttcttgttcccgagttgcggttattgacatcgatgtacattatggaaatggcacagctgaagggttttatacatctgataaggttcttacggtgtcactccatatgaaccatggatcatggggatcgtcccacccgcagaaagggtcgattgatgaacttggtgaagacgtgggattgggttacaatctgaatgtccctttaccgaatggcacgggtgaccggggatatgaatatgccatgaatgagctggtggttcctgcagttagaaggtttggacccgatatggttgttctcgttgttggtcaagactctagcgcttttgatccaaacgggagacaaagcctgacaatgaatggatacagaaggattgggcagataatgaggggagttgcagaggagcacagccatggaaggttgcttatggtgcaagaaggcgggtatcatgtaacatatgcagcttactgcctccacgccatgctcgaaggggtgctgaagattccagaaccgcatctatctgatccgatcgcttattatcccgaagaagaagctaatgctgttgctgctgtggagtcaatcaaaacatatcacaccgaatttgttccatttctcagaggaacttgaaaatgggacgtatgaatgagtttatgttattcctcgttgtcttgtgaccttttggaacacagatccaaatcaatcaggtcaaaccgtatatatcaaaatacttgttgatcaaactatcttttgtatgaaaacttattcacacgatccgactttgttttt

SEQ ID NO: 90162 - protein, 398 aa, Arabidopsis thaliana; identical to SEQ ID NO: 22998
  peptide (1)..(398): Ceres Seq. ID no. 12722653
  misc_feature (22)..(398): Homolog of NCBI NO: 18390898 NR Description: expressed protein; protein id: At1g08460.1, by cDNA: gi_15294161, supported by cDNA: gi_20453296 [Arabidopsis >gi|15294162|gb|AAK95258.1|AF410272_1 At1g08460/T27G7_7
  misc_feature (22)..(298): Homolog of NCBI NO: 25407044 NR Description: protein T27G7.14 [imported] - Arabidopsis >gi|6664310|gb|AAF22892.1|AC006932_9 T27G7.14 [Arabidopsis
  misc_feature (299)..(398): Homolog of NCBI NO: 25407044 NR Description: protein T27G7.14 [imported] - Arabidopsis >gi|6664310|gb|AAF22892.1|AC006932_9 T27G7.14 [Arabidopsis
  misc_feature (70)..(398): Homolog of NCBI NO: 16226923 NR Description: At1g08460/T27G7_7 [Arabidopsis thaliana]
  misc_feature (60)..(377): Homolog of NCBI NO: 15598969 NR Description: probable acetylpolyamine aminohydrolase aeruginosa PA01] >gi|11350855|pir||D83174 probable
  misc_feature (60)..(377): Homolog of NCBI NO: 32038919 NR Description: hypothetical protein [Pseudomonas aeruginosa
  misc_feature (4)..(367): Homolog of NCBI NO: 22959308 NR Description: hypothetical protein [Rhodobacter sphaeroides]
  misc_feature (30)..(367): Homolog of NCBI NO: 37526255 NR Description: hypothetical protein [Photorhabdus luminescens laumondii TTO1] >gi|36785685|emb|CAE14646.1| unnamed protein
  misc_feature (60)..(391): Homolog of NCBI NO: 11497747 NR Description: acetylpolyamine aminohydrolase (aphA) fulgidus] >gi|3024859|sp|O30107|Y130_ARCFU Hypothetical protein >gi|7430157|pir||B69266 acetylpolyamine aminohydrolase (aphA)
  misc_feature (58)..(398): Homolog of NCBI NO: 18401915 NR Description: histone deacetylase, putative; protein id:

SEQ ID NO: 90163 - protein, 377 aa, Arabidopsis thaliana; identical to SEQ ID NO: 22999
  peptide (1)..(377): Ceres Seq. ID no. 12722654
  misc_feature (1)..(377): Homolog of NCBI NO: 18390898 NR Description: expressed protein; protein id: At1g08460.1, by cDNA: gi_15294161, supported by cDNA: gi_20453296 [Arabidopsis >gi|15294162|gb|AAK95258.1|AF410272_1 At1g08460/T27G7_7
  misc_feature (1)..(277): Homolog of NCBI NO: 25407044 NR Description: protein T27G7.14 [imported] - Arabidopsis >gi|6664310|gb|AAF22892.1|AC006932_9 T27G7.14 [Arabidopsis
  misc_feature (278)..(377): Homolog of NCBI NO: 25407044 NR Description: protein T27G7.14 [imported] - Arabidopsis >gi|6664310|gb|AAF22892.1|AC006932_9 T27G7.14 [Arabidopsis
  misc_feature (49)..(377): Homolog of NCBI NO: 16226923 NR Description: At1g08460/T27G7_7 [Arabidopsis thaliana]
  misc_feature (39)..(356): Homolog of NCBI NO: 15598969 NR Description: probable acetylpolyamine aminohydrolase aeruginosa PA01] >gi|11350855|pir||D83174 probable
  misc_feature (39)..(356): Homolog of NCBI NO: 32038919 NR Description: hypothetical protein [Pseudomonas aeruginosa
  misc_feature (1)..(346): Homolog of NCBI NO: 22959308 NR Description: hypothetical protein [Rhodobacter sphaeroides]
  misc_feature (9)..(346): Homolog of NCBI NO: 37526255 NR Description: hypothetical protein [Photorhabdus luminescens laumondii TTO1] >gi|36785685|emb|CAE14646.1| unnamed protein
  misc_feature (39)..(370): Homolog of NCBI NO: 11497747 NR Description: acetylpolyamine aminohydrolase (aphA) fulgidus] >gi|3024859|sp|O30107|Y130_ARCFU Hypothetical protein >gi|7430157|pir||B69266 acetylpolyamine aminohydrolase (aphA)
  misc_feature (37)..(377): Homolog of NCBI NO: 18401915 NR Description: histone deacetylase, putative; protein id:

SEQ ID NO: 90164 - protein, 364 aa, Arabidopsis thaliana; identical to SEQ ID NO: 23000
  peptide (1)..(364): Ceres Seq. ID no. 12722655
  misc_feature (1)..(364): Homolog of NCBI NO: 18390898 NR Description: expressed protein; protein id: At1g08460.1, by cDNA: gi_15294161, supported by cDNA: gi_20453296 [Arabidopsis >gi|15294162|gb|AAK95258.1|AF410272_1 At1g08460/T27G7_7
  misc_feature (1)..(264): Homolog of NCBI NO: 25407044 NR Description: protein T27G7.14 [imported] - Arabidopsis >gi|6664310|gb|AAF22892.1|AC006932_9 T27G7.14 [Arabidopsis
  misc_feature (265)..(364): Homolog of NCBI NO: 25407044 NR Description: protein T27G7.14 [imported] - Arabidopsis >gi|6664310|gb|AAF22892.1|AC006932_9 T27G7.14 [Arabidopsis
  misc_feature (36)..(364): Homolog of NCBI NO: 16226923 NR Description: At1g08460/T27G7_7 [Arabidopsis thaliana]
  misc_feature (26)..(343): Homolog of NCBI NO: 15598969 NR Description: probable acetylpolyamine aminohydrolase aeruginosa PA01] >gi|11350855|pir||D83174 probable
  misc_feature (26)..(343): Homolog of NCBI NO: 32038919 NR Description: hypothetical protein [Pseudomonas aeruginosa
  misc_feature (1)..(333): Homolog of NCBI NO: 22959308 NR Description: hypothetical protein [Rhodobacter sphaeroides]
  misc_feature (1)..(333): Homolog of NCBI NO: 37526255 NR Description: hypothetical protein [Photorhabdus luminescens laumondii TTO1] >gi|36785685|emb|CAE14646.1| unnamed protein
  misc_feature (26)..(357): Homolog of NCBI NO: 11497747 NR Description: acetylpolyamine aminohydrolase (aphA) fulgidus] >gi|3024859|sp|O30107|Y130_ARCFU Hypothetical protein >gi|7430157|pir||B69266 acetylpolyamine aminohydrolase (aphA)
  misc_feature (24)..(364): Homolog of NCBI NO: 18401915 NR Description: histone deacetylase, putative; protein id:

SEQ ID NO: 90165 - DNA, 1156 bp, Arabidopsis thaliana
  misc_feature (1)..(1156): Ceres Seq. ID no. 12722660
  misc_feature: MA Experiment ID: 20000185 Result: Down-regulated in Transcription
  misc_feature: MA Experiment 20000185 PARAMETER Experiment Name: At_Roots__P Parameter: Age (day) Value: 7 vs. 21
  misc_feature: MA Experiment 20000185 PARAMETER Experiment Name: At_Roots__P Parameter: Organism Value: A. thaliana
  misc_feature: MA Experiment 20000185 PARAMETER Experiment Name: At_Roots__P Parameter: Tissue Value: Roots vs. Whole Plant
  misc_feature: MA Experiment ID: 20000234 Result: Up-regulated in Transcription
  misc_feature: MA Experiment 20000234 PARAMETER Experiment Name: At_Siliques_P Parameter: Age (day) Value: 21
  misc_feature: MA Experiment 20000234 PARAMETER Experiment Name: At_Siliques_P Parameter: Organism Value: A. thaliana
  misc_feature: MA Experiment 20000234 PARAMETER Experiment Name: At_Siliques_P Parameter: Plant Line Value: WS
  misc_feature: MA Experiment 20000234 PARAMETER Experiment Name: At_Siliques_P Parameter: Tissue Value: Less Than 5mm Siliques vs. Whole Plant
  misc_feature: MA Experiment ID: 20000235 Result: Up-regulated in Transcription
  misc_feature: MA Experiment 20000235 PARAMETER Experiment Name: At_Siliques_P Parameter: Age (day) Value: 21
  misc_feature: MA Experiment 20000235 PARAMETER Experiment Name: At_Siliques_P Parameter: Organism Value: A. thaliana
  misc_feature: MA Experiment 20000235 PARAMETER Experiment Name: At_Siliques_P Parameter: Plant Line Value: WS
  misc_feature: MA Experiment 20000235 PARAMETER Experiment Name: At_Siliques_P Parameter: Tissue Value: 5-10mm Siliques vs. Whole Plant
  misc_feature: MA Experiment ID: 20000264 Result: Up-regulated in Transcription
  misc_feature: MA Experiment 20000264 PARAMETER Experiment Name: At_Open_Flower_P Parameter: Age (day) Value: 21
  misc_feature: MA Experiment 20000264 PARAMETER Experiment Name: At_Open_Flower_P Parameter: Plant Line Value: WS
  misc_feature: MA Experiment 20000264 PARAMETER Experiment Name: At_Open_Flower_P Parameter: Tissue Value: Open Flower vs. Whole Plant
  misc_feature: MA Experiment ID: 20000265 Result: Up-regulated in Transcription
  misc_feature: MA Experiment 20000265 PARAMETER Experiment Name: At_Open_Flower_P Parameter: Age (day) Value: 21
  misc_feature: MA Experiment 20000265 PARAMETER Experiment Name: At_Open_Flower_P Parameter: Plant Line Value: WS
  misc_feature: MA Experiment 20000265 PARAMETER Experiment Name: At_Open_Flower_P Parameter: Tissue Value: Closed Flower vs. Whole Plant
  misc_feature: MA Experiment ID: 20000439 Result: Down-regulated in Transcription
  misc_feature: MA Experiment 20000439 PARAMETER Experiment Name: At_Roots__P Parameter: Age (day) Value: 14 vs. 21
  misc_feature: MA Experiment 20000439 PARAMETER Experiment Name: At_Roots__P Parameter: Organism Value: A. thaliana
  misc_feature: MA Experiment 20000439 PARAMETER Experiment Name: At_Roots__P Parameter: Tissue Value: Roots vs. Whole Plant
  misc_feature: MA Experiment ID: 20000794 Result: Up-regulated in Transcription
  misc_feature: MA Experiment 20000794 PARAMETER Experiment Name: At_Petals_P Parameter: Age (day) Value: 23-25 days
  misc_feature: MA Experiment 20000794 PARAMETER Experiment Name: At_Petals_P Parameter: Plant Line Value: WS
  misc_feature: MA Experiment 20000794 PARAMETER Experiment Name: At_Petals_P Parameter: Tissue Value: Petals vs. Whole plant
aaataaaccacattagtcttttcagattttttgtacacttccttcatcccccacccatctctctctctctctctcatccttcctctttcttctttgcttgcccttttctttttattttattcttccaaaatcaaatagttccttctttgatctcattgggataactaaaagtttcaagaagagaaacatatcattgaagagagaacccacacaaaaaaaaatgtctgtagatttctcatctgagcgtgtttgctatgtccactgcagcttctgcaccacgattttagcggtaagtgtaccatacgcaagtttgttcacacttgtgacggtgagatgtggccattgtaccaatttgctatccctcaacattggagtttcacttcatcaaacctcagctcctcccattcaccaagatcttcagcctcatagacagcacacaacctctctggtgacaaggaaagattgtgcatcgtcttctaggagcaccaacaattttatcggaaaacattgatcgtgaggctcctagaatgcctcctattcgcccaccggagaaaagacaacgtgttccttcggccctacaacagatttcatcaaggaggaaatccaaaggattaagggcttgcaatccagagattagccaccgtgaggcattttagcactgctgctaaaaaattgggcacattttcctcacattcactttggattaaagctggatggcaacaagaaaggcaagcaattagaccagtcagttgcaggccaaaagtctaatggctattactaaagcctttatatatatacacacatatatacacttatacgtatatatatgtgtatagatatatatgcgtgtgtatgatttatgtttatctttgtacgtacgcattaatgaatgtgtaagcagagagctgatgatggaaagagatcaggcgaggaagaagaagatcatataacgttacatatatatacatgtatgtatatatgttcctttcttttttcttgcgtgtgcttcatctataacttcatttctagttttattctcctaataagtgaagtctataaatttgaacctaaaatgtttaggaagaatcttctttctgaagattgtaatataaatttcaactttactcattctgaaaaggtgtggtcacgactttat

SEQ ID NO: 90166 - protein, 96 aa, Arabidopsis thaliana
  peptide (1)..(96): Ceres Seq. ID no. 12722661
  misc_feature (1)..(79): Pfam Name: YABBY protein Pfam Description: YABBY protein
  misc_feature (1)..(79): Homolog of NCBI NO: 6664311 NR Description: T27G7.15 [Arabidopsis thaliana]
  misc_feature (1)..(96): Homolog of NCBI NO: 4928751 NR Description: YABBY2 [Arabidopsis thaliana]
  misc_feature (6)..(52): Homolog of NCBI NO: 18411242 NR Description: putative YABBY3 axial regulator; protein id: supported by cDNA: gi_14335013, supported by cDNA: gi_4928752 thaliana] >gi|4928753|gb|AAD33717.1|AF136540_1 YABBY3
  misc_feature (6)..(96): Homolog of NCBI NO: 30683176 NR Description: expressed protein [Arabidopsis thaliana] expressed protein [Arabidopsis thaliana] unknown protein [Arabidopsis thaliana]
  misc_feature (6)..(50): Homolog of NCBI NO: 7486543 NR Description: hypothetical protein F6N15.22 - Arabidopsis >gi|3193331|gb|AAC19313.1| F6N15.22 gene product [Arabidopsis >gi|7267105|emb|CAB80776.1| putative YABBY3 axial regulator
  misc_feature (8)..(96): Homolog of NCBI NO: 11280864 NR Description: hypothetical protein 2 [imported] - rice
  misc_feature (8)..(64): Homolog of NCBI NO: 38605890 NR Description: OSJNBb0020O11.2 [Oryza sativa (japonica
  misc_feature (1)..(96): Homolog of NCBI NO: 11280863 NR Description: hypothetical protein [imported] - rice
  misc_feature (1)..(96): Homolog of NCBI NO: 33146736 NR Description: putative MADS-box transcription factor CDM51
  misc_feature (1)..(61): Homolog of NCBI NO: 37535908 NR Description: hypothetical protein [Oryza sativa (japonica group)] >gi|22267600|gb|AAM94935.1| putative transcription factor
MSVDFSSERVCYVHCSFCTTILAVSVPYASLFTLVTVRCGHCTNLLSLNIGVSLHQTSAPPIHQDLQPHRQHTTSLVTRKDCASSSRSTNNFIGKH

SEQ ID NO: 90167 - protein, 89 aa, Arabidopsis thaliana
  peptide (1)..(89): Ceres Seq. ID no. 12722662
MCKQRADDGKRSGEEEEDHITLHIYTCMYICSFLFSCVCFIYNFISSFILLISEVYKFEPKMFRKNLLSEDCNINFNFTHSEKVWSRLY

SEQ ID NO: 90168 - protein, 62 aa, Arabidopsis thaliana
  peptide (1)..(62): Ceres Seq. ID no. 12722663
MYICSFLFSCVCFIYNFISSFILLISEVYKFEPKMFRKNLLSEDCNINFNFTHSEKVWSRLY

SEQ ID NO: 90169 - DNA, 3126 bp, Arabidopsis thaliana
  misc_feature (1)..(3126): Ceres Seq. ID no. 12722728
  misc_feature: MA Experiment ID: 20000306 Result: Up-regulated in Transcription
  misc_feature: MA Experiment 20000306 PARAMETER Experiment Name: At_Germinating_Seeds_Sub_P Parameter: Age (hr) Value: 6 vs. 0
  misc_feature: MA Experiment 20000306 PARAMETER Experiment Name: At_Germinating_Seeds_Sub_P Parameter: Organism Value: A. thaliana
  misc_feature: MA Experiment 20000306 PARAMETER Experiment Name: At_Germinating_Seeds_Sub_P Parameter: Plant Line Value: WS
  misc_feature: MA Experiment 20000306 PARAMETER Experiment Name: At_Germinating_Seeds_Sub_P Parameter: Tissue Value: Germinating Seeds
  misc_feature: MA Experiment ID: 20000307 Result: Up-regulated in Transcription
  misc_feature: MA Experiment 20000307 PARAMETER Experiment Name: At_Germinating_Seeds_Sub_P Parameter: Age (hr) Value: 24 vs. 0
  misc_feature: MA Experiment 20000307 PARAMETER Experiment Name: At_Germinating_Seeds_Sub_P Parameter: Organism Value: A. thaliana
  misc_feature: MA Experiment 20000307 PARAMETER Experiment Name: At_Germinating_Seeds_Sub_P Parameter: Plant Line Value: WS
  misc_feature: MA Experiment 20000307 PARAMETER Experiment Name: At_Germinating_Seeds_Sub_P Parameter: Tissue Value: Germinating Seeds
  misc_feature: MA Experiment ID: 20000315 Result: Down-regulated in Transcription
  misc_feature: MA Experiment 20000315 PARAMETER Experiment Name: At_14day_Shoots-Roots_Sub_P Parameter: Age (day) Value: 14
  misc_feature: MA Experiment 20000315 PARAMETER Experiment Name: At_14day_Shoots-Roots_Sub_P Parameter: Organism Value: A. thaliana
  misc_feature: MA Experiment 20000315 PARAMETER Experiment Name: At_14day_Shoots-Roots_Sub_P Parameter: Plant Line Value: WS
  misc_feature: MA Experiment 20000315 PARAMETER Experiment Name: At_14day_Shoots-Roots_Sub_P Parameter: Tissue Value: Shoots vs. Whole Plant
aatcctctgccaattttctctcttcttcttcctcttcttcttcgtcgtcgtcatataaagcttctctcgtaacgaattagatcattctttgtgtcaccaccgacgtttttgtacagctaattttttttgtgaaatccgagcttcgtttttttgatcattttgtttacacttccagagtgataacgattctctgatctgtttccatgatcgctcttctctaactctctattcgatcttcgacaatttcttctacaacgccgaagaggaagaaagaatctgtgtttcttcgttgtggcttatttctttctctattgctatttatgttccgtagaaatttgatctggtgaatgctcctgcgataaaatttccctgagccaacgcggctcgggggagatctgttatatcagctatgtcttcatcaacggacgatgcaggaacaacaacacattctcttcaggaattcaaactcttcgaaactcaatcgaacttttatatgattggttgggatggaagtggagtttatagagtactaaagattgatcgtcttgatccatctgagcttaacattagtcaagattcgactcattacacaaagaaagaatgttatgagttgctcaaacggatacacgaaggaaataaagctacgggtgggcttaaacttgtgactctttgttatggtatcattggctttgttaaattcttgggaccttactatatgctgctaataactgaaagaagacacataggtgatctttttggtcacagtgtctatgctgtatcaaagagcgagatagttgccttgcataattctactgtacagtgcaattttgcaaattcaagagatgaaaacagatataagagactcttgtgtatggtggaccttacgaaagacttctttttcagctattcttacaatgtaatgagaagttaccagaagaatgtatgcaattatgagaccgggcataatctctatgagaaaatgtttgtctggaatgagttcttgactcggggaatccgacatcatctacggaataccctgtggactgtagcattggtttatggtttcttcaagcaggcatctctttctgaatctgggaaggattttaagatcacccttatcgctaggcgttcccgtcataatgctggaaccaggtacttgaagcgaggagtaaacagaaatggtgatgttgccaatgatgtcgagaccgaacagatagtgtctgaagatgttcctgaagaccaccctatgcaaataagttctgttgtgcagaatcgtggctcaatccctcttttctggtcacaagagacctcacgactgaatctaaagccagatatagtcttgtcaaaaaaggaaccaaactatgaggcgactaggcttcactttgataaccttgtagaacgatatggaaaccccatcatcattctgaacttgatcaagacaaaagagaggaggcctagagagtcaatcctacgagaagagtttgttaatgcaattgactttataaacaaagatttacctgaggaaaatcgtctgcgattcctccactgggacctgcacaaacattttcggagcaaaacaaaaaatgtcttggcactcctttgcaaagtagctacctgcgcattgatgctaaccgatttattttactatcaagttacaccagccatgacgattgaggattccatgagcttgtcttcttcttctgatgccgacactggggatatatctccacacactagttctgatgatgataatggggaccatgatagtcttgagaaaaaatctagtaggagtaagaatattgcttatggaaaatgtgatgtcaagccacccaggcttcagagtggcgttcttaggaccaattgcattgattgccttgaccgtacaaatgtagcacaatatgcatacggttgggctgctcttgggcagcagcttcatgtattagggattagagatgttcccgccatagaacttgatgatcccttggctatttcgttaatggggttgtatgagagaatgggtgacacactagctcatcagtatggcggatccgcagcccacaacaaggtattcagtgagagaagaggccagtggagagcagcaactcagtcacaggagttcttgagaactctacaacgatattataacaacgcatatatggatgcagataaacaagacgccattaatatatttcttggcacgttccagcctgaacagggaatgccagcaatctgggagttacgatcaaattctctctccaatggacgaaatggagagatgaacatagggaaagatgaaaggtttcttgtgaaaaggtgcttatcagatggagattttctccatgaaagttgcactccgctgtcagccatgagtagcaatcatgaaagcatgccacaaaaaggtttctccgcaccattacagcatgtgagccatattctttcagagtcatcgtctgatataccagtatctaatgatgtagcattatcaaggtgtactccttcaatgcccaggaaacagctcttcggagatgtgcaaaaggttcatcgttttggtagcgaccaagtttactttggcggggaggaagacatgtctagtgtctccaattttgttgatattgagtggctttcatcagaaaacccatgcgagaatgctttatttgacaggtcgtcggagcttacaagaaatttgacagcggagacgtcttcaacagagaatagcgtcaacggagtaggacaatcggcaccaactataagtgaaagtgggtcaagcagcagtaagggaaaggaaccgatgggaacaaagattcgggaggactttccagatagcttcaaagaatgggtagcatacggtgaagctctctgccactgagtcccaaaatcttaggaacacggaatggtacaaaagagtagtacattattgctgaatagctgaaacctttgtgttgcataaaatttcatcattcgtttgaaacctttatttttccccctaatttgttttgtaaatagtgtaatgtttatataaagcttgtaagaatcatgttaaaattatttgtaggtttctttgtctctctgtaatcgtttgaatcacaaacacctgcggttatatattgcgtttgcgttttctgaagt

SEQ ID NO: 90170 - protein, 818 aa, Arabidopsis thaliana
  peptide (1)..(818): Ceres Seq. ID no. 12722729
  misc_feature (88)..(149): Pfam Name: SacI homology domain Pfam Description: SacI homology domain
  misc_feature (15)..(810): Homolog of NCBI NO: 18400310 NR Description: Expressed protein; protein id: At3g14205.1, by cDNA: gi_15215805, supported by cDNA: gi_20334797 [Arabidopsis >gi|15215806|gb|AAK91448.1| At3g14201 [Arabidopsis thaliana]
  misc_feature (15)..(438): Homolog of NCBI NO: 15217295 NR Description: Putative phosphoinositide phosphatase [Oryza
  misc_feature (442)..(818): Homolog of NCBI NO: 15217295 NR Description: Putative phosphoinositide phosphatase [Oryza
  misc_feature (15)..(810): Homolog of NCBI NO: 9294649 NR Description: gb|AAC25523.1~gene_id:MAG2.20~similar to unknown
  misc_feature (1)..(613): Homolog of NCBI NO: 22329733 NR Description: unknown protein; protein id: At1g22620.1,
  misc_feature (15)..(423): Homolog of NCBI NO: 22329625 NR Description: unknown protein; protein id: At1g17340.1, by cDNA: gi_20147340 [Arabidopsis thaliana] At1g17340/F28G4_6 [Arabidopsis thaliana]
  misc_feature (476)..(639): Homolog of NCBI NO: 22329625 NR Description: unknown protein; protein id: At1g17340.1, by cDNA: gi_20147340 [Arabidopsis thaliana] At1g17340/F28G4_6 [Arabidopsis thaliana]
  misc_feature (1)..(433): Homolog of NCBI NO: 6587828 NR Description: Hypothetical protein [Arabidopsis thaliana]
  misc_feature (1)..(433): Homolog of NCBI NO: 7487361 NR Description: hypothetical protein T22J18.20 - Arabidopsis >gi|3287695|gb|AAC25523.1|AAC25523 Similar to hypothetical C34B7.2 gb|1729503 from C. elegans cosmid gb|Z83220. [Arabidopsis
  misc_feature (188)..(411): Homolog of NCBI NO: 7662034 NR Description: Sac domain-containing inositol phosphatase 3; gene product [Homo sapiens] >gi|2497367|sp|Q92562|Y274_HUMAN protein KIAA0274 >gi|1665813|dbj|BAA13403.1| Similar
MSSSTDDAGTTTHSLQEFKLFETQSNFYMIGWDGSGVYRVLKIDRLDPSELNISQDSTHYTKKECYELLKRIHEGNKATGGLKLVTLCYGIIGFVKFLGPYYMLLITERRHIGDLFGHSVYAVSKSEIVALHNSTVQCNFANSRDENRYKRLLCMVDLTKDFFFSYSYNVMRSYQKNVCNYETGHNLYEKMFVWNEFLTRGIRHHLRNTLWTVALVYGFFKQASLSESGKDFKITLIARRSRHNAGTRYLKRGVNRNGDVANDVETEQIVSEDVPEDHPMQISSVVQNRGSIPLFWSQETSRLNLKPDIVLSKKEPNYEATRLHFDNLVERYGNPIIILNLIKTKERRPRESILREEFVNAIDFINKDLPEENRLRFLHWDLHKHFRSKTKNVLALLCKVATCALMLTDLFYYQVTPAMTIEDSMSLSSSSDADTGDISPHTSSDDDNGDHDSLEKKSSRSKNIAYGKCDVKPPRLQSGVLRTNCIDCLDRTNVAQYAYGWAALGQQLHVLGIRDVPAIELDDPLAISLMGLYERMGDTLAHQYGGSAAHNKVFSERRGQWRAATQSQEFLRTLQRYYNNAYMDADKQDAINIFLGTFQPEQGMPAIWELRSNSLSNGRNGEMNIGKDERFLVKRCLSDGDFLHESCTPLSAMSSNHESMPQKGFSAPLQHVSHILSESSSDIPVSNDVALSRCTPSMPRKQLFGDVQKVHRFGSDQVYFGGEEDMSSVSNFVDIEWLSSENPCENALFDRSSELTRNLTAETSSTENSVNGVGQSAPTISESGSSSSKGKEPMGTKIREDFPDSFKEWVAYGEALCH

SEQ ID NO: 90171 - protein, 790 aa, Arabidopsis thaliana
  peptide (1)..(790): Ceres Seq. ID no. 12722730
  misc_feature (60)..(121): Pfam Name: SacI homology domain Pfam Description: SacI homology domain
  misc_feature (1)..(782): Homolog of NCBI NO: 18400310 NR Description: Expressed protein; protein id: At3g14205.1, by cDNA: gi_15215805, supported by cDNA: gi_20334797 [Arabidopsis >gi|15215806|gb|AAK91448.1| At3g14201 [Arabidopsis thaliana]
  misc_feature (1)..(410): Homolog of NCBI NO: 15217295 NR Description: Putative phosphoinositide phosphatase [Oryza
  misc_feature (414)..(790): Homolog of NCBI NO: 15217295 NR Description: Putative phosphoinositide phosphatase [Oryza
  misc_feature (1)..(782): Homolog of NCBI NO: 9294649 NR Description: gb|AAC25523.1~gene_id:MAG2.20~similar to unknown
  misc_feature (1)..(585): Homolog of NCBI NO: 22329733 NR Description: unknown protein; protein id: At1g22620.1,
  misc_feature (1)..(395): Homolog of NCBI NO: 22329625 NR Description: unknown protein; protein id: At1g17340.1, by cDNA: gi_20147340 [Arabidopsis thaliana] At1g17340/F28G4_6 [Arabidopsis thaliana]
  misc_feature (448)..(611): Homolog of NCBI NO: 22329625 NR Description: unknown protein; protein id: At1g17340.1, by cDNA: gi_20147340 [Arabidopsis thaliana] At1g17340/F28G4_6 [Arabidopsis thaliana]
  misc_feature (1)..(405): Homolog of NCBI NO: 6587828 NR Description: Hypothetical protein [Arabidopsis thaliana]
  misc_feature (1)..(405): Homolog of NCBI NO: 7487361 NR Description: hypothetical protein T22J18.20 - Arabidopsis >gi|3287695|gb|AAC25523.1|AAC25523 Similar to hypothetical C34B7.2 gb|1729503 from C. elegans cosmid gb|Z83220. [Arabidopsis
  misc_feature (160)..(383): Homolog of NCBI NO: 7662034 NR Description: Sac domain-containing inositol phosphatase 3; gene product [Homo sapiens] >gi|2497367|sp|Q92562|Y274_HUMAN protein KIAA0274 >gi|1665813|dbj|BAA13403.1| Similar
MIGWDGSGVYRVLKIDRLDPSELNISQDSTHYTKKECYELLKRIHEGNKATGGLKLVTLCYGIIGFVKFLGPYYMLLITERRHIGDLFGHSVYAVSKSEIVALHNSTVQCNFANSRDENRYKRLLCMVDLTKDFFFSYSYNVMRSYQKNVCNYETGHNLYEKMFVWNEFLTRGIRHHLRNTLWTVALVYGFFKQASLSESGKDFKITLIARRSRHNAGTRYLKRGVNRNGDVANDVETEQIVSEDVPEDHPMQISSVVQNRGSIPLFWSQETSRLNLKPDIVLSKKEPNYEATRLHFDNLVERYGNPIIILNLIKTKERRPRESILREEFVNAIDFINKDLPEENRLRFLHWDLHKHFRSKTKNVLALLCKVATCALMLTDLFYYQVTPAMTIEDSMSLSSSSDADTGDISPHTSSDDDNGDHDSLEKKSSRSKNIAYGKCDVKPPRLQSGVLRTNCIDCLDRTNVAQYAYGWAALGQQLHVLGIRDVPAIELDDPLAISLMGLYERMGDTLAHQYGGSAAHNKVFSERRGQWRAATQSQEFLRTLQRYYNNAYMDADKQDAINIFLGTFQPEQGMPAIWELRSNSLSNGRNGEMNIGKDERFLVKRCLSDGDFLHESCTPLSAMSSNHESMPQKGFSAPLQHVSHILSESSSDIPVSNDVALSRCTPSMPRKQLFGDVQKVHRFGSDQVYFGGEEDMSSVSNFVDIEWLSSENPCENALFDRSSELTRNLTAETSSTENSVNGVGQSAPTISESGSSSSKGKEPMGTKIREDFPDSFKEWVAYGEALCH

SEQ ID NO: 90172 - protein, 716 aa, Arabidopsis thaliana
  peptide (1)..(716): Ceres Seq. ID no. 12722731
  misc_feature (63)..(292): Pfam Name: SacI homology domain Pfam Description: SacI homology domain
  misc_feature (1)..(708): Homolog of NCBI NO: 18400310 NR Description: Expressed protein; protein id: At3g14205.1, by cDNA: gi_15215805, supported by cDNA: gi_20334797 [Arabidopsis >gi|15215806|gb|AAK91448.1| At3g14201 [Arabidopsis thaliana]
  misc_feature (1)..(336): Homolog of NCBI NO: 15217295 NR Description: Putative phosphoinositide phosphatase [Oryza
  misc_feature (340)..(716): Homolog of NCBI NO: 15217295 NR Description: Putative phosphoinositide phosphatase [Oryza
  misc_feature (1)..(708): Homolog of NCBI NO: 9294649 NR Description: gb|AAC25523.1~gene_id:MAG2.20~similar to unknown
  misc_feature (1)..(511): Homolog of NCBI NO: 22329733 NR Description: unknown protein; protein id: At1g22620.1,
  misc_feature (1)..(321): Homolog of NCBI NO: 22329625 NR Description: unknown protein; protein id: At1g17340.1, by cDNA: gi_20147340 [Arabidopsis thaliana] At1g17340/F28G4_6 [Arabidopsis thaliana]
  misc_feature (374)..(537): Homolog of NCBI NO: 22329625 NR Description: unknown protein; protein id: At1g17340.1, by cDNA: gi_20147340 [Arabidopsis thaliana] At1g17340/F28G4_6 [Arabidopsis thaliana]
  misc_feature (1)..(331): Homolog of NCBI NO: 6587828 NR Description: Hypothetical protein [Arabidopsis thaliana]
  misc_feature (1)..(331): Homolog of NCBI NO: 7487361 NR Description: hypothetical protein T22J18.20 - Arabidopsis >gi|3287695|gb|AAC25523.1|AAC25523 Similar to hypothetical C34B7.2 gb|1729503 from C. elegans cosmid gb|Z83220. [Arabidopsis
  misc_feature (86)..(309): Homolog of NCBI NO: 7662034 NR Description: Sac domain-containing inositol phosphatase 3; gene product [Homo sapiens] >gi|2497367|sp|Q92562|Y274_HUMAN protein KIAA0274 >gi|1665813|dbj|BAA13403.1| Similar
MLLITERRHIGDLFGHSVYAVSKSEIVALHNSTVQCNFANSRDENRYKRLLCMVDLTKDFFFSYSYNVMRSYQKNVCNYETGHNLYEKMFVWNEFLTRGIRHHLRNTLWTVALVYGFFKQASLSESGKDFKITLIARRSRHNAGTRYLKRGVNRNGDVANDVETEQIVSEDVPEDHPMQISSVVQNRGSIPLFWSQETSRLNLKPDIVLSKKEPNYEATRLHFDNLVERYGNPIIILNLIKTKERRPRESILREEFVNAIDFINKDLPEENRLRFLHWDLHKHFRSKTKNVLALLCKVATCALMLTDLFYYQVTPAMTIEDSMSLSSSSDADTGDISPHTSSDDDNGDHDSLEKKSSRSKNIAYGKCDVKPPRLQSGVLRTNCIDCLDRTNVAQYAYGWAALGQQLHVLGIRDVPAIELDDPLAISLMGLYERMGDTLAHQYGGSAAHNKVFSERRGQWRAATQSQEFLRTLQRYYNNAYMDADKQDAINIFLGTFQPEQGMPAIWELRSNSLSNGRNGEMNIGKDERFLVKRCLSDGDFLHESCTPLSAMSSNHESMPQKGFSAPLQHVSHILSESSSDIPVSNDVALSRCTPSMPRKQLFGDVQKVHRFGSDQVYFGGEEDMSSVSNFVDIEWLSSENPCENALFDRSSELTRNLTAETSSTENSVNGVGQSAPTISESGSSSSKGKEPMGTKIREDFPDSFKEWVAYGEALCH

SEQ ID NO: 90173 - DNA, 3690 bp, Arabidopsis thaliana
  misc_feature (1)..(3690): Ceres Seq. ID no. 12722872
  misc_feature: MA Experiment ID: 20000180 Result: Up-regulated in Transcription
  misc_feature: MA Experiment 20000180 PARAMETER Experiment Name: At_Germinating_Seeds_P Parameter: Age (hr) Value: 24 vs. 0
  misc_feature: MA Experiment 20000180 PARAMETER Experiment Name: At_Germinating_Seeds_P Parameter: Tissue Value: Germinating Seeds
  misc_feature: MA Experiment ID: 20000185 Result: Up-regulated in Transcription
  misc_feature: MA Experiment 20000185 PARAMETER Experiment Name: At_Roots__P Parameter: Age (day) Value: 7 vs. 21
  misc_feature: MA Experiment 20000185 PARAMETER Experiment Name: At_Roots__P Parameter: Organism Value: A. thaliana
  misc_feature: MA Experiment 20000185 PARAMETER Experiment Name: At_Roots__P Parameter: Tissue Value: Roots vs. Whole Plant
  misc_feature: MA Experiment ID: 20000227 Result: Up-regulated in Transcription
  misc_feature: MA Experiment 20000227 PARAMETER Experiment Name: At_Root-Tips-vs-Tops_P Parameter: Tissue Value: Root Tips vs. Root Tops
  misc_feature: MA Experiment ID: 20000234 Result: Up-regulated in Transcription
  misc_feature: MA Experiment 20000234 PARAMETER Experiment Name: At_Siliques_P Parameter: Age (day) Value: 21
  misc_feature: MA Experiment 20000234 PARAMETER Experiment Name: At_Siliques_P Parameter: Organism Value: A. thaliana
  misc_feature: MA Experiment 20000234 PARAMETER Experiment Name: At_Siliques_P Parameter: Plant Line Value: WS
  misc_feature: MA Experiment 20000234 PARAMETER Experiment Name: At_Siliques_P Parameter: Tissue Value: Less Than 5mm Siliques vs. Whole Plant
  misc_feature: MA Experiment ID: 20000235 Result: Up-regulated in Transcription
  misc_feature: MA Experiment 20000235 PARAMETER Experiment Name: At_Siliques_P Parameter: Age (day) Value: 21
  misc_feature: MA Experiment 20000235 PARAMETER Experiment Name: At_Siliques_P Parameter: Organism Value: A. thaliana
  misc_feature: MA Experiment 20000235 PARAMETER Experiment Name: At_Siliques_P Parameter: Plant Line Value: WS
  misc_feature: MA Experiment 20000235 PARAMETER Experiment Name: At_Siliques_P Parameter: Tissue Value: 5-10mm Siliques vs. Whole Plant
  misc_feature: MA Experiment ID: 20000264 Result: Up-regulated in Transcription
  misc_feature: MA Experiment 20000264 PARAMETER Experiment Name: At_Open_Flower_P Parameter: Age (day) Value: 21
  misc_feature: MA Experiment 20000264 PARAMETER Experiment Name: At_Open_Flower_P Parameter: Plant Line Value: WS
  misc_feature: MA Experiment 20000264 PARAMETER Experiment Name: At_Open_Flower_P Parameter: Tissue Value: Open Flower vs. Whole Plant
  misc_feature: MA Experiment ID: 20000265 Result: Up-regulated in Transcription
  misc_feature: MA Experiment 20000265 PARAMETER Experiment Name: At_Open_Flower_P Parameter: Age (day) Value: 21
  misc_feature: MA Experiment 20000265 PARAMETER Experiment Name: At_Open_Flower_P Parameter: Plant Line Value: WS
  misc_feature: MA Experiment 20000265 PARAMETER Experiment Name: At_Open_Flower_P Parameter: Tissue Value: Closed Flower vs. Whole Plant
  misc_feature: MA Experiment ID: 20000286 Result: Up-regulated in Transcription
  misc_feature: MA Experiment 20000286 PARAMETER Experiment Name: At_Open_Flower_P Parameter: Age (day) Value: 21
  misc_feature: MA Experiment 20000286 PARAMETER Experiment Name: At_Open_Flower_P Parameter: Plant Line Value: WS
  misc_feature: MA Experiment 20000286 PARAMETER Experiment Name: At_Open_Flower_P Parameter: Tissue Value: Half Open vs. Whole Plant
atgccgtttatctccgagactgctagtgccatcaagcgccggttcggattcaacgaccgtcccgctccgtcggaatctctccgctctgtaccttgcacgccagaagctaacaccgtctcgagagataatcacactcatcagtctttgcttttctcttccgccgttcgaagcatgcctgaattggacgaagatggtgcgatttgcgctggatctgctcagatatcgaggtctcaaagctttgagttcaatgaagatcccgctttttggaaagatcacaatgttcaggttatcataagaactcgtccacttagtagttcagagatttctgtacaaggcaacaacaaatgtgtaaggcaagacaatggtcaggcaattacttggattgggaatccagagtctcggttcacatttgatctcgttgctgatgagaatgttagccaggagcagatgtttaaagtggctggagtacctatggtagagaatgttgtggctggttacaatagctgtatgtttgcatatggccagactggaagtgggaaaactcatactatgcttggagatatcgagggaggaacacgtagacatagtgtcaactgcgggatgacacctagagtttttgagtatttgttctcaaggatccaaaaggaaaaagaggttcgcaaagaggaaaagctacatttcacatgtagatgctcatttctggagatttacaacgagcaaatccttgatttattagatccatcgtcttataatttacagctaagggaagaccacaaaaaaggtattcatgttgagaatctaaaggagattgaagtttcaagtgccagagacgtgattcaacaattgatgcagggtgctgcaaacaggaaagtagccgctactaatatgaatcgtgcaagtagtcgatcccacagtgtatttacatgtatcatcgaaagcaagtgggtatctcaaggtgtaactcatcatcgttttgcacggcttaatcttgttgatttagctggatctgaaaggcaaaagagttcaggagctgaaggtgaacgcctcaaagaagctaccaacatcaacaagtctctttctacattggggcttgtaatcatgaatctcgtaagcgtttccaatggaaaatcagttcatgttccttatcgagattcgaagctcacatttctgcttcaggattctcttggagggaattcaaagacaattataattgcgaatattagtccatctagcagttgctcattggagaccctaagtaccttgaagtttgcacagcgtgccaagcttattaagaacaatgcaattgtcaacgaagatgcgtctggagatgttattgctatgcggcttcaaattcaacaactcaagaaagaagtaacccgcttaagaggaatgggtggagtagacaatcaggacatggacactatctcaatgggttgccctgcctctccaatgtctctcaagtgggatgggttcaatggatcattcactcctctgacaactcacaaaaggatgtctaaggtaaaagactacgaagttgcacttgtgggtgctttcaggagagagagggaaaaggacgttgctttacaggctttgactgctgaaaatgaggcctcaatgaagttggaaaagaaaagagaggatgaaatacgagggctgaaaatgatgttaaagctccgagattcagcaatcaagagtttacaaggtgtaacttcaggaaagatccctgttgaagctcatctgcaaaaagaaaagggtgaccttatgaaggagatagaggaaggggaacgggatatcttaaatcaacagattcaagcgttacaagccaagttgctagaagctcttgactggaaactcatgcacgagtcagattcctccatggttaaagaagatggtaacatcagcaatatgttctgctcaaaccagaatcaggaatcaaagaaactttcgtctatccaagatgagaatgaatttctccggatgcaggctattcaaaaccgggcagaaatggaatctcttcagaagtccttaagtttttcacttgacgagaaagagagattgcaaaagcttgtcgacaatttgtctaatgaacttgagggaaaaataagatcctcaggcatggttggtgatgatgatcagatggaggttaaaacaatggttcaagccattgcatgtgttagtcaaagagaagctgaagctcacgagacagcaatcaaattgtcgaaagaaaatgatgatttgcgccagaaaataaaggtcttgattgaggacaacaacaagcttatagagctgtatgaacaagtagccgaagaaaacagttccagagcttggggaaagatcgagacagattcgtcaagtaataatgcggacgctcagaacagtgctgaaattgctttagaggttgaaaaaagtgcagctgaagaacagaagaaaatgataggaaacctggagaatcagctaaccgagatgcacgatgagaacgagaagctaatgagtctgtacgaaaatgcgatgaaggaaaaggatgaattgaaaagacttctctcttctcctgaccaaaagaagcctattgaagctaattccgatactgaaatggagctgtgtaacatttcttctgaaaagtccacagaagatttaaactcagcaaagctgaaacttgaactggcgcaggaaaagctttcaatatctgcgaaaactattggagtgttctcttcgcttgaagagaatattttggacatcatcaagctgtcaaaggaaagcaaagagaccgaagaaaaagttaaggagcaccagtctgagctaggatctatcaaaactgtttctgatcaaactaatgcaagaaaggaagttgcagagaaaaaattggccgctctcagatgctcactatcaaactttgcatcatcagcagtttactttcaacagcgagaagaacgagcaagggcgcatgtaaactcattttccggttatctaaaccagaaaaatgaagaactcgatgttatccgttctcacaaaagagaaatcgatgctgctatgggtaagatccaacaatctgaggcagagctgaagagtaacattgtaatgctgaaaataaaagtggatgaagagaacaagaggcatgaggaagagggtgttctttgcacgatagataacattctgcgtacaggaaaagccacagatttgctgaaatcccaggaagaaaaaacaaagctccaatcggagatgaagctttctcgggagaagcttgcttcggttagaaaagaagttgacgacatgactaagaagtctttgaaactggagaaagagatcaaaaccatggaaacagagatagagaagagctcaaagactagaaccgaatcagaaatggaattggagaacacaattcaagagaagcaaactattcaggagatggaagaacaagggatgtctgaaatacaaaacatgataatcgagattcatcagcttgtctttgaatcggatctgagaaaagaagaggcgatgattataagagaagagcttattgcagaggagcttagagccaaagatgtgcacacgaatatgatcgagagagtcgagaatgcgttgaagacactggagaatcaaaacaatagcgtatcaggcaagattgaagaagaagtagaaaatgttttgagtttagttcacgaagcctcgaggttgcttgaagtttctcactga

SEQ ID NO: 90174 - protein, 1229 aa, Arabidopsis thaliana
  peptide (1)..(1229): Ceres Seq. ID no. 12722873
  misc_feature (505)..(1209): Pfam Name: Myosin tail Pfam Description: Myosin tail
  misc_feature (75)..(1196): Homolog of NCBI NO: 40539007 NR Description: kinesin-like protein [Oryza sativa (japonica
  misc_feature (80)..(1220): Homolog of NCBI NO: 9280323 NR Description: kinesin (centromeric protein)-like protein
  misc_feature (16)..(1153): Homolog of NCBI NO: 27261081 NR Description: OJ1340_C08.3 [Oryza sativa (japonica
  misc_feature (80)..(1229): Homolog of NCBI NO: 22331168 NR Description: kinesin-related protein; protein id: At3g19050.1
  misc_feature (411)..(1064): Homolog of NCBI NO: 11994553 NR Description: kinesin-related centromere protein-like
  misc_feature (5)..(410): Homolog of NCBI NO: 11994553 NR Description: kinesin-related centromere protein-like
  misc_feature (80)..(880): Homolog of NCBI NO: 15229030 NR Description: kinesin-related protein; protein id: At3g17360.1
  misc_feature (94)..(1204): Homolog of NCBI NO: 9887310 NR Description: kinesin-like protein KRP180 [Strongylocentrotus
  misc_feature (94)..(1220): Homolog of NCBI NO: 40644653 NR Description: kinesin family member 15 [Mus musculus]
  misc_feature (94)..(1220): Homolog of NCBI NO: 39930325 NR Description: kinesin-like 7; kinesin 15; kinesin family member N-10 kinesin [Mus musculus] >gi|38173736|gb|AAH60710.1| Knsl7
MPFISETASAIKRRFGFNDRPAPSESLRSVPCTPEANTVSRDNHTHQSLLFSSAVRSMPELDEDGAICAGSAQISRSQSFEFNEDPAFWKDHNVQVIIRTRPLSSSEISVQGNNKCVRQDNGQAITWIGNPESRFTFDLVADENVSQEQMFKVAGVPMVENVVAGYNSCMFAYGQTGSGKTHTMLGDIEGGTRRHSVNCGMTPRVFEYLFSRIQKEKEVRKEEKLHFTCRCSFLEIYNEQILDLLDPSSYNLQLREDHKKGIHVENLKEIEVSSARDVIQQLMQGAANRKVAATNMNRASSRSHSVFTCIIESKWVSQGVTHHRFARLNLVDLAGSERQKSSGAEGERLKEATNINKSLSTLGLVIMNLVSVSNGKSVHVPYRDSKLTFLLQDSLGGNSKTIIIANISPSSSCSLETLSTLKFAQRAKLIKNNAIVNEDASGDVIAMRLQIQQLKKEVTRLRGMGGVDNQDMDTISMGCPASPMSLKWDGFNGSFTPLTTHKRMSKVKDYEVALVGAFRREREKDVALQALTAENEASMKLEKKREDEIRGLKMMLKLRDSAIKSLQGVTSGKIPVEAHLQKEKGDLMKEIEEGERDILNQQIQALQAKLLEALDWKLMHESDSSMVKEDGNISNMFCSNQNQESKKLSSIQDENEFLRMQAIQNRAEMESLQKSLSFSLDEKERLQKLVDNLSNELEGKIRSSGMVGDDDQMEVKTMVQAIACVSQREAEAHETAIKLSKENDDLRQKIKVLIEDNNKLIELYEQVAEENSSRAWGKIETDSSSNNADAQNSAEIALEVEKSAAEEQKKMIGNLENQLTEMHDENEKLMSLYENAMKEKDELKRLLSSPDQKKPIEANSDTEMELCNISSEKSTEDLNSAKLKLELAQEKLSISAKTIGVFSSLEENILDIIKLSKESKETEEKVKEHQSELGSIKTVSDQTNARKEVAEKKLAALRCSLSNFASSAVYFQQREERARAHVNSFSGYLNQKNEELDVIRSHKREIDAAMGKIQQSEAELKSNIVMLKIKVDEENKRHEEEGVLCTIDNILRTGKATDLLKSQEEKTKLQSEMKLSREKLASVRKEVDDMTKKSLKLEKEIKTMETEIEKSSKTRTESEMELENTIQEKQTIQEMEEQGMSEIQNMIIEIHQLVFESDLRKEEAMIIREELIAEELRAKDVHTNMIERVENALKTLENQNNSVSGKIEEEVENVLSLVHEASRLLEVSH

SEQ ID NO: 90175 - protein, 1172 aa, Arabidopsis thaliana
  peptide (1)..(1172): Ceres Seq. ID no. 12722874
  misc_feature (448)..(1152): Pfam Name: Myosin tail Pfam Description: Myosin tail
  misc_feature (18)..(1139): Homolog of NCBI NO: 40539007 NR Description: kinesin-like protein [Oryza sativa (japonica
  misc_feature (23)..(1163): Homolog of NCBI NO: 9280323 NR Description: kinesin (centromeric protein)-like protein
  misc_feature (1)..(1096): Homolog of NCBI NO: 27261081 NR Description: OJ1340_C08.3 [Oryza sativa (japonica
  misc_feature (23)..(1172): Homolog of NCBI NO: 22331168 NR Description: kinesin-related protein; protein id: At3g19050.1
  misc_feature (354)..(1007): Homolog of NCBI NO: 11994553 NR Description: kinesin-related centromere protein-like
  misc_feature (1)..(353): Homolog of NCBI NO: 11994553 NR Description: kinesin-related centromere protein-like
  misc_feature (23)..(823): Homolog of NCBI NO: 15229030 NR Description: kinesin-related protein; protein id: At3g17360.1
  misc_feature (37)..(1147): Homolog of NCBI NO: 9887310 NR Description: kinesin-like protein KRP180 [Strongylocentrotus
  misc_feature (37)..(1163): Homolog of NCBI NO: 40644653 NR Description: kinesin family member 15 [Mus musculus]
  misc_feature (37)..(1163): Homolog of NCBI NO: 39930325 NR Description: kinesin-like 7; kinesin 15; kinesin family member N-10 kinesin [Mus musculus] >gi|38173736|gb|AAH60710.1| Knsl7
MPELDEDGAICAGSAQISRSQSFEFNEDPAFWKDHNVQVIIRTRPLSSSEISVQGNNKCVRQDNGQAITWIGNPESRFTFDLVADENVSQEQMFKVAGVPMVENVVAGYNSCMFAYGQTGSGKTHTMLGDIEGGTRRHSVNCGMTPRVFEYLFSRIQKEKEVRKEEKLHFTCRCSFLEIYNEQILDLLDPSSYNLQLREDHKKGIHVENLKEIEVSSARDVIQQLMQGAANRKVAATNMNRASSRSHSVFTCIIESKWVSQGVTHHRFARLNLVDLAGSERQKSSGAEGERLKEATNINKSLSTLGLVIMNLVSVSNGKSVHVPYRDSKLTFLLQDSLGGNSKTIIIANISPSSSCSLETLSTLKFAQRAKLIKNNAIVNEDASGDVIAMRLQIQQLKKEVTRLRGMGGVDNQDMDTISMGCPASPMSLKWDGFNGSFTPLTTHKRMSKVKDYEVALVGAFRREREKDVALQALTAENEASMKLEKKREDEIRGLKMMLKLRDSAIKSLQGVTSGKIPVEAHLQKEKGDLMKEIEEGERDILNQQIQALQAKLLEALDWKLMHESDSSMVKEDGNISNMFCSNQNQESKKLSSIQDENEFLRMQAIQNRAEMESLQKSLSFSLDEKERLQKLVDNLSNELEGKIRSSGMVGDDDQMEVKTMVQAIACVSQREAEAHETAIKLSKENDDLRQKIKVLIEDNNKLIELYEQVAEENSSRAWGKIETDSSSNNADAQNSAEIALEVEKSAAEEQKKMIGNLENQLTEMHDENEKLMSLYENAMKEKDELKRLLSSPDQKKPIEANSDTEMELCNISSEKSTEDLNSAKLKLELAQEKLSISAKTIGVFSSLEENILDIIKLSKESKETEEKVKEHQSELGSIKTVSDQTNARKEVAEKKLAALRCSLSNFASSAVYFQQREERARAHVNSFSGYLNQKNEELDVIRSHKREIDAAMGKIQQSEAELKSNIVMLKIKVDEENKRHEEEGVLCTIDNILRTGKATDLLKSQEEKTKLQSEMKLSREKLASVRKEVDDMTKKSLKLEKEIKTMETEIEKSSKTRTESEMELENTIQEKQTIQEMEEQGMSEIQNMIIEIHQLVFESDLRKEEAMIIREELIAEELRAKDVHTNMIERVENALKTLENQNNSVSGKIEEEVENVLSLVHEASRLLEVSH

SEQ ID NO: 90176 - protein, 1080 aa, Arabidopsis thaliana
  peptide (1)..(1080): Ceres Seq. ID no. 12722875
  misc_feature (356)..(1060): Pfam Name: Myosin tail Pfam Description: Myosin tail
  misc_feature (1)..(1047): Homolog of NCBI NO: 40539007 NR Description: kinesin-like protein [Oryza sativa (japonica
  misc_feature (1)..(1071): Homolog of NCBI NO: 9280323 NR Description: kinesin (centromeric protein)-like protein
  misc_feature (1)..(1004): Homolog of NCBI NO: 27261081 NR Description: OJ1340_C08.3 [Oryza sativa (japonica
  misc_feature (1)..(1080): Homolog of NCBI NO: 22331168 NR Description: kinesin-related protein; protein id: At3g19050.1
  misc_feature (262)..(915): Homolog of NCBI NO: 11994553 NR Description: kinesin-related centromere protein-like
  misc_feature (1)..(261): Homolog of NCBI NO: 11994553 NR Description: kinesin-related centromere protein-like
  misc_feature (1)..(731): Homolog of NCBI NO: 15229030 NR Description: kinesin-related protein; protein id: At3g17360.1
  misc_feature (1)..(1055): Homolog of NCBI NO: 9887310 NR Description: kinesin-like protein KRP180 [Strongylocentrotus
  misc_feature (1)..(1071): Homolog of NCBI NO: 40644653 NR Description: kinesin family member 15 [Mus musculus]
  misc_feature (1)..(1071): Homolog of NCBI NO: 39930325 NR Description: kinesin-like 7; kinesin 15; kinesin family member N-10 kinesin [Mus musculus] >gi|38173736|gb|AAH60710.1| Knsl7
MFKVAGVPMVENVVAGYNSCMFAYGQTGSGKTHTMLGDIEGGTRRHSVNCGMTPRVFEYLFSRIQKEKEVRKEEKLHFTCRCSFLEIYNEQILDLLDPSSYNLQLREDHKKGIHVENLKEIEVSSARDVIQQLMQGAANRKVAATNMNRASSRSHSVFTCIIESKWVSQGVTHHRFARLNLVDLAGSERQKSSGAEGERLKEATNINKSLSTLGLVIMNLVSVSNGKSVHVPYRDSKLTFLLQDSLGGNSKTIIIANISPSSSCSLETLSTLKFAQRAKLIKNNAIVNEDASGDVIAMRLQIQQLKKEVTRLRGMGGVDNQDMDTISMGCPASPMSLKWDGFNGSFTPLTTHKRMSKVKDYEVALVGAFRREREKDVALQALTAENEASMKLEKKREDEIRGLKMMLKLRDSAIKSLQGVTSGKIPVEAHLQKEKGDLMKEIEEGERDILNQQIQALQAKLLEALDWKLMHESDSSMVKEDGNISNMFCSNQNQESKKLSSIQDENEFLRMQAIQNRAEMESLQKSLSFSLDEKERLQKLVDNLSNELEGKIRSSGMVGDDDQMEVKTMVQAIACVSQREAEAHETAIKLSKENDDLRQKIKVLIEDNNKLIELYEQVAEENSSRAWGKIETDSSSNNADAQNSAEIALEVEKSAAEEQKKMIGNLENQLTEMHDENEKLMSLYENAMKEKDELKRLLSSPDQKKPIEANSDTEMELCNISSEKSTEDLNSAKLKLELAQEKLSISAKTIGVFSSLEENILDIIKLSKESKETEEKVKEHQSELGSIKTVSDQTNARKEVAEKKLAALRCSLSNFASSAVYFQQREERARAHVNSFSGYLNQKNEELDVIRSHKREIDAAMGKIQQSEAELKSNIVMLKIKVDEENKRHEEEGVLCTIDNILRTGKATDLLKSQEEKTKLQSEMKLSREKLASVRKEVDDMTKKSLKLEKEIKTMETEIEKSSKTRTESEMELENTIQEKQTIQEMEEQGMSEIQNMIIEIHQLVFESDLRKEEAMIIREELIAEELRAKDVHTNMIERVENALKTLENQNNSVSGKIEEEVENVLSLVHEASRLLEVSH

SEQ ID NO: 90177 - DNA, 621 bp, Arabidopsis thaliana
  misc_feature (1)..(621): Ceres Seq. ID no. 12722895
  misc_feature: MA Experiment ID: 20000235 Result: Up-regulated in Transcription
  misc_feature: MA Experiment 20000235 PARAMETER Experiment Name: At_Siliques_P Parameter: Age (day) Value: 21
  misc_feature: MA Experiment 20000235 PARAMETER Experiment Name: At_Siliques_P Parameter: Organism Value: A. thaliana
  misc_feature: MA Experiment 20000235 PARAMETER Experiment Name: At_Siliques_P Parameter: Plant Line Value: WS
  misc_feature: MA Experiment 20000235 PARAMETER Experiment Name: At_Siliques_P Parameter: Tissue Value: 5-10mm Siliques vs. Whole Plant
  misc_feature: MA Experiment ID: 20000495 Result: Up-regulated in Transcription
  misc_feature: MA Experiment 20000495 PARAMETER Experiment Name: At_Guard_Cells_P Parameter: Harvest Date Value: 8/2/2002
  misc_feature: MA Experiment 20000495 PARAMETER Experiment Name: At_Guard_Cells_P Parameter: Organism Value: A. thaliana
  misc_feature: MA Experiment 20000495 PARAMETER Experiment Name: At_Guard_Cells_P Parameter: Tissue Value: Guard Cells vs. Leaves
  misc_feature: MA Experiment ID: 20001556 Result: Down-regulated in Transcription
  misc_feature: MA Experiment 20001556 PARAMETER Experiment Name: At_Drought_Soil_Dry_P Parameter: Age (day) Value: 26
  misc_feature: MA Experiment 20001556 PARAMETER Experiment Name: At_Drought_Soil_Dry_P Parameter: Organism Value: A. thaliana
  misc_feature: MA Experiment 20001556 PARAMETER Experiment Name: At_Drought_Soil_Dry_P Parameter: Plant Line Value: WS
  misc_feature: MA Experiment 20001556 PARAMETER Experiment Name: At_Drought_Soil_Dry_P Parameter: Post Timepoint (hr) Value: None
  misc_feature: MA Experiment 20001556 PARAMETER Experiment Name: At_Drought_Soil_Dry_P Parameter: Post-Treatment Value: None
  misc_feature: MA Experiment 20001556 PARAMETER Experiment Name: At_Drought_Soil_Dry_P Parameter: Timepoint (day) Value: 12
  misc_feature: MA Experiment 20001556 PARAMETER Experiment Name: At_Drought_Soil_Dry_P Parameter: Treatment Value: Drought vs. No Drought
  misc_feature: MA Experiment ID: 20001558 Result: Down-regulated in Transcription
  misc_feature: MA Experiment 20001558 PARAMETER Experiment Name: At_Drought_Soil_Dry_P Parameter: Age (day) Value: 27
  misc_feature: MA Experiment 20001558 PARAMETER Experiment Name: At_Drought_Soil_Dry_P Parameter: Organism Value: A. thaliana
  misc_feature: MA Experiment 20001558 PARAMETER Experiment Name: At_Drought_Soil_Dry_P Parameter: Plant Line Value: WS
  misc_feature: MA Experiment 20001558 PARAMETER Experiment Name: At_Drought_Soil_Dry_P Parameter: Post Timepoint (hr) Value: 6
  misc_feature: MA Experiment 20001558 PARAMETER Experiment Name: At_Drought_Soil_Dry_P Parameter: Post-Treatment Value: Re-Water vs. No Drought
  misc_feature: MA Experiment 20001558 PARAMETER Experiment Name: At_Drought_Soil_Dry_P Parameter: Timepoint (day) Value: 13
  misc_feature: MA Experiment 20001558 PARAMETER Experiment Name: At_Drought_Soil_Dry_P Parameter: Treatment Value: Drought vs. No Drought
  misc_feature: MA Experiment ID: 20001773 Result: Up-regulated in Transcription
  misc_feature: MA Experiment 20001773 PARAMETER Experiment Name: At_Far-red-enriched-adult_P Parameter: Age (day) Value: 30
  misc_feature: MA Experiment 20001773 PARAMETER Experiment Name: At_Far-red-enriched-adult_P Parameter: Light Value: Far-red enriched vs. White
  misc_feature: MA Experiment 20001773 PARAMETER Experiment Name: At_Far-red-enriched-adult_P Parameter: Organism Value: A. thaliana
  misc_feature: MA Experiment 20001773 PARAMETER Experiment Name: At_Far-red-enriched-adult_P Parameter: Plant Line Value: Columbia
  misc_feature: MA Experiment 20001773 PARAMETER Experiment Name: At_Far-red-enriched-adult_P Parameter: Timepoint (hr) Value: 48
  misc_feature: MA Experiment 20001773 PARAMETER Experiment Name: At_Far-red-enriched-adult_P Parameter: Tissue Value: Aerial
atgactgagaaggaatgtgaacatcaccacgacgaagatgagaagatgaggaaacgtataggagcattggtgcttgggtttctcgcagctgttcttttcgtggttttcttggtgtgggcgatacttcacccacacggaccacgttttgttcttcaagacgcaaccatttacgcgttcaacgtttctcagcctaattatctcacttctaatcttcaggtcactctttcttcacgaaatcctaatgacaagatcggaatcttctatgaccgccttgacatctacgcatcttaccgcaaccaacaggtgacgttggcgacgttattgccggcgacttaccaaggccaccttgatgtgacaatatggtcgccgtttctgtatggaacaactgtaccggtggcaccatatttttctccggcgttaagccaagatctaacggcggggatggtgcttctgaatatcaagatcgatggttgggttagatggaaagtgggaacgtgggtctccggtaggtaccgcctccacgtcaattgtccagcttacattaccttagccggacatttttctggtgatggtccagccgtgaagtaccagcttgtccaacgatgtgccgttgatgtttaa

SEQ ID NO: 90178 - protein, 206 aa, Arabidopsis thaliana
  peptide (1)..(206): Ceres Seq. ID no. 12722896
  misc_feature (1)..(206): Homolog of NCBI NO: 15229906 NR Description: hairpin-induced protein, putative (HIN1); protein At3g44220.1 [Arabidopsis thaliana] >gi|11282595|pir||T49138
  misc_feature (1)..(206): Homolog of NCBI NO: 22326984 NR Description: similar to hairpin-induced protein, putative
  misc_feature (4)..(206): Homolog of NCBI NO: 15231227 NR Description: hairpin-induced protein, putative (HIN1); protein At3g52470.1, supported by cDNA: 92178., supported by cDNA: supported by cDNA: gi_21281063 [Arabidopsis thaliana]
  misc_feature (4)..(206): Homolog of NCBI NO: 18399308 NR Description: VAMP protein SEC22; protein id: At3g11660.1, by cDNA: 8166., supported by cDNA: gi_9502171 [Arabidopsis
  misc_feature (4)..(206): Homolog of NCBI NO: 28392929 NR Description: putative VAMP protein SEC22 [Arabidopsis thaliana]
  misc_feature (1)..(206): Homolog of NCBI NO: 15227538 NR Description: hairpin-induced protein, putative (HIN1); protein
  misc_feature (1)..(206): Homolog of NCBI NO: 15240001 NR Description: hairpin-induced protein, putative (HIN1); protein
  misc_feature (1)..(205): Homolog of NCBI NO: 15233951 NR Description: hairpin-induced protein, putative (HIN1); protein At4g09590.1 [Arabidopsis thaliana] >gi|25354574|pir||A85098
  misc_feature (1)..(205): Homolog of NCBI NO: 15227540 NR Description: hairpin-induced protein, putative (HIN1); protein
  misc_feature (1)..(206): Homolog of NCBI NO: 38637038 NR Description: harpin-induced protein 1 family (HIN1)-like
MTEKECEHHHDEDEKMRKRIGALVLGFLAAVLFVVFLVWAILHPHGPRFVLQDATIYAFNVSQPNYLTSNLQVTLSSRNPNDKIGIFYDRLDIYASYRNQQVTLATLLPATYQGHLDVTIWSPFLYGTTVPVAPYFSPALSQDLTAGMVLLNIKIDGWVRWKVGTWVSGRYRLHVNCPAYITLAGHFSGDGPAVKYQLVQRCAVDV

SEQ ID NO: 90179 - protein, 191 aa, Arabidopsis thaliana
  peptide (1)..(191): Ceres Seq. ID no. 12722897
  misc_feature (1)..(191): Homolog of NCBI NO: 15229906 NR Description: hairpin-induced protein, putative (HIN1); protein At3g44220.1 [Arabidopsis thaliana] >gi|11282595|pir||T49138
  misc_feature (1)..(191): Homolog of NCBI NO: 22326984 NR Description: similar to hairpin-induced protein, putative
  misc_feature (1)..(191): Homolog of NCBI NO: 15231227 NR Description: hairpin-induced protein, putative (HIN1); protein At3g52470.1, supported by cDNA: 92178., supported by cDNA: supported by cDNA: gi_21281063 [Arabidopsis thaliana]
  misc_feature (1)..(191): Homolog of NCBI NO: 18399308 NR Description: VAMP protein SEC22; protein id: At3g11660.1, by cDNA: 8166., supported by cDNA: gi_9502171 [Arabidopsis
  misc_feature (1)..(191): Homolog of NCBI NO: 28392929 NR Description: putative VAMP protein SEC22 [Arabidopsis thaliana]
  misc_feature (1)..(191): Homolog of NCBI NO: 15227538 NR Description: hairpin-induced protein, putative (HIN1); protein
  misc_feature (1)..(191): Homolog of NCBI NO: 15240001 NR Description: hairpin-induced protein, putative (HIN1); protein
  misc_feature (1)..(190): Homolog of NCBI NO: 15233951 NR Description: hairpin-induced protein, putative (HIN1); protein At4g09590.1 [Arabidopsis thaliana] >gi|25354574|pir||A85098
  misc_feature (1)..(190): Homolog of NCBI NO: 15227540 NR Description: hairpin-induced protein, putative (HIN1); protein
  misc_feature (1)..(191): Homolog of NCBI NO: 38637038 NR Description: harpin-induced protein 1 family (HIN1)-like
MRKRIGALVLGFLAAVLFVVFLVWAILHPHGPRFVLQDATIYAFNVSQPNYLTSNLQVTLSSRNPNDKIGIFYDRLDIYASYRNQQVTLATLLPATYQGHLDVTIWSPFLYGTTVPVAPYFSPALSQDLTAGMVLLNIKIDGWVRWKVGTWVSGRYRLHVNCPAYITLAGHFSGDGPAVKYQLVQRCAVDV

SEQ ID NO: 90180 - DNA, 1500 bp, Arabidopsis thaliana
  misc_feature (1)..(1500): Ceres Seq. ID no. 12722908
  misc_feature: MA Experiment ID: 20000173 Result: Up-regulated in Transcription
  misc_feature: MA Experiment 20000173 PARAMETER Experiment Name: At_42deg_Heat_P Parameter: Age (day) Value: 14
  misc_feature: MA Experiment 20000173 PARAMETER Experiment Name: At_42deg_Heat_P Parameter: Organism Value: A. thaliana
  misc_feature: MA Experiment 20000173 PARAMETER Experiment Name: At_42deg_Heat_P Parameter: Plant Line Value: WS
  misc_feature: MA Experiment 20000173 PARAMETER Experiment Name: At_42deg_Heat_P Parameter: Temperature (deg C) Value: 42 vs. 22
  misc_feature: MA Experiment 20000173 PARAMETER Experiment Name: At_42deg_Heat_P Parameter: Timepoint (hr) Value: 6
  misc_feature: MA Experiment 20000173 PARAMETER Experiment Name: At_42deg_Heat_P Parameter: Tissue Value: Aerial
  misc_feature: MA Experiment ID: 20000264 Result: Up-regulated in Transcription
  misc_feature: MA Experiment 20000264 PARAMETER Experiment Name: At_Open_Flower_P Parameter: Age (day) Value: 21
  misc_feature: MA Experiment 20000264 PARAMETER Experiment Name: At_Open_Flower_P Parameter: Plant Line Value: WS
  misc_feature: MA Experiment 20000264 PARAMETER Experiment Name: At_Open_Flower_P Parameter: Tissue Value: Open Flower vs. Whole Plant
  misc_feature: MA Experiment ID: 20000265 Result: Up-regulated in Transcription
  misc_feature: MA Experiment 20000265 PARAMETER Experiment Name: At_Open_Flower_P Parameter: Age (day) Value: 21
  misc_feature: MA Experiment 20000265 PARAMETER Experiment Name: At_Open_Flower_P Parameter: Plant Line Value: WS
  misc_feature: MA Experiment 20000265 PARAMETER Experiment Name: At_Open_Flower_P Parameter: Tissue Value: Closed Flower vs. Whole Plant
  misc_feature: MA Experiment ID: 20000286 Result: Up-regulated in Transcription
  misc_feature: MA Experiment 20000286 PARAMETER Experiment Name: At_Open_Flower_P Parameter: Age (day) Value: 21
  misc_feature: MA Experiment 20000286 PARAMETER Experiment Name: At_Open_Flower_P Parameter: Plant Line Value: WS
  misc_feature: MA Experiment 20000286 PARAMETER Experiment Name: At_Open_Flower_P Parameter: Tissue Value: Half Open vs. Whole Plant
  misc_feature: MA Experiment ID: 20000794 Result: Up-regulated in Transcription
  misc_feature: MA Experiment 20000794 PARAMETER Experiment Name: At_Petals_P Parameter: Age (day) Value: 23-25 days
  misc_feature: MA Experiment 20000794 PARAMETER Experiment Name: At_Petals_P Parameter: Plant Line Value: WS
  misc_feature: MA Experiment 20000794 PARAMETER Experiment Name: At_Petals_P Parameter: Tissue Value: Petals vs. Whole plant
atgtctatcttcctttgtttcctcttactcttgcctctctctttaatcctttttaaaaagcttttaccatcgaaaggaaagcttcctccgggacctattggacttccgatcatcggaaacttacaccagcttggaaaattgctttacaaatctttccacaaaatctcccaagaatatggaccggtggtacttctccgtttaggggtagtccctgtcatcgttgtctcttccaaagaaggagctgaggaagtgctcaaaactcatgatcttgagacttgtacccgacctaaaacggcagcgactggcttgtttacttacaattttaaagacattggttttgctccttttggcgacgactggagagagatgaggaaaatcacaacgctcgagctctttagcgtgaaaaaacttaaatctttcaggtatattagagaggaagagagcgaattgttggtcaagaaaatatcaaaatctgttgacgaaacacaaaactcatcagtagatttgaggaaagtccttttctccttcacggctagcatcatttgtagacttgcttttggacaaaacttccaccaatgcgattttgttgatgctagcctggaagagttagtgcttgaatcagaggccaacctcggcaccttcgcgttcgctgacttcttccctggagggtggctcatagataggatctcgggtcaacattcaagggtgaacaaagccttttacaaactcaccaatttctataaacatgtaatcgatgatcatttgaagactggacaacctcaagatcactcggacatcgtcagtgtcatgttggatatgatcaataaacccacaaaagctgattcgtttaaagtcacttatgaccatcttaaaggagtcatgtcagatatttttttggctggagtgaacgggggagccaacacaatgatatggacattgacagagctaagcagacatccgagagtgatgaaaaaactccaagaagagatacgagcaatgcttggacccaacaaagagagaatcacagaagaagatctagagaaagttgagtacttgaaattggtgatggtggaaacattcagattacacccaccagctcctctcttgctcccaagactaactatgtccgacatcaagattcaaggctacaacattcccaagaacaccatgatccaaatcaacacttacgcaataggacgggatcccaaatattggaaacaacctggtgagttcatccccgagaggtttcttgatagccctatcgattataagggtcaacattttgagctattaccgtttggagctggacgtaggatctgtcctgggatggccaccgggatcaccatggtcgagctcgggcttcttaaccttctttacttcttcgattggagtttgcccaatggaatgactattgaagatattgacatggaagaagacgaagggttcgctatcgccaagaaagtccctcttgttctcatacaaacttctcatcgctggtga

SEQ ID NO: 90181 - protein, 499 aa, Arabidopsis thaliana
  peptide (1)..(499): Ceres Seq. ID no. 12722909
  misc_feature (1)..(499): Homolog of NCBI NO: 15229913 NR Description: cytochrome p450 family; protein id: At3g44250.1
  misc_feature (1)..(499): Homolog of NCBI NO: 30923413 NR Description: Cytochrome P450 71B38
  misc_feature (1)..(499): Homolog of NCBI NO: 15231782 NR Description: cytochrome P450 monooxygenase; protein id: supported by cDNA: gi_3164131 [Arabidopsis thaliana]
  misc_feature (1)..(497): Homolog of NCBI NO: 15231524 NR Description: cytochrome p450 family; protein id: At3g26190.1 thaliana] >gi|13878385|sp|Q9LTM2|C72L_ARATH Cytochrome P450 71B21
  misc_feature (1)..(499): Homolog of NCBI NO: 15231525 NR Description: cytochrome p450 family; protein id: At3g26200.1, by cDNA: gi_13430717 [Arabidopsis thaliana] Cytochrome P450 71B22 >gi|11994439|dbj|BAB02441.1| cytochrome
  misc_feature (2)..(495): Homolog of NCBI NO: 13878369 NR Description: CYTOCHROME P450 71B8
  misc_feature (63)..(499): Homolog of NCBI NO: 15724230 NR Description: AT3g53280/T4D2_200 [Arabidopsis thaliana]
  misc_feature (63)..(499): Homolog of NCBI NO: 22655216 NR Description: cytochrome P450 71B5 [Arabidopsis thaliana]
  misc_feature (1)..(495): Homolog of NCBI NO: 15231786 NR Description: cytochrome p450 family; protein id: At3g53300.1, by cDNA: gi_15810490 [Arabidopsis thaliana] Cytochrome P450 71B31 >gi|11249493|pir||T46176 probable
  misc_feature (1)..(495): Homolog of NCBI NO: 15810491 NR Description: putative cytochrome P450 protein [Arabidopsis
MSIFLCFLLLLPLSLILFKKLLPSKGKLPPGPIGLPIIGNLHQLGKLLYKSFHKISQEYGPVVLLRLGVVPVIVVSSKEGAEEVLKTHDLETCTRPKTAATGLFTYNFKDIGFAPFGDDWREMRKITTLELFSVKKLKSFRYIREEESELLVKKISKSVDETQNSSVDLRKVLFSFTASIICRLAFGQNFHQCDFVDASLEELVLESEANLGTFAFADFFPGGWLIDRISGQHSRVNKAFYKLTNFYKHVIDDHLKTGQPQDHSDIVSVMLDMINKPTKADSFKVTYDHLKGVMSDIFLAGVNGGANTMIWTLTELSRHPRVMKKLQEEIRAMLGPNKERITEEDLEKVEYLKLVMVETFRLHPPAPLLLPRLTMSDIKIQGYNIPKNTMIQINTYAIGRDPKYWKQPGEFIPERFLDSPIDYKGQHFELLPFGAGRRICPGMATGITMVELGLLNLLYFFDWSLPNGMTIEDIDMEEDEGFAIAKKVPLVLIQTSHRW

SEQ ID NO: 90182 - protein, 377 aa, Arabidopsis thaliana
  peptide (1)..(377): Ceres Seq. ID no. 12722910
  misc_feature (1)..(377): Homolog of NCBI NO: 15229913 NR Description: cytochrome p450 family; protein id: At3g44250.1
  misc_feature (1)..(377): Homolog of NCBI NO: 30923413 NR Description: Cytochrome P450 71B38
  misc_feature (1)..(377): Homolog of NCBI NO: 15231782 NR Description: cytochrome P450 monooxygenase; protein id: supported by cDNA: gi_3164131 [Arabidopsis thaliana]
  misc_feature (1)..(375): Homolog of NCBI NO: 15231524 NR Description: cytochrome p450 family; protein id: At3g26190.1 thaliana] >gi|13878385|sp|Q9LTM2|C72L_ARATH Cytochrome P450 71B21
  misc_feature (1)..(377): Homolog of NCBI NO: 15231525 NR Description: cytochrome p450 family; protein id: At3g26200.1, by cDNA: gi_13430717 [Arabidopsis thaliana] Cytochrome P450 71B22 >gi|11994439|dbj|BAB02441.1| cytochrome
  misc_feature (1)..(373): Homolog of NCBI NO: 13878369 NR Description: CYTOCHROME P450 71B8
  misc_feature (1)..(377): Homolog of NCBI NO: 15724230 NR Description: AT3g53280/T4D2_200 [Arabidopsis thaliana]
  misc_feature (1)..(377): Homolog of NCBI NO: 22655216 NR Description: cytochrome P450 71B5 [Arabidopsis thaliana]
  misc_feature (1)..(373): Homolog of NCBI NO: 15231786 NR Description: cytochrome p450 family; protein id: At3g53300.1, by cDNA: gi_15810490 [Arabidopsis thaliana] Cytochrome P450 71B31 >gi|11249493|pir||T46176 probable
  misc_feature (1)..(373): Homolog of NCBI NO: 15810491 NR Description: putative cytochrome P450 protein [Arabidopsis
MRKITTLELFSVKKLKSFRYIREEESELLVKKISKSVDETQNSSVDLRKVLFSFTASIICRLAFGQNFHQCDFVDASLEELVLESEANLGTFAFADFFPGGWLIDRISGQHSRVNKAFYKLTNFYKHVIDDHLKTGQPQDHSDIVSVMLDMINKPTKADSFKVTYDHLKGVMSDIFLAGVNGGANTMIWTLTELSRHPRVMKKLQEEIRAMLGPNKERITEEDLEKVEYLKLVMVETFRLHPPAPLLLPRLTMSDIKIQGYNIPKNTMIQINTYAIGRDPKYWKQPGEFIPERFLDSPIDYKGQHFELLPFGAGRRICPGMATGITMVELGLLNLLYFFDWSLPNGMTIEDIDMEEDEGFAIAKKVPLVLIQTSHRW

SEQ ID NO: 90183 - DNA, 1008 bp, Arabidopsis thaliana
  misc_feature (1)..(1008): Ceres Seq. ID no. 12722911
  misc_feature: MA Experiment ID: 20000179 Result: Down-regulated in Transcription
  misc_feature: MA Experiment 20000179 PARAMETER Experiment Name: At_Germinating_Seeds_P Parameter: Age (hr) Value: 6 vs. 0
  misc_feature: MA Experiment 20000179 PARAMETER Experiment Name: At_Germinating_Seeds_P Parameter: Tissue Value: Germinating Seeds
  misc_feature: MA Experiment ID: 20000180 Result: Down-regulated in Transcription
  misc_feature: MA Experiment 20000180 PARAMETER Experiment Name: At_Germinating_Seeds_P Parameter: Age (hr) Value: 24 vs. 0
  misc_feature: MA Experiment 20000180 PARAMETER Experiment Name: At_Germinating_Seeds_P Parameter: Tissue Value: Germinating Seeds
  misc_feature: MA Experiment ID: 20000437 Result: Up-regulated in Transcription
  misc_feature: MA Experiment 20000437 PARAMETER Experiment Name: At_Drought_P Parameter: Age (day) Value: 8
  misc_feature: MA Experiment 20000437 PARAMETER Experiment Name: At_Drought_P Parameter: Organism Value: A. thaliana
  misc_feature: MA Experiment 20000437 PARAMETER Experiment Name: At_Drought_P Parameter: Plant Line Value: WS
  misc_feature: MA Experiment 20000437 PARAMETER Experiment Name: At_Drought_P Parameter: Timepoint (hr) Value: 24
  misc_feature: MA Experiment 20000437 PARAMETER Experiment Name: At_Drought_P Parameter: Tissue Value: Whole Plant
  misc_feature: MA Experiment 20000437 PARAMETER Experiment Name: At_Drought_P Parameter: Treatment Value: Drought vs. No Drought
  misc_feature: MA Experiment ID: 20001556 Result: Up-regulated in Transcription
  misc_feature: MA Experiment 20001556 PARAMETER Experiment Name: At_Drought_Soil_Dry_P Parameter: Age (day) Value: 26
  misc_feature: MA Experiment 20001556 PARAMETER Experiment Name: At_Drought_Soil_Dry_P Parameter: Organism Value: A. thaliana
  misc_feature: MA Experiment 20001556 PARAMETER Experiment Name: At_Drought_Soil_Dry_P Parameter: Plant Line Value: WS
  misc_feature: MA Experiment 20001556 PARAMETER Experiment Name: At_Drought_Soil_Dry_P Parameter: Post Timepoint (hr) Value: None
  misc_feature: MA Experiment 20001556 PARAMETER Experiment Name: At_Drought_Soil_Dry_P Parameter: Post-Treatment Value: None
  misc_feature: MA Experiment 20001556 PARAMETER Experiment Name: At_Drought_Soil_Dry_P Parameter: Timepoint (day) Value: 12
  misc_feature: MA Experiment 20001556 PARAMETER Experiment Name: At_Drought_Soil_Dry_P Parameter: Treatment Value: Drought vs. No Drought
  misc_feature: MA Experiment ID: 20001905 Result: Up-regulated in Transcription
  misc_feature: MA Experiment 20001905 PARAMETER Experiment Name: At_Drought_Reproduction_P Parameter: Age (day) Value: 40
  misc_feature: MA Experiment 20001905 PARAMETER Experiment Name: At_Drought_Reproduction_P Parameter: Organism Value: A. thaliana
  misc_feature: MA Experiment 20001905 PARAMETER Experiment Name: At_Drought_Reproduction_P Parameter: Plant Line Value: WS
  misc_feature: MA Experiment 20001905 PARAMETER Experiment Name: At_Drought_Reproduction_P Parameter: Timepoint (day) Value: 10
  misc_feature: MA Experiment 20001905 PARAMETER Experiment Name: At_Drought_Reproduction_P Parameter: Tissue Value: Rosettes
  misc_feature: MA Experiment 20001905 PARAMETER Experiment Name: At_Drought_Reproduction_P Parameter: Treatment Value: Drought vs. No Drought
  misc_feature: MA Experiment ID: 20001911 Result: Up-regulated in Transcription
  misc_feature: MA Experiment 20001911 PARAMETER Experiment Name: At_Drought_Reproduction_P Parameter: Age (day) Value: 40
  misc_feature: MA Experiment 20001911 PARAMETER Experiment Name: At_Drought_Reproduction_P Parameter: Organism Value: A. thaliana
  misc_feature: MA Experiment 20001911 PARAMETER Experiment Name: At_Drought_Reproduction_P Parameter: Plant Line Value: WS
  misc_feature: MA Experiment 20001911 PARAMETER Experiment Name: At_Drought_Reproduction_P Parameter: Timepoint (day) Value: 10
  misc_feature: MA Experiment 20001911 PARAMETER Experiment Name: At_Drought_Reproduction_P Parameter: Tissue Value: Flowers
  misc_feature: MA Experiment 20001911 PARAMETER Experiment Name: At_Drought_Reproduction_P Parameter: Treatment Value: Drought vs. No Drought
atggcagctgcaccaccgatcgagccggcggtgacgacgacgttccctggcttcaaattctccccgaccgacatcgaacttatatcttattacttgaagaggaagatggatggtttggagagatctgttgagattatacctgaggttgagatttacaacttcgagccttgggatttacctgataagtctatcgttaaatcggatagcgaatggttcttcttctgtgctcgcggtaagaagtatccccacggttcacagaacagaagagcaaccaagataggatattggaaagccacaggaaaagagcgtaatgtgaagtcaggttctgaggtcattggaacaaagagaacgcttgtattccacattggccgcgcgccaaaaggaggaagaacggaatggcttatgcatgagtactgcatgattggagtatcactggatgctctggttatttgccgacttaggaggaatactgaatttcaagggagtacaattcaaaagccaccacaaccaagtttaccactggataagcacgtaaacttgcggaatgaagctatttcagaaagtatttatggttgggaaactatggttgatttctacttatcaagtgagtcagggcaagaactacttagtgaaatagcagaatcttcacaatcttcacaaaatccacaggttcctagtgaagaagatttctatgccgatatactgagggatgaaatagtaaagctagatgatccggcggtatccggtaatacactgatcaatgtaccaaggcttcaaacagagtccaataccacaagagtactacctttacctgacatggtagacaaacaaatgcaatcgttgctacagaaactaccattacaaaatgacactggagaagagaacaacatatccatgtcaaattgctttatcggtatctactcgattaagtctataaaccgagcgcgatgggacgttgttgtttggttactcgttatgatagccgtgttggtgttttatttagtgtga

SEQ ID NO: 90184 - protein, 335 aa, Arabidopsis thaliana
  peptide (1)..(335): Ceres Seq. ID no. 12722912
  misc_feature (14)..(141): Pfam Name: No apical meristem (NAM) protein Pfam Description: No apical meristem (NAM) protein
  misc_feature (1)..(335): Homolog of NCBI NO: 15229931 NR Description: putative protein; protein id: At3g44290.1
  misc_feature (12)..(334): Homolog of NCBI NO: 9757809 NR Description: NAM (no apical meristem)-like protein
  misc_feature (12)..(334): Homolog of NCBI NO: 18420448 NR Description: NAM (no apical meristem)-like protein; protein At5g22290.1, supported by cDNA: gi_14326464, supported by cDNA: [Arabidopsis thaliana] >gi|14326465|gb|AAK60278.1|AF385685_1
  misc_feature (10)..(264): Homolog of NCBI NO: 15225866 NR Description: NAM (no apical meristem)-like protein; protein At2g27300.1 [Arabidopsis thaliana] >gi|25407881|pir||C84671 NAM
  misc_feature (16)..(158): Homolog of NCBI NO: 37537036 NR Description: putative NAM (no apical meristem) protein [Oryza
  misc_feature (16)..(168): Homolog of NCBI NO: 15237469 NR Description: NAM-like; protein id: At5g46590.1 [Arabidopsis
  misc_feature (16)..(138): Homolog of NCBI NO: 21105751 NR Description: nam-like protein 11 [Petunia x hybrida]
  misc_feature (16)..(153): Homolog of NCBI NO: 15218843 NR Description: jasmonic acid, putative; protein id: At1g65910.1
  misc_feature (16)..(157): Homolog of NCBI NO: 34902214 NR Description: Hypothetical protein [Oryza sativa (japonica group)] >gi|27452910|gb|AAO15294.1| Hypothetical protein [Oryza
  misc_feature (16)..(162): Homolog of NCBI NO: 34902994 NR Description: unnamed protein product [Oryza sativa (japonica group)] >gi|6730946|dbj|BAA89802.1| OsNAC8 protein [Oryza sativa]
MAAAPPIEPAVTTTFPGFKFSPTDIELISYYLKRKMDGLERSVEIIPEVEIYNFEPWDLPDKSIVKSDSEWFFFCARGKKYPHGSQNRRATKIGYWKATGKERNVKSGSEVIGTKRTLVFHIGRAPKGGRTEWLMHEYCMIGVSLDALVICRLRRNTEFQGSTIQKPPQPSLPLDKHVNLRNEAISESIYGWETMVDFYLSSESGQELLSEIAESSQSSQNPQVPSEEDFYADILRDEIVKLDDPAVSGNTLINVPRLQTESNTTRVLPLPDMVDKQMQSLLQKLPLQNDTGEENNISMSNCFIGIYSIKSINRARWDVVVWLLVMIAVLVFYLV

SEQ ID NO: 90185 - protein, 300 aa, Arabidopsis thaliana
  peptide (1)..(300): Ceres Seq. ID no. 12722913
  misc_feature (1)..(106): Pfam Name: No apical meristem (NAM) protein Pfam Description: No apical meristem (NAM) protein
  misc_feature (1)..(300): Homolog of NCBI NO: 15229931 NR Description: putative protein; protein id: At3g44290.1
  misc_feature (1)..(299): Homolog of NCBI NO: 9757809 NR Description: NAM (no apical meristem)-like protein
  misc_feature (1)..(299): Homolog of NCBI NO: 18420448 NR Description: NAM (no apical meristem)-like protein; protein At5g22290.1, supported by cDNA: gi_14326464, supported by cDNA: [Arabidopsis thaliana] >gi|14326465|gb|AAK60278.1|AF385685_1
  misc_feature (1)..(229): Homolog of NCBI NO: 15225866 NR Description: NAM (no apical meristem)-like protein; protein At2g27300.1 [Arabidopsis thaliana] >gi|25407881|pir||C84671 NAM
  misc_feature (1)..(123): Homolog of NCBI NO: 37537036 NR Description: putative NAM (no apical meristem) protein [Oryza
  misc_feature (1)..(133): Homolog of NCBI NO: 15237469 NR Description: NAM-like; protein id: At5g46590.1 [Arabidopsis
  misc_feature (1)..(103): Homolog of NCBI NO: 21105751 NR Description: nam-like protein 11 [Petunia x hybrida]
  misc_feature (1)..(118): Homolog of NCBI NO: 15218843 NR Description: jasmonic acid, putative; protein id: At1g65910.1
  misc_feature (1)..(122): Homolog of NCBI NO: 34902214 NR Description: Hypothetical protein [Oryza sativa (japonica group)] >gi|27452910|gb|AAO15294.1| Hypothetical protein [Oryza
  misc_feature (1)..(127): Homolog of NCBI NO: 34902994 NR Description: unnamed protein product [Oryza sativa (japonica group)] >gi|6730946|dbj|BAA89802.1| OsNAC8 protein [Oryza sativa]
MDGLERSVEIIPEVEIYNFEPWDLPDKSIVKSDSEWFFFCARGKKYPHGSQNRRATKIGYWKATGKERNVKSGSEVIGTKRTLVFHIGRAPKGGRTEWLMHEYCMIGVSLDALVICRLRRNTEFQGSTIQKPPQPSLPLDKHVNLRNEAISESIYGWETMVDFYLSSESGQELLSEIAESSQSSQNPQVPSEEDFYADILRDEIVKLDDPAVSGNTLINVPRLQTESNTTRVLPLPDMVDKQMQSLLQKLPLQNDTGEENNISMSNCFIGIYSIKSINRARWDVVVWLLVMIAVLVFYLV

SEQ ID NO: 90186 - protein, 201 aa, Arabidopsis thaliana
  peptide (1)..(201): Ceres Seq. ID no. 12722914
  misc_feature (1)..(201): Homolog of NCBI NO: 15229931 NR Description: putative protein; protein id: At3g44290.1
  misc_feature (1)..(200): Homolog of NCBI NO: 9757809 NR Description: NAM (no apical meristem)-like protein
  misc_feature (1)..(200): Homolog of NCBI NO: 18420448 NR Description: NAM (no apical meristem)-like protein; protein At5g22290.1, supported by cDNA: gi_14326464, supported by cDNA: [Arabidopsis thaliana] >gi|14326465|gb|AAK60278.1|AF385685_1
  misc_feature (1)..(130): Homolog of NCBI NO: 15225866 NR Description: NAM (no apical meristem)-like protein; protein At2g27300.1 [Arabidopsis thaliana] >gi|25407881|pir||C84671 NAM
  misc_feature (1)..(24): Homolog of NCBI NO: 37537036 NR Description: putative NAM (no apical meristem) protein [Oryza
  misc_feature (1)..(34): Homolog of NCBI NO: 15237469 NR Description: NAM-like; protein id: At5g46590.1 [Arabidopsis
  misc_feature (1)..(19): Homolog of NCBI NO: 15218843 NR Description: jasmonic acid, putative; protein id: At1g65910.1
  misc_feature (1)..(23): Homolog of NCBI NO: 34902214 NR Description: Hypothetical protein [Oryza sativa (japonica group)] >gi|27452910|gb|AAO15294.1| Hypothetical protein [Oryza
  misc_feature (1)..(28): Homolog of NCBI NO: 34902994 NR Description: unnamed protein product [Oryza sativa (japonica group)] >gi|6730946|dbj|BAA89802.1| OsNAC8 protein [Oryza sativa]
  misc_feature (1)..(82): Homolog of NCBI NO: 30689531 NR Description: No apical meristem (NAM) protein family thaliana] >gi|9408601|gb|AAF87300.1|AF281062_1 TIP [Arabidopsis
MHEYCMIGVSLDALVICRLRRNTEFQGSTIQKPPQPSLPLDKHVNLRNEAISESIYGWETMVDFYLSSESGQELLSEIAESSQSSQNPQVPSEEDFYADILRDEIVKLDDPAVSGNTLINVPRLQTESNTTRVLPLPDMVDKQMQSLLQKLPLQNDTGEENNISMSNCFIGIYSIKSINRARWDVVVWLLVMIAVLVFYLV

SEQ ID NO: 90187 - DNA, 2224 bp, Arabidopsis thaliana
  misc_feature (1)..(2224): Ceres Seq. ID no. 12722933
  misc_feature: MA Experiment ID: 20000180 Result: Down-regulated in Transcription
  misc_feature: MA Experiment 20000180 PARAMETER Experiment Name: At_Germinating_Seeds_P Parameter: Age (hr) Value: 24 vs. 0
  misc_feature: MA Experiment 20000180 PARAMETER Experiment Name: At_Germinating_Seeds_P Parameter: Tissue Value: Germinating Seeds
  misc_feature: MA Experiment ID: 20000184 Result: Down-regulated in Transcription
  misc_feature: MA Experiment 20000184 PARAMETER Experiment Name: At_Shoots__P Parameter: Age (day) Value: 7
  misc_feature: MA Experiment 20000184 PARAMETER Experiment Name: At_Shoots__P Parameter: Tissue Value: Shoots vs. Whole Plant
gtagcaaaccttgctttcaatcgacgaaggagttttgagttgaggaagtgagtagaaatcaatggaggaagaatctaagaatggcggaaccacgattccgactgaagaattggcggtggttgcggtgccacctgtagtagaagaagaggagccgatggtcggacctggaccagctccacgaggcaaacgcaagcgtccgcttcaattcgagcaagcttatcttgattcgcttccttctgctaatatgtatgagaaaagttatatgcatcgagatgtagttacacatgttgctgtttcagcagctgagttctttataagtggaagtatggatggtcacttgaaattttggaagaaaaagggtgttggtatcgagtttgctaagcatttccgctcccatctcggtccaattgaaggtctagcggttagcattgatggtttgctttgctgtacaatctcaaatgatcatgctgttaaaatatatgatgttgtcaactacgatatgatggccatgatccgtttgccatatattcctggtgctgttgagtgggtctacaagcaaggggatgtcaaagctaaacttgctgtcagtgaccgagactctttgtttgtgcacatttatgatcctcgttctggttccaacgaacccattgcttcaaaagagatacatatgaatccaattaaggtcatgaagtacaatcctgtttcggacacaatgatctctggtgacacaaaaggaatcattgagtactggagtgcaactacattacagtttcccgaggatgaggtaaactttaaactgaagagtgatacaaatctctttgagattataaagtgcaaaacaacaatctctgccattgaggtgagtccagatggtaaacagttttccattacagctcctgatcgtaggattcgtgtgttctggtttagaactggtaaactgaggcgggtatatgatgagtcacttgtggtggcccaagatctgcagaggagtgatgctcccttatacaggcttgaagctattgactttggtagaagaatggcagttgaaaaggaacttgaaaaaaccgagagtgctccgcagcccaatgctgtgtttgatgaaagctctaatttccttatatacgccacttttcttggaataaaagtaataaatttacacaccaacacagttgcaaggatccttggaaaggtggagagtaatgaaaggtatctgagagttgcattatatcaaggtgatcaaggaggcaagaaagttagaaagattcctgcagctgcagcaaatgtaaatgaaagcaaggagcctttgactgatccgactatcctatgctgtgcctttaagaaacacaggatctatatgttcagtcggagagagccagaagaacctgaagatgcaagccaagggagagatgtgtttaacgagaagcctgctgctgatgaacttatgtctgtctcagatattggaaactcagccacaacatcccttccagagaacgtgataatgcatactacgcttggtgacattcacatgaagctttacccagaagaatgtcccaaaactgtggagaatttcacaacacactgtagaaatggctattacgataaccaccttttccatcgggttatcagaggatttatgatacagactggagatcctcttggggatggtactggaggacagtcaatttggggcagagaatttgaggacgagtttcacaaaagtctaaggcatgacaggccgttcacattgtctatggcaaatgccggcccaaacacaaatgggtctcagttcttcatcacaacagtggctacaccgtggctagacaataagcacactgtttttggaagagttgtgaagggaatggacgtcgttcagggtatagagaaagtgaagacagacaagaacgacaggccttaccaagatgtgaagatacttaatgtcaccgttccgaaatcttagcatctttgctactgtctcaaagatagtgaacaatctatgctgatccgtaaccccgtgattggttctatgctgggaagttgttcttgcggagatggatcgaactgtgggatatgtttgttgtacccgagcagatcaggttaagttggtggcatcatcttcttgacactaaacattattttatgtttttgtcaaacaaattttatgagaatgcttagtgaacaaaaagacttcaacttctaatgttacttcaattcctcttattttctt

SEQ ID NO: 90188 - protein, 631 aa, Arabidopsis thaliana
  peptide (1)..(631): Ceres Seq. ID no. 12722934
  misc_feature (2)..(628): Homolog of NCBI NO: 559713 NR Description: KIAA0073 [Homo sapiens]
  misc_feature (2)..(628): Homolog of NCBI NO: 24308049 NR Description: KIAA0073 protein [Homo sapiens]
  misc_feature (27)..(628): Homolog of NCBI NO: 34853749 NR Description: similar to RIKEN cDNA 4632422M10 [Rattus
  misc_feature (27)..(628): Homolog of NCBI NO: 27370202 NR Description: RIKEN cDNA 4632422M10; hypothetical protein [Mus musculus] >gi|26324484|dbj|BAC25996.1| unnamed protein
  misc_feature (27)..(628): Homolog of NCBI NO: 31211583 NR Description: ENSANGP00000014257 [Anopheles gambiae]
  misc_feature (13)..(626): Homolog of NCBI NO: 19922912 NR Description: CG3511-PA [Drosophila melanogaster]
  misc_feature (2)..(628): Homolog of NCBI NO: 40747323 NR Description: hypothetical protein AN0380.2 [Aspergillus
  misc_feature (31)..(628): Homolog of NCBI NO: 32420051 NR Description: hypothetical protein [Neurospora crassa]
  misc_feature (35)..(628): Homolog of NCBI NO: 17506311 NR Description: CYcloPhilin family CYP-15 (70.8 kD) (cyp-15)
  misc_feature (236)..(628): Homolog of NCBI NO: 23613125 NR Description: cyclophilin, putative [Plasmodium falciparum 3D7]
MEEESKNGGTTIPTEELAVVAVPPVVEEEEPMVGPGPAPRGKRKRPLQFEQAYLDSLPSANMYEKSYMHRDVVTHVAVSAAEFFISGSMDGHLKFWKKKGVGIEFAKHFRSHLGPIEGLAVSIDGLLCCTISNDHAVKIYDVVNYDMMAMIRLPYIPGAVEWVYKQGDVKAKLAVSDRDSLFVHIYDPRSGSNEPIASKEIHMNPIKVMKYNPVSDTMISGDTKGIIEYWSATTLQFPEDEVNFKLKSDTNLFEIIKCKTTISAIEVSPDGKQFSITAPDRRIRVFWFRTGKLRRVYDESLVVAQDLQRSDAPLYRLEAIDFGRRMAVEKELEKTESAPQPNAVFDESSNFLIYATFLGIKVINLHTNTVARILGKVESNERYLRVALYQGDQGGKKVRKIPAAAANVNESKEPLTDPTILCCAFKKHRIYMFSRREPEEPEDASQGRDVFNEKPAADELMSVSDIGNSATTSLPENVIMHTTLGDIHMKLYPEECPKTVENFTTHCRNGYYDNHLFHRVIRGFMIQTGDPLGDGTGGQSIWGREFEDEFHKSLRHDRPFTLSMANAGPNTNGSQFFITTVATPWLDNKHTVFGRVVKGMDVVQGIEKVKTDKNDRPYQDVKILNVTVPKS

SEQ ID NO: 90189 - protein, 600 aa, Arabidopsis thaliana
  peptide (1)..(600): Ceres Seq. ID no. 12722935
  misc_feature (1)..(597): Homolog of NCBI NO: 559713 NR Description: KIAA0073 [Homo sapiens]
  misc_feature (1)..(597): Homolog of NCBI NO: 24308049 NR Description: KIAA0073 protein [Homo sapiens]
  misc_feature (1)..(597): Homolog of NCBI NO: 34853749 NR Description: similar to RIKEN cDNA 4632422M10 [Rattus
  misc_feature (1)..(597): Homolog of NCBI NO: 27370202 NR Description: RIKEN cDNA 4632422M10; hypothetical protein [Mus musculus] >gi|26324484|dbj|BAC25996.1| unnamed protein
  misc_feature (1)..(597): Homolog of NCBI NO: 31211583 NR Description: ENSANGP00000014257 [Anopheles gambiae]
  misc_feature (1)..(595): Homolog of NCBI NO: 19922912 NR Description: CG3511-PA [Drosophila melanogaster]
  misc_feature (1)..(597): Homolog of NCBI NO: 40747323 NR Description: hypothetical protein AN0380.2 [Aspergillus
  misc_feature (1)..(597): Homolog of NCBI NO: 32420051 NR Description: hypothetical protein [Neurospora crassa]
  misc_feature (4)..(597): Homolog of NCBI NO: 17506311 NR Description: CYcloPhilin family CYP-15 (70.8 kD) (cyp-15)
  misc_feature (205)..(597): Homolog of NCBI NO: 23613125 NR Description: cyclophilin, putative [Plasmodium falciparum 3D7]
MVGPGPAPRGKRKRPLQFEQAYLDSLPSANMYEKSYMHRDVVTHVAVSAAEFFISGSMDGHLKFWKKKGVGIEFAKHFRSHLGPIEGLAVSIDGLLCCTISNDHAVKIYDVVNYDMMAMIRLPYIPGAVEWVYKQGDVKAKLAVSDRDSLFVHIYDPRSGSNEPIASKEIHMNPIKVMKYNPVSDTMISGDTKGIIEYWSATTLQFPEDEVNFKLKSDTNLFEIIKCKTTISAIEVSPDGKQFSITAPDRRIRVFWFRTGKLRRVYDESLVVAQDLQRSDAPLYRLEAIDFGRRMAVEKELEKTESAPQPNAVFDESSNFLIYATFLGIKVINLHTNTVARILGKVESNERYLRVALYQGDQGGKKVRKIPAAAANVNESKEPLTDPTILCCAFKKHRIYMFSRREPEEPEDASQGRDVFNEKPAADELMSVSDIGNSATTSLPENVIMHTTLGDIHMKLYPEECPKTVENFTTHCRNGYYDNHLFHRVIRGFMIQTGDPLGDGTGGQSIWGREFEDEFHKSLRHDRPFTLSMANAGPNTNGSQFFITTVATPWLDNKHTVFGRVVKGMDVVQGIEKVKTDKNDRPYQDVKILNVTVPKS

SEQ ID NO: 90190 - protein, 570 aa, Arabidopsis thaliana
  peptide (1)..(570): Ceres Seq. ID no. 12722936
  misc_feature (1)..(567): Homolog of NCBI NO: 559713 NR Description: KIAA0073 [Homo sapiens]
  misc_feature (1)..(567): Homolog of NCBI NO: 24308049 NR Description: KIAA0073 protein [Homo sapiens]
  misc_feature (1)..(567): Homolog of NCBI NO: 34853749 NR Description: similar to RIKEN cDNA 4632422M10 [Rattus
  misc_feature (1)..(567): Homolog of NCBI NO: 27370202 NR Description: RIKEN cDNA 4632422M10; hypothetical protein [Mus musculus] >gi|26324484|dbj|BAC25996.1| unnamed protein
  misc_feature (1)..(567): Homolog of NCBI NO: 31211583 NR Description: ENSANGP00000014257 [Anopheles gambiae]
  misc_feature (1)..(565): Homolog of NCBI NO: 19922912 NR Description: CG3511-PA [Drosophila melanogaster]
  misc_feature (1)..(567): Homolog of NCBI NO: 40747323 NR Description: hypothetical protein AN0380.2 [Aspergillus
  misc_feature (1)..(567): Homolog of NCBI NO: 32420051 NR Description: hypothetical protein [Neurospora crassa]
  misc_feature (1)..(567): Homolog of NCBI NO: 17506311 NR Description: CYcloPhilin family CYP-15 (70.8 kD) (cyp-15)
  misc_feature (175)..(567): Homolog of NCBI NO: 23613125 NR Description: cyclophilin, putative [Plasmodium falciparum 3D7]
MYEKSYMHRDVVTHVAVSAAEFFISGSMDGHLKFWKKKGVGIEFAKHFRSHLGPIEGLAVSIDGLLCCTISNDHAVKIYDVVNYDMMAMIRLPYIPGAVEWVYKQGDVKAKLAVSDRDSLFVHIYDPRSGSNEPIASKEIHMNPIKVMKYNPVSDTMISGDTKGIIEYWSATTLQFPEDEVNFKLKSDTNLFEIIKCKTTISAIEVSPDGKQFSITAPDRRIRVFWFRTGKLRRVYDESLVVAQDLQRSDAPLYRLEAIDFGRRMAVEKELEKTESAPQPNAVFDESSNFLIYATFLGIKVINLHTNTVARILGKVESNERYLRVALYQGDQGGKKVRKIPAAAANVNESKEPLTDPTILCCAFKKHRIYMFSRREPEEPEDASQGRDVFNEKPAADELMSVSDIGNSATTSLPENVIMHTTLGDIHMKLYPEECPKTVENFTTHCRNGYYDNHLFHRVIRGFMIQTGDPLGDGTGGQSIWGREFEDEFHKSLRHDRPFTLSMANAGPNTNGSQFFITTVATPWLDNKHTVFGRVVKGMDVVQGIEKVKTDKNDRPYQDVKILNVTVPKS

SEQ ID NO: 90191 - DNA, 3270 bp, Arabidopsis thaliana
  misc_feature (1)..(3270): Ceres Seq. ID no. 12722955
  misc_feature: MA Experiment ID: 20000234 Result: Up-regulated in Transcription
  misc_feature: MA Experiment 20000234 PARAMETER Experiment Name: At_Siliques_P Parameter: Age (day) Value: 21
  misc_feature: MA Experiment 20000234 PARAMETER Experiment Name: At_Siliques_P Parameter: Organism Value: A. thaliana
  misc_feature: MA Experiment 20000234 PARAMETER Experiment Name: At_Siliques_P Parameter: Plant Line Value: WS
  misc_feature: MA Experiment 20000234 PARAMETER Experiment Name: At_Siliques_P Parameter: Tissue Value: Less Than 5mm Siliques vs. Whole Plant
  misc_feature: MA Experiment ID: 20000439 Result: Up-regulated in Transcription
  misc_feature: MA Experiment 20000439 PARAMETER Experiment Name: At_Roots__P Parameter: Age (day) Value: 14 vs. 21
  misc_feature: MA Experiment 20000439 PARAMETER Experiment Name: At_Roots__P Parameter: Organism Value: A. thaliana
  misc_feature: MA Experiment 20000439 PARAMETER Experiment Name: At_Roots__P Parameter: Tissue Value: Roots vs. Whole Plant
  misc_feature: MA Experiment ID: 20000495 Result: Up-regulated in Transcription
  misc_feature: MA Experiment 20000495 PARAMETER Experiment Name: At_Guard_Cells_P Parameter: Harvest Date Value: 8/2/2002
  misc_feature: MA Experiment 20000495 PARAMETER Experiment Name: At_Guard_Cells_P Parameter: Organism Value: A. thaliana
  misc_feature: MA Experiment 20000495 PARAMETER Experiment Name: At_Guard_Cells_P Parameter: Tissue Value: Guard Cells vs. Leaves
  misc_feature: MA Experiment ID: 20000496 Result: Up-regulated in Transcription
  misc_feature: MA Experiment 20000496 PARAMETER Experiment Name: At_Guard_Cells_P Parameter: Harvest Date Value: 7/19/2002
  misc_feature: MA Experiment 20000496 PARAMETER Experiment Name: At_Guard_Cells_P Parameter: Organism Value: Canola
  misc_feature: MA Experiment 20000496 PARAMETER Experiment Name: At_Guard_Cells_P Parameter: Tissue Value: Guard Cells vs. Leaves
  misc_feature: MA Experiment ID: 20000794 Result: Down-regulated in Transcription
  misc_feature: MA Experiment 20000794 PARAMETER Experiment Name: At_Petals_P Parameter: Age (day) Value: 23-25 days
  misc_feature: MA Experiment 20000794 PARAMETER Experiment Name: At_Petals_P Parameter: Plant Line Value: WS
  misc_feature: MA Experiment 20000794 PARAMETER Experiment Name: At_Petals_P Parameter: Tissue Value: Petals vs. Whole plant
atggaccaaggcgcgatggagacactcccggaaaaaccgtcggaagacgagttctccctcgccctccgcaacggcctcattctctgcaacgtcctcaacaaagtcaatcccggttctgttctcaaggtggtggagaatccgattacgccagctattcagtacgcggatggagcggcgcaatcggcaattcaatattttgagaacatgaggaactttcttaaagctgtagaggatatgcagcttttaacatttggagcttctgatctcgagaagggaggatcgtcgaacaaagtagtagattgtattttgtgtttgaaaggtttttacgagtggaaacaagcgggtggagttggagtatggaggtatggagggactgtgaggatagtatcattcaatcgaaaaggcagttctccgccgcagtatgggattggtagtgaaagtactaccgatgagtctgtttctttggatgaatctgagtcttctcagtatgaccagcttttggattttcttcatctttctaatgagatctcagctgaggaatctgaaactgcaatctccttggcttttctttttgatcatttcgcgcttcagcttctacatggttaccttaaggagagtgatgggatcaatgatatgcctttaaatgaaatggtgattgatacattgctgaacagggtagttaaggatttctctgcaatactagtttctcagggagctcagctgggttcgtttctaaggaaaatactgaaatgtgataacggggatctgtcaagatcagagtttctagcagcagtcttcagataccttcagcacagaaaagatttggtgtcaaaggagttttcaaagttttgtaaatgtggcggaaagcttgagtttagtagactaaacgcccgcgaattttctccgggtcatgtagaagctattggtcttcaacagaaagagctggaggaagttaaatcaaattttgtggaaacaagaagccaagttaaacaaatgcagtcagaatggcagaaagagcttcagaggatagtccatcacgttaaggccatggaagttacatcttcttcttaccacaaggttctggaggaaaatcgcttactttacaatgaggttcaagatctcaaaggcaccattagagtttactgcagagtcagacctttcttccaagaacaaaaagatatgcaatcaactgtggattatattggagaaaatggtaatattatcattaacaatcctttcaagcaggagaaagatgcacggaaaatattttccttcaacaaagtatttggacagactgtctcacaagagcaaatctacattgacactcaaccggtaataaggtccgtcctcgacggattcaatgtttgtatcttcgcgtatgggcaaaccggttcagggaaaacgtatacgatgagtgggccagatctgatgacggagacaacttggggcgtgaactaccgagctctacgcgatctcttccagctttcaaatgcaagaacacatgtggtgacttatgaaattggagtccaaatgatcgaaatatataatgaacaagttagagatctactaaatcccgtaatccttgaccagtttctcacattagacatacgcaataattctcaactcaatggccttaatgtacccgatgcaaacttgattccagtttctaatactcgagatgtccttgatttgatgaggattggccaaaagaatcgtgctgtgggtgccactgctttgaatgagaggagcagccgttctcatagtgtattaactgttcacgtccaaggaaaagaattggcctcaggatccattttaagaggctgccttcatttagtggatttggctggaagtgaaagagtagaaaaatccgaagctgtaggcgagagactcaaagaagctcaacacataaacaaatcgttgtctgcattaggagatgtcatttatgcacttgcacaaaagagttcccacgttccctacagaaatagcaagcttacacaagttctgcaggactccttaggtggacaagcaaaaactttaatgtttgtacatattaatcctgaagttaatgcggtaggggagactatcagcacccttaagtttgcccaaagggttgcatccattgagcttggagcagctcgatcaaacaaggaaaccggtgaaattcgagatcttaaggatgagatatccagccttaaatcggccatggagaagaaggaagcagagctggaacaattgcgatcaggtagcattcggaacacaactgaatgtcagagagcaagagcagtttctcctttccatctcccaagaactggtaacggtgctggaacaaaggctgaggcaagtccacagccaaacgacggtaccagaagctacgagaccagaagttgctcaactggcaagcagagaaagtcagggtttccgtctgcactgagaaatagagaagcaagcccgaggatgccgaatctagcagaagagaggttaaatccgagtccaagtaggagatcactatccacagacagagcatcaaccatcaaaagtaggaataagcccgacgttacccaaaaccttccggtttcaagaacaccttttccagctagagtaccagtagtcaaatccttttcaactgttccattgaacccatcagcagaaaataaccacaggcttcacactgataactcttcagaggcatttcaaaatcatcagaagttaagcgctcgaaagctcttccctgagatcgaggaggaacacataaggcatgcactacacatacgtcaaggtggtgttaagaagaccagagccgagagcagtaaagccaaggcaaagcaaccatcaccagctaggtttcagaaactcgatgttgggatcagtttgcgttctgatgcagattctgaagcaaaggtaggaaattatcagacccaaaaggggaacaacaaccacaatgtgatacactcaagattccaaaacttcgacgtgggtatcagcctattctctgacctttgtgccggtgacaaatcagattcaacactcaagagtgattcctcagagacagacaacgaaccaccctcgaaatctaagaatgcccaaagaaactcgtccaaaaactccctcaaccacaaactaaggacgatctatgctcatgaggacacttcactcgtggacgacaagccttctaatggtacagcccatatcaaagaaggtaataataatatatctatgcctgagttcaggagaagtcgttcaacacatcatgcaaggttcatggtaccatag

SEQ ID NO: 90192 - protein, 1089 aa, Arabidopsis thaliana
  peptide (1)..(1089): Ceres Seq. ID no. 12722956
  misc_feature (1)..(110): Pfam Name: Calponin homology (CH) domain Pfam Description: Calponin homology (CH) domain
  misc_feature (1021)..(1065): Homolog of NCBI NO: 2392771 NR Description: putative kinesin-like protein [Arabidopsis
  misc_feature (218)..(744): Homolog of NCBI NO: 28393382 NR Description: putative kinesin [Arabidopsis thaliana]
  misc_feature (4)..(162): Homolog of NCBI NO: 28393382 NR Description: putative kinesin [Arabidopsis thaliana]
  misc_feature (218)..(521): Homolog of NCBI NO: 30690701 NR Description: kinesin-related protein [Arabidopsis thaliana]
  misc_feature (517)..(744): Homolog of NCBI NO: 30690701 NR Description: kinesin-related protein [Arabidopsis thaliana]
  misc_feature (4)..(162): Homolog of NCBI NO: 30690701 NR Description: kinesin-related protein [Arabidopsis thaliana]
  misc_feature (517)..(744): Homolog of NCBI NO: 7487566 NR Description: probable kinesin heavy chain [imported] - thaliana >gi|2529677|gb|AAC62860.1| putative kinesin heavy chain
  misc_feature (312)..(521): Homolog of NCBI NO: 7487566 NR Description: probable kinesin heavy chain [imported] - thaliana >gi|2529677|gb|AAC62860.1| putative kinesin heavy chain
  misc_feature (4)..(162): Homolog of NCBI NO: 7487566 NR Description: probable kinesin heavy chain [imported] - thaliana >gi|2529677|gb|AAC62860.1| putative kinesin heavy chain
  misc_feature (218)..(820): Homolog of NCBI NO: 18421069 NR Description: kinesin-related protein; protein id: At5g27000.1
MDQGAMETLPEKPSEDEFSLALRNGLILCNVLNKVNPGSVLKVVENPITPAIQYADGAAQSAIQYFENMRNFLKAVEDMQLLTFGASDLEKGGSSNKVVDCILCLKGFYEWKQAGGVGVWRYGGTVRIVSFNRKGSSPPQYGIGSESTTDESVSLDESESSQYDQLLDFLHLSNEISAEESETAISLAFLFDHFALQLLHGYLKESDGINDMPLNEMVIDTLLNRVVKDFSAILVSQGAQLGSFLRKILKCDNGDLSRSEFLAAVFRYLQHRKDLVSKEFSKFCKCGGKLEFSRLNAREFSPGHVEAIGLQQKELEEVKSNFVETRSQVKQMQSEWQKELQRIVHHVKAMEVTSSSYHKVLEENRLLYNEVQDLKGTIRVYCRVRPFFQEQKDMQSTVDYIGENGNIIINNPFKQEKDARKIFSFNKVFGQTVSQEQIYIDTQPVIRSVLDGFNVCIFAYGQTGSGKTYTMSGPDLMTETTWGVNYRALRDLFQLSNARTHVVTYEIGVQMIEIYNEQVRDLLNPVILDQFLTLDIRNNSQLNGLNVPDANLIPVSNTRDVLDLMRIGQKNRAVGATALNERSSRSHSVLTVHVQGKELASGSILRGCLHLVDLAGSERVEKSEAVGERLKEAQHINKSLSALGDVIYALAQKSSHVPYRNSKLTQVLQDSLGGQAKTLMFVHINPEVNAVGETISTLKFAQRVASIELGAARSNKETGEIRDLKDEISSLKSAMEKKEAELEQLRSGSIRNTTECQRARAVSPFHLPRTGNGAGTKAEASPQPNDGTRSYETRSCSTGKQRKSGFPSALRNREASPRMPNLAEERLNPSPSRRSLSTDRASTIKSRNKPDVTQNLPVSRTPFPARVPVVKSFSTVPLNPSAENNHRLHTDNSSEAFQNHQKLSARKLFPEIEEEHIRHALHIRQGGVKKTRAESSKAKAKQPSPARFQKLDVGISLRSDADSEAKVGNYQTQKGNNNHNVIHSRFQNFDVGISLFSDLCAGDKSDSTLKSDSSETDNEPPSKSKNAQRNSSKNSLNHKLRTIYAHEDTSLVDDKPSNGTAHIKEGNNNISMPEFRRSRSTHHARFMVP

SEQ ID NO: 90193 - protein, 1084 aa, Arabidopsis thaliana
  peptide (1)..(1084): Ceres Seq. ID no. 12722957
  misc_feature (1)..(105): Pfam Name: Calponin homology (CH) domain Pfam Description: Calponin homology (CH) domain
  misc_feature (1016)..(1060): Homolog of NCBI NO: 2392771 NR Description: putative kinesin-like protein [Arabidopsis
  misc_feature (213)..(739): Homolog of NCBI NO: 28393382 NR Description: putative kinesin [Arabidopsis thaliana]
  misc_feature (1)..(157): Homolog of NCBI NO: 28393382 NR Description: putative kinesin [Arabidopsis thaliana]
  misc_feature (213)..(516): Homolog of NCBI NO: 30690701 NR Description: kinesin-related protein [Arabidopsis thaliana]
  misc_feature (512)..(739): Homolog of NCBI NO: 30690701 NR Description: kinesin-related protein [Arabidopsis thaliana]
  misc_feature (1)..(157): Homolog of NCBI NO: 30690701 NR Description: kinesin-related protein [Arabidopsis thaliana]
  misc_feature (512)..(739): Homolog of NCBI NO: 7487566 NR Description: probable kinesin heavy chain [imported] - thaliana >gi|2529677|gb|AAC62860.1| putative kinesin heavy chain
  misc_feature (307)..(516): Homolog of NCBI NO: 7487566 NR Description: probable kinesin heavy chain [imported] - thaliana >gi|2529677|gb|AAC62860.1| putative kinesin heavy chain
  misc_feature (1)..(157): Homolog of NCBI NO: 7487566 NR Description: probable kinesin heavy chain [imported] - thaliana >gi|2529677|gb|AAC62860.1| putative kinesin heavy chain
  misc_feature (213)..(815): Homolog of NCBI NO: 18421069 NR Description: kinesin-related protein; protein id: At5g27000.1
METLPEKPSEDEFSLALRNGLILCNVLNKVNPGSVLKVVENPITPAIQYADGAAQSAIQYFENMRNFLKAVEDMQLLTFGASDLEKGGSSNKVVDCILCLKGFYEWKQAGGVGVWRYGGTVRIVSFNRKGSSPPQYGIGSESTTDESVSLDESESSQYDQLLDFLHLSNEISAEESETAISLAFLFDHFALQLLHGYLKESDGINDMPLNEMVIDTLLNRVVKDFSAILVSQGAQLGSFLRKILKCDNGDLSRSEFLAAVFRYLQHRKDLVSKEFSKFCKCGGKLEFSRLNAREFSPGHVEAIGLQQKELEEVKSNFVETRSQVKQMQSEWQKELQRIVHHVKAMEVTSSSYHKVLEENRLLYNEVQDLKGTIRVYCRVRPFFQEQKDMQSTVDYIGENGNIIINNPFKQEKDARKIFSFNKVFGQTVSQEQIYIDTQPVIRSVLDGFNVCIFAYGQTGSGKTYTMSGPDLMTETTWGVNYRALRDLFQLSNARTHVVTYEIGVQMIEIYNEQVRDLLNPVILDQFLTLDIRNNSQLNGLNVPDANLIPVSNTRDVLDLMRIGQKNRAVGATALNERSSRSHSVLTVHVQGKELASGSILRGCLHLVDLAGSERVEKSEAVGERLKEAQHINKSLSALGDVIYALAQKSSHVPYRNSKLTQVLQDSLGGQAKTLMFVHINPEVNAVGETISTLKFAQRVASIELGAARSNKETGEIRDLKDEISSLKSAMEKKEAELEQLRSGSIRNTTECQRARAVSPFHLPRTGNGAGTKAEASPQPNDGTRSYETRSCSTGKQRKSGFPSALRNREASPRMPNLAEERLNPSPSRRSLSTDRASTIKSRNKPDVTQNLPVSRTPFPARVPVVKSFSTVPLNPSAENNHRLHTDNSSEAFQNHQKLSARKLFPEIEEEHIRHALHIRQGGVKKTRAESSKAKAKQPSPARFQKLDVGISLRSDADSEAKVGNYQTQKGNNNHNVIHSRFQNFDVGISLFSDLCAGDKSDSTLKSDSSETDNEPPSKSKNAQRNSSKNSLNHKLRTIYAHEDTSLVDDKPSNGTAHIKEGNNNISMPEFRRSRSTHHARFMVP

SEQ ID NO: 90194 - protein, 1021 aa, Arabidopsis thaliana
  peptide (1)..(1021): Ceres Seq. ID no. 12722958
  misc_feature (953)..(997): Homolog of NCBI NO: 2392771 NR Description: putative kinesin-like protein [Arabidopsis
  misc_feature (150)..(676): Homolog of NCBI NO: 28393382 NR Description: putative kinesin [Arabidopsis thaliana]
  misc_feature (1)..(94): Homolog of NCBI NO: 28393382 NR Description: putative kinesin [Arabidopsis thaliana]
  misc_feature (150)..(453): Homolog of NCBI NO: 30690701 NR Description: kinesin-related protein [Arabidopsis thaliana]
  misc_feature (449)..(676): Homolog of NCBI NO: 30690701 NR Description: kinesin-related protein [Arabidopsis thaliana]
  misc_feature (1)..(94): Homolog of NCBI NO: 30690701 NR Description: kinesin-related protein [Arabidopsis thaliana]
  misc_feature (449)..(676): Homolog of NCBI NO: 7487566 NR Description: probable kinesin heavy chain [imported] - thaliana >gi|2529677|gb|AAC62860.1| putative kinesin heavy chain
  misc_feature (244)..(453): Homolog of NCBI NO: 7487566 NR Description: probable kinesin heavy chain [imported] - thaliana >gi|2529677|gb|AAC62860.1| putative kinesin heavy chain
  misc_feature (1)..(94): Homolog of NCBI NO: 7487566 NR Description: probable kinesin heavy chain [imported] - thaliana >gi|2529677|gb|AAC62860.1| putative kinesin heavy chain
  misc_feature (150)..(752): Homolog of NCBI NO: 18421069 NR Description: kinesin-related protein; protein id: At5g27000.1
MRNFLKAVEDMQLLTFGASDLEKGGSSNKVVDCILCLKGFYEWKQAGGVGVWRYGGTVRIVSFNRKGSSPPQYGIGSESTTDESVSLDESESSQYDQLLDFLHLSNEISAEESETAISLAFLFDHFALQLLHGYLKESDGINDMPLNEMVIDTLLNRVVKDFSAILVSQGAQLGSFLRKILKCDNGDLSRSEFLAAVFRYLQHRKDLVSKEFSKFCKCGGKLEFSRLNAREFSPGHVEAIGLQQKELEEVKSNFVETRSQVKQMQSEWQKELQRIVHHVKAMEVTSSSYHKVLEENRLLYNEVQDLKGTIRVYCRVRPFFQEQKDMQSTVDYIGENGNIIINNPFKQEKDARKIFSFNKVFGQTVSQEQIYIDTQPVIRSVLDGFNVCIFAYGQTGSGKTYTMSGPDLMTETTWGVNYRALRDLFQLSNARTHVVTYEIGVQMIEIYNEQVRDLLNPVILDQFLTLDIRNNSQLNGLNVPDANLIPVSNTRDVLDLMRIGQKNRAVGATALNERSSRSHSVLTVHVQGKELASGSILRGCLHLVDLAGSERVEKSEAVGERLKEAQHINKSLSALGDVIYALAQKSSHVPYRNSKLTQVLQDSLGGQAKTLMFVHINPEVNAVGETISTLKFAQRVASIELGAARSNKETGEIRDLKDEISSLKSAMEKKEAELEQLRSGSIRNTTECQRARAVSPFHLPRTGNGAGTKAEASPQPNDGTRSYETRSCSTGKQRKSGFPSALRNREASPRMPNLAEERLNPSPSRRSLSTDRASTIKSRNKPDVTQNLPVSRTPFPARVPVVKSFSTVPLNPSAENNHRLHTDNSSEAFQNHQKLSARKLFPEIEEEHIRHALHIRQGGVKKTRAESSKAKAKQPSPARFQKLDVGISLRSDADSEAKVGNYQTQKGNNNHNVIHSRFQNFDVGISLFSDLCAGDKSDSTLKSDSSETDNEPPSKSKNAQRNSSKNSLNHKLRTIYAHEDTSLVDDKPSNGTAHIKEGNNNISMPEFRRSRSTHHARFMVP

SEQ ID NO: 90195 - DNA, 961 bp, Arabidopsis thaliana
  misc_feature (1)..(961): Ceres Seq. ID no. 12722959
  misc_feature: MA Experiment ID: 20000180 Result: Down-regulated in Transcription
  misc_feature: MA Experiment 20000180 PARAMETER Experiment Name: At_Germinating_Seeds_P Parameter: Age (hr) Value: 24 vs. 0
  misc_feature: MA Experiment 20000180 PARAMETER Experiment Name: At_Germinating_Seeds_P Parameter: Tissue Value: Germinating Seeds
  misc_feature: MA Experiment ID: 20000227 Result: Up-regulated in Transcription
  misc_feature: MA Experiment 20000227 PARAMETER Experiment Name: At_Root-Tips-vs-Tops_P Parameter: Tissue Value: Root Tips vs. Root Tops
  misc_feature: MA Experiment ID: 20000234 Result: Up-regulated in Transcription
  misc_feature: MA Experiment 20000234 PARAMETER Experiment Name: At_Siliques_P Parameter: Age (day) Value: 21
  misc_feature: MA Experiment 20000234 PARAMETER Experiment Name: At_Siliques_P Parameter: Organism Value: A. thaliana
  misc_feature: MA Experiment 20000234 PARAMETER Experiment Name: At_Siliques_P Parameter: Plant Line Value: WS
  misc_feature: MA Experiment 20000234 PARAMETER Experiment Name: At_Siliques_P Parameter: Tissue Value: Less Than 5mm Siliques vs. Whole Plant
  misc_feature: MA Experiment ID: 20000264 Result: Up-regulated in Transcription
  misc_feature: MA Experiment 20000264 PARAMETER Experiment Name: At_Open_Flower_P Parameter: Age (day) Value: 21
  misc_feature: MA Experiment 20000264 PARAMETER Experiment Name: At_Open_Flower_P Parameter: Plant Line Value: WS
  misc_feature: MA Experiment 20000264 PARAMETER Experiment Name: At_Open_Flower_P Parameter: Tissue Value: Open Flower vs. Whole Plant
  misc_feature: MA Experiment ID: 20000436 Result: Down-regulated in Transcription
  misc_feature: MA Experiment 20000436 PARAMETER Experiment Name: At_Drought_P Parameter: Age (day) Value: 7
  misc_feature: MA Experiment 20000436 PARAMETER Experiment Name: At_Drought_P Parameter: Organism Value: A. thaliana
  misc_feature: MA Experiment 20000436 PARAMETER Experiment Name: At_Drought_P Parameter: Plant Line Value: WS
  misc_feature: MA Experiment 20000436 PARAMETER Experiment Name: At_Drought_P Parameter: Timepoint (hr) Value: 12
  misc_feature: MA Experiment 20000436 PARAMETER Experiment Name: At_Drought_P Parameter: Tissue Value: Whole Plant
  misc_feature: MA Experiment 20000436 PARAMETER Experiment Name: At_Drought_P Parameter: Treatment Value: Drought vs. No Drought
  misc_feature: MA Experiment ID: 20000437 Result: Down-regulated in Transcription
  misc_feature: MA Experiment 20000437 PARAMETER Experiment Name: At_Drought_P Parameter: Age (day) Value: 8
  misc_feature: MA Experiment 20000437 PARAMETER Experiment Name: At_Drought_P Parameter: Organism Value: A. thaliana
  misc_feature: MA Experiment 20000437 PARAMETER Experiment Name: At_Drought_P Parameter: Plant Line Value: WS
  misc_feature: MA Experiment 20000437 PARAMETER Experiment Name: At_Drought_P Parameter: Timepoint (hr) Value: 24
  misc_feature: MA Experiment 20000437 PARAMETER Experiment Name: At_Drought_P Parameter: Tissue Value: Whole Plant
  misc_feature: MA Experiment 20000437 PARAMETER Experiment Name: At_Drought_P Parameter: Treatment Value: Drought vs. No Drought
  misc_feature: MA Experiment ID: 20000453 Result: Down-regulated in Transcription
  misc_feature: MA Experiment 20000453 PARAMETER Experiment Name: At_100uM_ABA_P Parameter: Age (day) Value: 15
  misc_feature: MA Experiment 20000453 PARAMETER Experiment Name: At_100uM_ABA_P Parameter: Organism Value: A. thaliana
  misc_feature: MA Experiment 20000453 PARAMETER Experiment Name: At_100uM_ABA_P Parameter: Plant Line Value: WS
  misc_feature: MA Experiment 20000453 PARAMETER Experiment Name: At_100uM_ABA_P Parameter: Timepoint (hr) Value: 24
  misc_feature: MA Experiment 20000453 PARAMETER Experiment Name: At_100uM_ABA_P Parameter: Tissue Value: Aerial
  misc_feature: MA Experiment 20000453 PARAMETER Experiment Name: At_100uM_ABA_P Parameter: Treatment Value: 100uM ABA vs. No Treatment
  misc_feature: MA Experiment ID: 20000456 Result: Up-regulated in Transcription
  misc_feature: MA Experiment 20000456 PARAMETER Experiment Name: At_100uM_BA_P Parameter: Age (day) Value: 14
  misc_feature: MA Experiment 20000456 PARAMETER Experiment Name: At_100uM_BA_P Parameter: Organism Value: A. thaliana
  misc_feature: MA Experiment 20000456 PARAMETER Experiment Name: At_100uM_BA_P Parameter: Plant Line Value: WS
  misc_feature: MA Experiment 20000456 PARAMETER Experiment Name: At_100uM_BA_P Parameter: Timepoint (hr) Value: 6
  misc_feature: MA Experiment 20000456 PARAMETER Experiment Name: At_100uM_BA_P Parameter: Tissue Value: Aerial
  misc_feature: MA Experiment 20000456 PARAMETER Experiment Name: At_100uM_BA_P Parameter: Treatment Value: 100uM BA vs. No Treatment
  misc_feature: MA Experiment ID: 20000709 Result: Up-regulated in Transcription
  misc_feature: MA Experiment 20000709 PARAMETER Experiment Name: At_15mM_NH4NO3_L-to-H_P Parameter: Age (hr) Value: 14
  misc_feature: MA Experiment 20000709 PARAMETER Experiment Name: At_15mM_NH4NO3_L-to-H_P Parameter: Organism Value: A. thaliana
  misc_feature: MA Experiment 20000709 PARAMETER Experiment Name: At_15mM_NH4NO3_L-to-H_P Parameter: Plant Line Value: WS
  misc_feature: MA Experiment 20000709 PARAMETER Experiment Name: At_15mM_NH4NO3_L-to-H_P Parameter: Timepoint (hr) Value: 4
  misc_feature: MA Experiment 20000709 PARAMETER Experiment Name: At_15mM_NH4NO3_L-to-H_P Parameter: Tissue Value: Aerial
  misc_feature: MA Experiment 20000709 PARAMETER Experiment Name: At_15mM_NH4NO3_L-to-H_P Parameter: Treatment Value: 15mM NH4NO3 vs. 30mM Mannitol
  misc_feature: MA Experiment ID: 20000794 Result: Down-regulated in Transcription
  misc_feature: MA Experiment 20000794 PARAMETER Experiment Name: At_Petals_P Parameter: Age (day) Value: 23-25 days
  misc_feature: MA Experiment 20000794 PARAMETER Experiment Name: At_Petals_P Parameter: Plant Line Value: WS
  misc_feature: MA Experiment 20000794 PARAMETER Experiment Name: At_Petals_P Parameter: Tissue Value: Petals vs. Whole plant
  misc_feature: MA Experiment ID: 20001247 Result: Down-regulated in Transcription
  misc_feature: MA Experiment 20001247 PARAMETER Experiment Name: At_Far-red-induction_P Parameter: Age (day) Value: 7
  misc_feature: MA Experiment 20001247 PARAMETER Experiment Name: At_Far-red-induction_P Parameter: Light Value: Far-red vs. White
  misc_feature: MA Experiment 20001247 PARAMETER Experiment Name: At_Far-red-induction_P Parameter: Organism Value: A. thaliana
  misc_feature: MA Experiment 20001247 PARAMETER Experiment Name: At_Far-red-induction_P Parameter: Plant Line Value: Columbia
  misc_feature: MA Experiment 20001247 PARAMETER Experiment Name: At_Far-red-induction_P Parameter: Timepoint (hr) Value: 1
  misc_feature: MA Experiment 20001247 PARAMETER Experiment Name: At_Far-red-induction_P Parameter: Tissue Value: Whole Plant
  misc_feature: MA Experiment ID: 20001450 Result: Down-regulated in Transcription
  misc_feature: MA Experiment 20001450 PARAMETER Experiment Name: At_Far-red-induction_P Parameter: Age (day) Value: 7
  misc_feature: MA Experiment 20001450 PARAMETER Experiment Name: At_Far-red-induction_P Parameter: Light Value: Far-red vs. White
  misc_feature: MA Experiment 20001450 PARAMETER Experiment Name: At_Far-red-induction_P Parameter: Organism Value: A. thaliana
  misc_feature: MA Experiment 20001450 PARAMETER Experiment Name: At_Far-red-induction_P Parameter: Plant Line Value: Columbia
  misc_feature: MA Experiment 20001450 PARAMETER Experiment Name: At_Far-red-induction_P Parameter: Timepoint (hr) Value: 8
  misc_feature: MA Experiment 20001450 PARAMETER Experiment Name: At_Far-red-induction_P Parameter: Tissue Value: Whole Plant
  misc_feature: MA Experiment ID: 20001458 Result: Up-regulated in Transcription
  misc_feature: MA Experiment 20001458 PARAMETER Experiment Name: At_50mM_NH4NO3_L-to-H_P Parameter: Age (day) Value: Undefined
  misc_feature: MA Experiment 20001458 PARAMETER Experiment Name: At_50mM_NH4NO3_L-to-H_P Parameter: Organism Value: Undefined
  misc_feature: MA Experiment 20001458 PARAMETER Experiment Name: At_50mM_NH4NO3_L-to-H_P Parameter: Plant Line Value: Undefined
  misc_feature: MA Experiment 20001458 PARAMETER Experiment Name: At_50mM_NH4NO3_L-to-H_P Parameter: Timepoint (hr) Value: 2
  misc_feature: MA Experiment 20001458 PARAMETER Experiment Name: At_50mM_NH4NO3_L-to-H_P Parameter: Tissue Value: Siliques
  misc_feature: MA Experiment 20001458 PARAMETER Experiment Name: At_50mM_NH4NO3_L-to-H_P Parameter: Treatment Value: 50mM NH4NO3 vs. 100mM Manitol
  misc_feature: MA Experiment ID: 20001556 Result: Up-regulated in Transcription
  misc_feature: MA Experiment 20001556 PARAMETER Experiment Name: At_Drought_Soil_Dry_P Parameter: Age (day) Value: 26
  misc_feature: MA Experiment 20001556 PARAMETER Experiment Name: At_Drought_Soil_Dry_P Parameter: Organism Value: A. thaliana
  misc_feature: MA Experiment 20001556 PARAMETER Experiment Name: At_Drought_Soil_Dry_P Parameter: Plant Line Value: WS
  misc_feature: MA Experiment 20001556 PARAMETER Experiment Name: At_Drought_Soil_Dry_P Parameter: Post Timepoint (hr) Value: None
  misc_feature: MA Experiment 20001556 PARAMETER Experiment Name: At_Drought_Soil_Dry_P Parameter: Post-Treatment Value: None
  misc_feature: MA Experiment 20001556 PARAMETER Experiment Name: At_Drought_Soil_Dry_P Parameter: Timepoint (day) Value: 12
  misc_feature: MA Experiment 20001556 PARAMETER Experiment Name: At_Drought_Soil_Dry_P Parameter: Treatment Value: Drought vs. No Drought
  misc_feature: MA Experiment ID: 20001557 Result: Up-regulated in Transcription
  misc_feature: MA Experiment 20001557 PARAMETER Experiment Name: At_Drought_Soil_Dry_P Parameter: Age (day) Value: 27
  misc_feature: MA Experiment 20001557 PARAMETER Experiment Name: At_Drought_Soil_Dry_P Parameter: Organism Value: A. thaliana
  misc_feature: MA Experiment 20001557 PARAMETER Experiment Name: At_Drought_Soil_Dry_P Parameter: Plant Line Value: WS
  misc_feature: MA Experiment 20001557 PARAMETER Experiment Name: At_Drought_Soil_Dry_P Parameter: Post Timepoint (hr) Value: 3
  misc_feature: MA Experiment 20001557 PARAMETER Experiment Name: At_Drought_Soil_Dry_P Parameter: Post-Treatment Value: Re-Water vs. No Drought
  misc_feature: MA Experiment 20001557 PARAMETER Experiment Name: At_Drought_Soil_Dry_P Parameter: Timepoint (day) Value: 13
  misc_feature: MA Experiment 20001557 PARAMETER Experiment Name: At_Drought_Soil_Dry_P Parameter: Treatment Value: Drought vs. No Drought
  misc_feature: MA Experiment ID: 20001558 Result: Up-regulated in Transcription
  misc_feature: MA Experiment 20001558 PARAMETER Experiment Name: At_Drought_Soil_Dry_P Parameter: Age (day) Value: 27
  misc_feature: MA Experiment 20001558 PARAMETER Experiment Name: At_Drought_Soil_Dry_P Parameter: Organism Value: A. thaliana
  misc_feature: MA Experiment 20001558 PARAMETER Experiment Name: At_Drought_Soil_Dry_P Parameter: Plant Line Value: WS
  misc_feature: MA Experiment 20001558 PARAMETER Experiment Name: At_Drought_Soil_Dry_P Parameter: Post Timepoint (hr) Value: 6
  misc_feature: MA Experiment 20001558 PARAMETER Experiment Name: At_Drought_Soil_Dry_P Parameter: Post-Treatment Value: Re-Water vs. No Drought
  misc_feature: MA Experiment 20001558 PARAMETER Experiment Name: At_Drought_Soil_Dry_P Parameter: Timepoint (day) Value: 13
  misc_feature: MA Experiment 20001558 PARAMETER Experiment Name: At_Drought_Soil_Dry_P Parameter: Treatment Value: Drought vs. No Drought
  misc_feature: MA Experiment ID: 20001560 Result: Up-regulated in Transcription
  misc_feature: MA Experiment 20001560 PARAMETER Experiment Name: At_Drought_Soil_Dry_P Parameter: Age (day) Value: 28
  misc_feature: MA Experiment 20001560 PARAMETER Experiment Name: At_Drought_Soil_Dry_P Parameter: Organism Value: A. thaliana
  misc_feature: MA Experiment 20001560 PARAMETER Experiment Name: At_Drought_Soil_Dry_P Parameter: Plant Line Value: WS
  misc_feature: MA Experiment 20001560 PARAMETER Experiment Name: At_Drought_Soil_Dry_P Parameter: Post Timepoint (hr) Value: None
  misc_feature: MA Experiment 20001560 PARAMETER Experiment Name: At_Drought_Soil_Dry_P Parameter: Post-Treatment Value: None
  misc_feature: MA Experiment 20001560 PARAMETER Experiment Name: At_Drought_Soil_Dry_P Parameter: Timepoint (day) Value: 14
  misc_feature: MA Experiment 20001560 PARAMETER Experiment Name: At_Drought_Soil_Dry_P Parameter: Treatment Value: Drought vs. No Drought
  misc_feature: MA Experiment ID: 20001756 Result: Up-regulated in Transcription
  misc_feature: MA Experiment 20001756 PARAMETER Experiment Name: At_50mM_NH4NO3_L-to-H_P Parameter: Timepoint (hr) Value: 4
  misc_feature: MA Experiment 20001756 PARAMETER Experiment Name: At_50mM_NH4NO3_L-to-H_P Parameter: Tissue Value: Leaf
  misc_feature: MA Experiment 20001756 PARAMETER Experiment Name: At_50mM_NH4NO3_L-to-H_P Parameter: Treatment Value: 50mM NH4NO3 vs 100mM Mannitol
  misc_feature: MA Experiment ID: 20001757 Result: Up-regulated in Transcription
  misc_feature: MA Experiment 20001757 PARAMETER Experiment Name: At_50mM_NH4NO3_L-to-H_P Parameter: Timepoint (hr) Value: 6
  misc_feature: MA Experiment 20001757 PARAMETER Experiment Name: At_50mM_NH4NO3_L-to-H_P Parameter: Tissue Value: Leaf
  misc_feature: MA Experiment 20001757 PARAMETER Experiment Name: At_50mM_NH4NO3_L-to-H_P Parameter: Treatment Value: 50mM NH4NO3 vs 100mM Mannitol
acattttcagctgctcataaaccctaaaaatcctctctttttctcaaccttgattcttagccatggagttctggggaattgaagttaaatcaggaaagccagttacagtgactcctgaagaaggcattcttatccacgtttctcaggcatcgcttggagaatgtaaaaacaagaagggagagtttgtgcctttacatgtaaaggttgggaaccagaacttggttctgggaactctatcgactgagaacatccctcagcttttctgtgatttggtattcgacaaggagtttgagctttctcacacttggggaaaaggaagtgtttactttgttggatacaaaactcccaacattgagccacaaggctattctgaggaagaagaggaagaagaggaagaagttcctgctgggaatgctgccaaggctgtagctaaaccaaaggctaagcctgcagaagtgaagccagctgttgatgatgaagaggatgagtctgattctgacggaatggatgaagatgattctgatggtgaggattctgaggaagaagagcctacacctaagaagcctgcatcaagcaagaagagagctaatgaaactacccctaaagcacctgtgtcagcaaagaaggcgaaagtagcagttactcctcagaaaacagatgagaagaagaaagggggaaaggctgcaaaccagagcccaaagtcggccagtcaagtctcatgtggttcatgcaagaagactttcaactcagggaatgcacttgagtctcacaacaaggccaagcacgctgctgccaagtgaagtggtttcttattagagcttgtgatttctatggaattttgcctgtagtctttatgaaaccttcggattttcttatattttcttttgataacaagagtcttaatgaaagagagccagttggagtcttattaccactatatttcaacattctatcttggctc

SEQ ID NO: 90196 - protein, 245 aa, Arabidopsis thaliana
  peptide (1)..(245): Ceres Seq. ID no. 12722960
  misc_feature (83)..(175): Pfam Name: Nucleoplasmin Pfam Description: Nucleoplasmin
  misc_feature (1)..(245): Homolog of NCBI NO: 18407844 NR Description: putative histone deacetylase; protein id: supported by cDNA: gi_11066134, supported by cDNA: gi_17529219, by cDNA: gi_20466056 [Arabidopsis thaliana]
  misc_feature (1)..(244): Homolog of NCBI NO: 2392769 NR Description: putative histone deacetylase [Arabidopsis
  misc_feature (1)..(243): Homolog of NCBI NO: 30688577 NR Description: histone deacetylase-related protein [Arabidopsis
  misc_feature (1)..(217): Homolog of NCBI NO: 25352191 NR Description: probable histone deacetylase (EC 3.5.1.-) - Arabidopsis thaliana >gi|2854070|gb|AAC02539.1| putative deacetylase [Arabidopsis thaliana]
  misc_feature (1)..(212): Homolog of NCBI NO: 33667906 NR Description: histone deacetylase [Solanum chacoense]
  misc_feature (1)..(216): Homolog of NCBI NO: 7804963 NR Description: putative histone deacetylase HD2c [Arabidopsis >gi|9758002|dbj|BAB08599.1| histone deacetylase HD2c [Arabidopsis >gi|13926268|gb|AAK49605.1|AF372889_1 AT5g03740/F17C15_160
  misc_feature (1)..(216): Homolog of NCBI NO: 30680179 NR Description: histone deacetylase -related protein [Arabidopsis
  misc_feature (1)..(216): Homolog of NCBI NO: 11282318 NR Description: histone deacetylase-like protein - Arabidopsis
  misc_feature (1)..(243): Homolog of NCBI NO: 7716948 NR Description: histone deacetylase 2 isoform b [Zea mays]
  misc_feature (1)..(243): Homolog of NCBI NO: 7489751 NR Description: histone deacetylase (EC 3.5.1.-) HD2-p39,
MEFWGIEVKSGKPVTVTPEEGILIHVSQASLGECKNKKGEFVPLHVKVGNQNLVLGTLSTENIPQLFCDLVFDKEFELSHTWGKGSVYFVGYKTPNIEPQGYSEEEEEEEEEVPAGNAAKAVAKPKAKPAEVKPAVDDEEDESDSDGMDEDDSDGEDSEEEEPTPKKPASSKKRANETTPKAPVSAKKAKVAVTPQKTDEKKKGGKAANQSPKSASQVSCGSCKKTFNSGNALESHNKAKHAAAK

SEQ ID NO: 90197 - DNA, 1605 bp, Arabidopsis thaliana
  misc_feature (1)..(1605): Ceres Seq. ID no. 12722978
  misc_feature: MA Experiment ID: 20000495 Result: Down-regulated in Transcription
  misc_feature: MA Experiment 20000495 PARAMETER Experiment Name: At_Guard_Cells_P Parameter: Harvest Date Value: 8/2/2002
  misc_feature: MA Experiment 20000495 PARAMETER Experiment Name: At_Guard_Cells_P Parameter: Organism Value: A. thaliana
  misc_feature: MA Experiment 20000495 PARAMETER Experiment Name: At_Guard_Cells_P Parameter: Tissue Value: Guard Cells vs. Leaves
atggcggaggacaaaaacaacggacgtgtgaatgacgaaagtgagtactcgtcggaggacgaaggaacagaggattataagaaaggaggataccatacagtaagagtcggtgatacttttaagaatggagcttatgtgattcagagtaaacttggttgggggcatttctccactgtttggcttgcttgggatacgcaagaatcgcgttatgtagctttgaaagttcagaagagtgctcaacattatacagaggcagcaatggatgagataaagattttgaaacagatagctgaaggtgactcgggtgataagaagtgtgttgtaaagctactggatcatttcaagcatacgggtcctaatgggaagcatgtttgtatggttttcgagtatttgggagataaccttttgtcggttattaagtacagtgattaccgaggggttcctcttcacatggttaaagagctttgttttcatattttggttgggttggattatcttcatcgtgagctttctattattcatactgatttaaagccggagaatgttctgcttttgtctacgattgatccgtcgagagatgtgaggagatcaggtgttccacttgttctgcctataaccaaggacaagattgtttctgagtctgctgttaaacctgaaactaaaagttatacgtacaatggtgatttgacaaagaatcagaagaagaagattcgtaagaaagcgaagaaggtggtggctcaagattttggtggagaggaagctttggaagaaagtgagagagattctaactccgaagcaagaataaatggcaattccaccgtagagagatctgaaggaagttccacaagattaatggaaggtgaagaagccagagagaaggctaacaaaaagaatggtcggggtagtaggagaggaagccgatccacaaggcagaaattactgagtgatatagagtgcaaatgcaaattagtagattttgggaatgcttgttggacatataaacagttcacaagcgatattcagacaagacagtatcgatgtccagaggttgttcttggctcaaaatactcaacttctgcagatatgtggtcctttgcttgtatttgtttcgagctggccaccggagatgtcttgttcgatcctcacagtggtgaaaattatgaccgggatgaggatcacctggcattgatgatggagcttctagggatgatgccacgaaagattgcattaggtggtcgatactcacgagatttcttcaaccgacaaggtgagctaaggcacatccggcggttgcggttttggcccatcagcaaagtcttgaaggagaaatatgatttcagcgagcaggacgcaaaagacatgtcagatttcttagtcacaattcttgaatttgtgcctgagaagagaccaacagccgcccaatgcctaaaacacccatggttcaatcctggcccgagattgcttgaaccgtcactgaaaccacaacaaccaaaaggagaagaagaaggagcagcaaatgagaacatagaaaaggaaaaggacgaaagagaagcaatggaagctggtgtagggaatatcgctattgatgtctctgaaccgaagtga

SEQ ID NO: 90198 - protein, 534 aa, Arabidopsis thaliana
  peptide (1)..(534): Ceres Seq. ID no. 12722979
  misc_feature (45)..(481): Pfam Name: Protein kinase domain Pfam Description: Protein kinase domain
  misc_feature (1)..(534): Homolog of NCBI NO: 15230526 NR Description: putative protein; protein id: At3g44850.1 thaliana] >gi|9967495|emb|CAC03535.2| putative protein
  misc_feature (107)..(534): Homolog of NCBI NO: 11357701 NR Description: hypothetical protein F28D10_40 - Arabidopsis
  misc_feature (1)..(113): Homolog of NCBI NO: 11357701 NR Description: hypothetical protein F28D10_40 - Arabidopsis
  misc_feature (1)..(534): Homolog of NCBI NO: 21536540 NR Description: serine protein kinase-like protein [Arabidopsis
  misc_feature (1)..(534): Homolog of NCBI NO: 15237143 NR Description: serine protein kinase-like protein; protein id: supported by cDNA: 10218. [Arabidopsis thaliana]
  misc_feature (11)..(534): Homolog of NCBI NO: 18409750 NR Description: serine protein kinase - like; protein id:
  misc_feature (11)..(534): Homolog of NCBI NO: 9843649 NR Description: SRPK4 [Arabidopsis thaliana]
  misc_feature (11)..(534): Homolog of NCBI NO: 15010662 NR Description: AT3g53030/F8J2_200 [Arabidopsis thaliana]
  misc_feature (75)..(534): Homolog of NCBI NO: 11259819 NR Description: serine protein kinase-like - Arabidopsis thaliana
  misc_feature (19)..(309): Homolog of NCBI NO: 630737 NR Description: serine protein kinase SRPK1 - human
MAEDKNNGRVNDESEYSSEDEGTEDYKKGGYHTVRVGDTFKNGAYVIQSKLGWGHFSTVWLAWDTQESRYVALKVQKSAQHYTEAAMDEIKILKQIAEGDSGDKKCVVKLLDHFKHTGPNGKHVCMVFEYLGDNLLSVIKYSDYRGVPLHMVKELCFHILVGLDYLHRELSIIHTDLKPENVLLLSTIDPSRDVRRSGVPLVLPITKDKIVSESAVKPETKSYTYNGDLTKNQKKKIRKKAKKVVAQDFGGEEALEESERDSNSEARINGNSTVERSEGSSTRLMEGEEAREKANKKNGRGSRRGSRSTRQKLLSDIECKCKLVDFGNACWTYKQFTSDIQTRQYRCPEVVLGSKYSTSADMWSFACICFELATGDVLFDPHSGENYDRDEDHLALMMELLGMMPRKIALGGRYSRDFFNRQGELRHIRRLRFWPISKVLKEKYDFSEQDAKDMSDFLVTILEFVPEKRPTAAQCLKHPWFNPGPRLLEPSLKPQQPKGEEEGAANENIEKEKDEREAMEAGVGNIAIDVSEPK

SEQ ID NO: 90199 - protein, 448 aa, Arabidopsis thaliana
  peptide (1)..(448): Ceres Seq. ID no. 12722980
  misc_feature (1)..(395): Pfam Name: Protein kinase domain Pfam Description: Protein kinase domain
  misc_feature (1)..(448): Homolog of NCBI NO: 15230526 NR Description: putative protein; protein id: At3g44850.1 thaliana] >gi|9967495|emb|CAC03535.2| putative protein
  misc_feature (21)..(448): Homolog of NCBI NO: 11357701 NR Description: hypothetical protein F28D10_40 - Arabidopsis
  misc_feature (1)..(27): Homolog of NCBI NO: 11357701 NR Description: hypothetical protein F28D10_40 - Arabidopsis
  misc_feature (1)..(448): Homolog of NCBI NO: 21536540 NR Description: serine protein kinase-like protein [Arabidopsis
  misc_feature (1)..(448): Homolog of NCBI NO: 15237143 NR Description: serine protein kinase-like protein; protein id: supported by cDNA: 10218. [Arabidopsis thaliana]
  misc_feature (1)..(448): Homolog of NCBI NO: 18409750 NR Description: serine protein kinase - like; protein id:
  misc_feature (1)..(448): Homolog of NCBI NO: 9843649 NR Description: SRPK4 [Arabidopsis thaliana]
  misc_feature (1)..(448): Homolog of NCBI NO: 15010662 NR Description: AT3g53030/F8J2_200 [Arabidopsis thaliana]
  misc_feature (1)..(448): Homolog of NCBI NO: 11259819 NR Description: serine protein kinase-like - Arabidopsis thaliana
  misc_feature (1)..(223): Homolog of NCBI NO: 630737 NR Description: serine protein kinase SRPK1 - human
MDEIKILKQIAEGDSGDKKCVVKLLDHFKHTGPNGKHVCMVFEYLGDNLLSVIKYSDYRGVPLHMVKELCFHILVGLDYLHRELSIIHTDLKPENVLLLSTIDPSRDVRRSGVPLVLPITKDKIVSESAVKPETKSYTYNGDLTKNQKKKIRKKAKKVVAQDFGGEEALEESERDSNSEARINGNSTVERSEGSSTRLMEGEEAREKANKKNGRGSRRGSRSTRQKLLSDIECKCKLVDFGNACWTYKQFTSDIQTRQYRCPEVVLGSKYSTSADMWSFACICFELATGDVLFDPHSGENYDRDEDHLALMMELLGMMPRKIALGGRYSRDFFNRQGELRHIRRLRFWPISKVLKEKYDFSEQDAKDMSDFLVTILEFVPEKRPTAAQCLKHPWFNPGPRLLEPSLKPQQPKGEEEGAANENIEKEKDEREAMEAGVGNIAIDVSEPK

SEQ ID NO: 90200 - protein, 409 aa, Arabidopsis thaliana
  peptide (1)..(409): Ceres Seq. ID no. 12722981
  misc_feature (1)..(356): Pfam Name: Protein kinase domain Pfam Description: Protein kinase domain
  misc_feature (1)..(409): Homolog of NCBI NO: 15230526 NR Description: putative protein; protein id: At3g44850.1 thaliana] >gi|9967495|emb|CAC03535.2| putative protein
  misc_feature (1)..(409): Homolog of NCBI NO: 11357701 NR Description: hypothetical protein F28D10_40 - Arabidopsis
  misc_feature (1)..(409): Homolog of NCBI NO: 21536540 NR Description: serine protein kinase-like protein [Arabidopsis
  misc_feature (1)..(409): Homolog of NCBI NO: 15237143 NR Description: serine protein kinase-like protein; protein id: supported by cDNA: 10218. [Arabidopsis thaliana]
  misc_feature (1)..(409): Homolog of NCBI NO: 18409750 NR Description: serine protein kinase - like; protein id:
  misc_feature (1)..(409): Homolog of NCBI NO: 9843649 NR Description: SRPK4 [Arabidopsis thaliana]
  misc_feature (1)..(409): Homolog of NCBI NO: 15010662 NR Description: AT3g53030/F8J2_200 [Arabidopsis thaliana]
  misc_feature (1)..(409): Homolog of NCBI NO: 11259819 NR Description: serine protein kinase-like - Arabidopsis thaliana
  misc_feature (1)..(184): Homolog of NCBI NO: 630737 NR Description: serine protein kinase SRPK1 - human
  misc_feature (146)..(357): Homolog of NCBI NO: 630737 NR Description: serine protein kinase SRPK1 - human
MVFEYLGDNLLSVIKYSDYRGVPLHMVKELCFHILVGLDYLHRELSIIHTDLKPENVLLLSTIDPSRDVRRSGVPLVLPITKDKIVSESAVKPETKSYTYNGDLTKNQKKKIRKKAKKVVAQDFGGEEALEESERDSNSEARINGNSTVERSEGSSTRLMEGEEAREKANKKNGRGSRRGSRSTRQKLLSDIECKCKLVDFGNACWTYKQFTSDIQTRQYRCPEVVLGSKYSTSADMWSFACICFELATGDVLFDPHSGENYDRDEDHLALMMELLGMMPRKIALGGRYSRDFFNRQGELRHIRRLRFWPISKVLKEKYDFSEQDAKDMSDFLVTILEFVPEKRPTAAQCLKHPWFNPGPRLLEPSLKPQQPKGEEEGAANENIEKEKDEREAMEAGVGNIAIDVSEPK

SEQ ID NO: 90201 - DNA, 918 bp, Arabidopsis thaliana
  misc_feature (1)..(918): Ceres Seq. ID no. 12722982
  misc_feature: MA Experiment ID: 108434 Result: Up-regulated in Transcription
  misc_feature: MA Experiment 108434 PARAMETER Experiment Name: At_Root_Tips_cDNA_P Parameter: Tissue Value: Root Tips
  misc_feature: MA Experiment ID: 108463 Result: Down-regulated in Transcription
  misc_feature: MA Experiment 108463 PARAMETER Experiment Name: At_Germinating_Seeds_cDNA_P Parameter: Age (day) Value: 3 vs. 0
  misc_feature: MA Experiment 108463 PARAMETER Experiment Name: At_Germinating_Seeds_cDNA_P Parameter: Tissue Value: Germinating Seeds
  misc_feature: MA Experiment ID: 108464 Result: Down-regulated in Transcription
  misc_feature: MA Experiment 108464 PARAMETER Experiment Name: At_Germinating_Seeds_cDNA_P Parameter: Age (day) Value: 4 vs. 0
  misc_feature: MA Experiment 108464 PARAMETER Experiment Name: At_Germinating_Seeds_cDNA_P Parameter: Tissue Value: Germinating Seeds
  misc_feature: MA Experiment ID: 108474 Result: Up-regulated in Transcription
  misc_feature: MA Experiment 108474 PARAMETER Experiment Name: At_Drought_Flowers_cDNA_P Parameter: Timepoint (hr) Value: null
  misc_feature: MA Experiment 108474 PARAMETER Experiment Name: At_Drought_Flowers_cDNA_P Parameter: Treatment Value: Drought vs. No Drought
  misc_feature: MA Experiment ID: 108488 Result: Up-regulated in Transcription
  misc_feature: MA Experiment ID: 108561 Result: Down-regulated in Transcription
  misc_feature: MA Experiment 108561 PARAMETER Experiment Name: At_100uM_ABA_cDNA_P Parameter: Timepoint (hr) Value: 6
  misc_feature: MA Experiment 108561 PARAMETER Experiment Name: At_100uM_ABA_cDNA_P Parameter: Tissue Value: Aerial
  misc_feature: MA Experiment 108561 PARAMETER Experiment Name: At_100uM_ABA_cDNA_P Parameter: Treatment Value: 100uM ABA vs. No Treatment
  misc_feature: MA Experiment ID: 108573 Result: Down-regulated in Transcription
  misc_feature: MA Experiment 108573 PARAMETER Experiment Name: At_Drought_cDNA_P Parameter: Timepoint (hr) Value: 6
  misc_feature: MA Experiment 108573 PARAMETER Experiment Name: At_Drought_cDNA_P Parameter: Tissue Value: Aerial
  misc_feature: MA Experiment 108573 PARAMETER Experiment Name: At_Drought_cDNA_P Parameter: Treatment Value: Drought vs. No Drought
  misc_feature: MA Experiment ID: 108595 Result: Down-regulated in Transcription
  misc_feature: MA Experiment 108595 PARAMETER Experiment Name: At_Ler-pi_Ovule_cDNA_P Parameter: Plant Line Value: null
  misc_feature: MA Experiment ID: 20000069 Result: Down-regulated in Transcription
  misc_feature: MA Experiment 20000069 PARAMETER Experiment Name: At_100uM_ABA_Mutants_cDNA_P Parameter: Plant Line Value: CS23
  misc_feature: MA Experiment 20000069 PARAMETER Experiment Name: At_100uM_ABA_Mutants_cDNA_P Parameter: Timepoint (hr) Value: 6
  misc_feature: MA Experiment 20000069 PARAMETER Experiment Name: At_100uM_ABA_Mutants_cDNA_P Parameter: Tissue Value: Aerial
  misc_feature: MA Experiment 20000069 PARAMETER Experiment Name: At_100uM_ABA_Mutants_cDNA_P Parameter: Treatment Value: 100uM ABA vs. No Treatment
  misc_feature: MA Experiment ID: 20000070 Result: Down-regulated in Transcription
  misc_feature: MA Experiment 20000070 PARAMETER Experiment Name: At_100uM_ABA_Mutants_cDNA_P Parameter: Plant Line Value: CS24
  misc_feature: MA Experiment 20000070 PARAMETER Experiment Name: At_100uM_ABA_Mutants_cDNA_P Parameter: Timepoint (hr) Value: 6
  misc_feature: MA Experiment 20000070 PARAMETER Experiment Name: At_100uM_ABA_Mutants_cDNA_P Parameter: Tissue Value: Aerial
  misc_feature: MA Experiment 20000070 PARAMETER Experiment Name: At_100uM_ABA_Mutants_cDNA_P Parameter: Treatment Value: 100uM ABA vs. No Treatment
  misc_feature: MA Experiment ID: 20000086 Result: Down-regulated in Transcription
  misc_feature: MA Experiment 20000086 PARAMETER Experiment Name: At_100uM_ABA_Mutants_cDNA_P Parameter: Plant Line Value: CS22
  misc_feature: MA Experiment 20000086 PARAMETER Experiment Name: At_100uM_ABA_Mutants_cDNA_P Parameter: Timepoint (hr) Value: 6
  misc_feature: MA Experiment 20000086 PARAMETER Experiment Name: At_100uM_ABA_Mutants_cDNA_P Parameter: Tissue Value: Aerial
  misc_feature: MA Experiment 20000086 PARAMETER Experiment Name: At_100uM_ABA_Mutants_cDNA_P Parameter: Treatment Value: 100uM ABA vs. No Treatment
  misc_feature: MA Experiment ID: 20000087 Result: Down-regulated in Transcription
  misc_feature: MA Experiment 20000087 PARAMETER Experiment Name: At_100uM_ABA_Mutants_cDNA_P Parameter: Plant Line Value: WS
  misc_feature: MA Experiment 20000087 PARAMETER Experiment Name: At_100uM_ABA_Mutants_cDNA_P Parameter: Timepoint (hr) Value: 6
  misc_feature: MA Experiment 20000087 PARAMETER Experiment Name: At_100uM_ABA_Mutants_cDNA_P Parameter: Tissue Value: Aerial
  misc_feature: MA Experiment 20000087 PARAMETER Experiment Name: At_100uM_ABA_Mutants_cDNA_P Parameter: Treatment Value: 100uM ABA vs. No Treatment
  misc_feature: MA Experiment ID: 20000088 Result: Down-regulated in Transcription
  misc_feature: MA Experiment 20000088 PARAMETER Experiment Name: At_100uM_ABA_Mutants_cDNA_P Parameter: Plant Line Value: Landsberg
  misc_feature: MA Experiment 20000088 PARAMETER Experiment Name: At_100uM_ABA_Mutants_cDNA_P Parameter: Timepoint (hr) Value: 6
  misc_feature: MA Experiment 20000088 PARAMETER Experiment Name: At_100uM_ABA_Mutants_cDNA_P Parameter: Tissue Value: Aerial
  misc_feature: MA Experiment 20000088 PARAMETER Experiment Name: At_100uM_ABA_Mutants_cDNA_P Parameter: Treatment Value: 100uM ABA vs. No Treatment
  misc_feature: MA Experiment ID: 20000117 Result: Down-regulated in Transcription
  misc_feature: MA Experiment 20000117 PARAMETER Experiment Name: At_100uM_ABA_Mutants_cDNA_P Parameter: Plant Line Value: Columbia
  misc_feature: MA Experiment 20000117 PARAMETER Experiment Name: At_100uM_ABA_Mutants_cDNA_P Parameter: Timepoint (hr) Value: 6
  misc_feature: MA Experiment 20000117 PARAMETER Experiment Name: At_100uM_ABA_Mutants_cDNA_P Parameter: Tissue Value: Aerial
  misc_feature: MA Experiment 20000117 PARAMETER Experiment Name: At_100uM_ABA_Mutants_cDNA_P Parameter: Treatment Value: 100uM ABA vs. No Treatment
  misc_feature: MA Experiment ID: 20000185 Result: Down-regulated in Transcription
  misc_feature: MA Experiment 20000185 PARAMETER Experiment Name: At_Roots__P Parameter: Age (day) Value: 7 vs. 21
  misc_feature: MA Experiment 20000185 PARAMETER Experiment Name: At_Roots__P Parameter: Organism Value: A. thaliana
  misc_feature: MA Experiment 20000185 PARAMETER Experiment Name: At_Roots__P Parameter: Tissue Value: Roots vs. Whole Plant
  misc_feature: MA Experiment ID: 20000234 Result: Up-regulated in Transcription
  misc_feature: MA Experiment 20000234 PARAMETER Experiment Name: At_Siliques_P Parameter: Age (day) Value: 21
  misc_feature: MA Experiment 20000234 PARAMETER Experiment Name: At_Siliques_P Parameter: Organism Value: A. thaliana
  misc_feature: MA Experiment 20000234 PARAMETER Experiment Name: At_Siliques_P Parameter: Plant Line Value: WS
  misc_feature: MA Experiment 20000234 PARAMETER Experiment Name: At_Siliques_P Parameter: Tissue Value: Less Than 5mm Siliques vs. Whole Plant
  misc_feature: MA Experiment ID: 20000235 Result: Up-regulated in Transcription
  misc_feature: MA Experiment 20000235 PARAMETER Experiment Name: At_Siliques_P Parameter: Age (day) Value: 21
  misc_feature: MA Experiment 20000235 PARAMETER Experiment Name: At_Siliques_P Parameter: Organism Value: A. thaliana
  misc_feature: MA Experiment 20000235 PARAMETER Experiment Name: At_Siliques_P Parameter: Plant Line Value: WS
  misc_feature: MA Experiment 20000235 PARAMETER Experiment Name: At_Siliques_P Parameter: Tissue Value: 5-10mm Siliques vs. Whole Plant
  misc_feature: MA Experiment ID: 20000437 Result: Down-regulated in Transcription
  misc_feature: MA Experiment 20000437 PARAMETER Experiment Name: At_Drought_P Parameter: Age (day) Value: 8
  misc_feature: MA Experiment 20000437 PARAMETER Experiment Name: At_Drought_P Parameter: Organism Value: A. thaliana
  misc_feature: MA Experiment 20000437 PARAMETER Experiment Name: At_Drought_P Parameter: Plant Line Value: WS
  misc_feature: MA Experiment 20000437 PARAMETER Experiment Name: At_Drought_P Parameter: Timepoint (hr) Value: 24
  misc_feature: MA Experiment 20000437 PARAMETER Experiment Name: At_Drought_P Parameter: Tissue Value: Whole Plant
  misc_feature: MA Experiment 20000437 PARAMETER Experiment Name: At_Drought_P Parameter: Treatment Value: Drought vs. No Drought
  misc_feature: MA Experiment ID: 20000439 Result: Down-regulated in Transcription
  misc_feature: MA Experiment 20000439 PARAMETER Experiment Name: At_Roots__P Parameter: Age (day) Value: 14 vs. 21
  misc_feature: MA Experiment 20000439 PARAMETER Experiment Name: At_Roots__P Parameter: Organism Value: A. thaliana
  misc_feature: MA Experiment 20000439 PARAMETER Experiment Name: At_Roots__P Parameter: Tissue Value: Roots vs. Whole Plant
  misc_feature: MA Experiment ID: 20000794 Result: Down-regulated in Transcription
  misc_feature: MA Experiment 20000794 PARAMETER Experiment Name: At_Petals_P Parameter: Age (day) Value: 23-25 days
  misc_feature: MA Experiment 20000794 PARAMETER Experiment Name: At_Petals_P Parameter: Plant Line Value: WS
  misc_feature: MA Experiment 20000794 PARAMETER Experiment Name: At_Petals_P Parameter: Tissue Value: Petals vs. Whole plant
  misc_feature: MA Experiment ID: 20001450 Result: Down-regulated in Transcription
  misc_feature: MA Experiment 20001450 PARAMETER Experiment Name: At_Far-red-induction_P Parameter: Age (day) Value: 7
  misc_feature: MA Experiment 20001450 PARAMETER Experiment Name: At_Far-red-induction_P Parameter: Light Value: Far-red vs. White
  misc_feature: MA Experiment 20001450 PARAMETER Experiment Name: At_Far-red-induction_P Parameter: Organism Value: A. thaliana
  misc_feature: MA Experiment 20001450 PARAMETER Experiment Name: At_Far-red-induction_P Parameter: Plant Line Value: Columbia
  misc_feature: MA Experiment 20001450 PARAMETER Experiment Name: At_Far-red-induction_P Parameter: Timepoint (hr) Value: 8
  misc_feature: MA Experiment 20001450 PARAMETER Experiment Name: At_Far-red-induction_P Parameter: Tissue Value: Whole Plant
  misc_feature: MA Experiment ID: 20001560 Result: Up-regulated in Transcription
  misc_feature: MA Experiment 20001560 PARAMETER Experiment Name: At_Drought_Soil_Dry_P Parameter: Age (day) Value: 28
  misc_feature: MA Experiment 20001560 PARAMETER Experiment Name: At_Drought_Soil_Dry_P Parameter: Organism Value: A. thaliana
  misc_feature: MA Experiment 20001560 PARAMETER Experiment Name: At_Drought_Soil_Dry_P Parameter: Plant Line Value: WS
  misc_feature: MA Experiment 20001560 PARAMETER Experiment Name: At_Drought_Soil_Dry_P Parameter: Post Timepoint (hr) Value: None
  misc_feature: MA Experiment 20001560 PARAMETER Experiment Name: At_Drought_Soil_Dry_P Parameter: Post-Treatment Value: None
  misc_feature: MA Experiment 20001560 PARAMETER Experiment Name: At_Drought_Soil_Dry_P Parameter: Timepoint (day) Value: 14
  misc_feature: MA Experiment 20001560 PARAMETER Experiment Name: At_Drought_Soil_Dry_P Parameter: Treatment Value: Drought vs. No Drought
  misc_feature: MA Experiment ID: 20001757 Result: Up-regulated in Transcription
  misc_feature: MA Experiment 20001757 PARAMETER Experiment Name: At_50mM_NH4NO3_L-to-H_P Parameter: Timepoint (hr) Value: 6
  misc_feature: MA Experiment 20001757 PARAMETER Experiment Name: At_50mM_NH4NO3_L-to-H_P Parameter: Tissue Value: Leaf
  misc_feature: MA Experiment 20001757 PARAMETER Experiment Name: At_50mM_NH4NO3_L-to-H_P Parameter: Treatment Value: 50mM NH4NO3 vs 100mM Mannitol
  misc_feature: MA Experiment ID: 20001905 Result: Down-regulated in Transcription
  misc_feature: MA Experiment 20001905 PARAMETER Experiment Name: At_Drought_Reproduction_P Parameter: Age (day) Value: 40
  misc_feature: MA Experiment 20001905 PARAMETER Experiment Name: At_Drought_Reproduction_P Parameter: Organism Value: A. thaliana
  misc_feature: MA Experiment 20001905 PARAMETER Experiment Name: At_Drought_Reproduction_P Parameter: Plant Line Value: WS
  misc_feature: MA Experiment 20001905 PARAMETER Experiment Name: At_Drought_Reproduction_P Parameter: Timepoint (day) Value: 10
  misc_feature: MA Experiment 20001905 PARAMETER Experiment Name: At_Drought_Reproduction_P Parameter: Tissue Value: Rosettes
  misc_feature: MA Experiment 20001905 PARAMETER Experiment Name: At_Drought_Reproduction_P Parameter: Treatment Value: Drought vs. No Drought
  misc_feature: MA Experiment ID: 20001906 Result: Down-regulated in Transcription
  misc_feature: MA Experiment 20001906 PARAMETER Experiment Name: At_Drought_Reproduction_P Parameter: Age (day) Value: 35
  misc_feature: MA Experiment 20001906 PARAMETER Experiment Name: At_Drought_Reproduction_P Parameter: Organism Value: A. thaliana
  misc_feature: MA Experiment 20001906 PARAMETER Experiment Name: At_Drought_Reproduction_P Parameter: Plant Line Value: WS
  misc_feature: MA Experiment 20001906 PARAMETER Experiment Name: At_Drought_Reproduction_P Parameter: Timepoint (day) Value: 5
  misc_feature: MA Experiment 20001906 PARAMETER Experiment Name: At_Drought_Reproduction_P Parameter: Tissue Value: Siliques
  misc_feature: MA Experiment 20001906 PARAMETER Experiment Name: At_Drought_Reproduction_P Parameter: Treatment Value: Drought vs. No Drought
  misc_feature: MA Experiment ID: 20001908 Result: Down-regulated in Transcription
  misc_feature: MA Experiment 20001908 PARAMETER Experiment Name: At_Drought_Reproduction_P Parameter: Age (day) Value: 40
  misc_feature: MA Experiment 20001908 PARAMETER Experiment Name: At_Drought_Reproduction_P Parameter: Organism Value: A. thaliana
  misc_feature: MA Experiment 20001908 PARAMETER Experiment Name: At_Drought_Reproduction_P Parameter: Plant Line Value: WS
  misc_feature: MA Experiment 20001908 PARAMETER Experiment Name: At_Drought_Reproduction_P Parameter: Timepoint (day) Value: 10
  misc_feature: MA Experiment 20001908 PARAMETER Experiment Name: At_Drought_Reproduction_P Parameter: Tissue Value: Siliques
  misc_feature: MA Experiment 20001908 PARAMETER Experiment Name: At_Drought_Reproduction_P Parameter: Treatment Value: Drought vs. No Drought
aagaagataacaattactacaactgtgcgctcttgttatctctgctttgaagtgaaatcagctttggctatggcttcttcgacagctttgtctctctcatggagctcctctccttgttggtcacacagcttcaatggcggtgcaaatgaaaccctaaaagtatctgagcgaaggttcaattttgaagttgtttcccagaagaaagctaagaaacttcgcaaggtaattttgaaagaggatgtgacggatttgggtaagcaagggcaattacttgatgtgaaagctggatttttcagaaacttcctcttgcctactggaaaggctcagcttatgactccacttctgctcaaggaattgaagatggaagacgaacggattgaggcagagaagcaaagggtgaaagaagaggcacaacaactggcgatggtattccaaaccgttggtgctttcaaggttaaacgcaaaggcggtaaaggcaaactgatatttggatctgtcacagctcaagacctcgtcgacatcatcaaatcacagctccaaaaggacatcgacaaacgccttgtctctctcccagaaatccgtgaaaccggagaatacatagccgaactcaagcttcaccccgatgtcactgctcgagttaagatcaatgttttcgctaactaaaccttcaacgattcaagactcctactgcatcccaaggaacgtatagagagggaaaagagagtagcctcttgtggtgaggattgaaggttgtgaagtttttcctttagattgtttgatgcatttgtatttttgctatttttggaatctggaaacgctaaaagtataatattctcttgcaagttatgatatttacttgaagttatattgtattcatttgtctgttgaagtgatgagaatgcttaaattaacactaac

SEQ ID NO: 90202 - protein, 220 aa, Arabidopsis thaliana
  peptide (1)..(220): Ceres Seq. ID no. 12722983
  misc_feature (134)..(220): Pfam Name: Ribosomal protein L9, C-terminal domain Pfam Description: Ribosomal protein L9, C-terminal domain
  misc_feature (24)..(220): Homolog of NCBI NO: 15230544 NR Description: RP19 gene for chloroplast ribosomal protein CL9; id: At3g44890.1, supported by cDNA: 13554., supported by cDNA: [Arabidopsis thaliana] >gi|133028|sp|P25864|RK9_ARATH 50S
  misc_feature (24)..(220): Homolog of NCBI NO: 1173069 NR Description: 50S RIBOSOMAL PROTEIN L9, CHLOROPLAST PRECURSOR
  misc_feature (24)..(220): Homolog of NCBI NO: 71256 NR Description: ribosomal protein L9 precursor, chloroplast -
  misc_feature (63)..(218): Homolog of NCBI NO: 22204126 NR Description: putative plastid ribosomal protein CL9 [Triticum
  misc_feature (69)..(217): Homolog of NCBI NO: 33862229 NR Description: 50S ribosomal protein L9 [Prochlorococcus marinus pastoris str. CCMP1378] >gi|33634447|emb|CAE20132.1| 50S protein L9 [Prochlorococcus marinus subsp. pastoris str.
  misc_feature (69)..(220): Homolog of NCBI NO: 33241283 NR Description: Ribosomal protein L9 [Prochlorococcus marinus marinus str. CCMP1375] >gi|33238813|gb|AAQ00878.1| Ribosomal
  misc_feature (69)..(217): Homolog of NCBI NO: 33864439 NR Description: 50S ribosomal protein L9 [Prochlorococcus marinus MIT 9313] >gi|33641219|emb|CAE22349.1| 50S ribosomal protein L9
  misc_feature (69)..(217): Homolog of NCBI NO: 7676164 NR Description: 50S RIBOSOMAL PROTEIN L9
  misc_feature (69)..(217): Homolog of NCBI NO: 16330765 NR Description: 50S ribosomal protein L9 [Synechocystis sp. PCC
  misc_feature (74)..(220): Homolog of NCBI NO: 17228075 NR Description: 50S ribosomal protein L9 [Nostoc sp. PCC 7120]
KKITITTTVRSCYLCFEVKSALAMASSTALSLSWSSSPCWSHSFNGGANETLKVSERRFNFEVVSQKKAKKLRKVILKEDVTDLGKQGQLLDVKAGFFRNFLLPTGKAQLMTPLLLKELKMEDERIEAEKQRVKEEAQQLAMVFQTVGAFKVKRKGGKGKLIFGSVTAQDLVDIIKSQLQKDIDKRLVSLPEIRETGEYIAELKLHPDVTARVKINVFAN

SEQ ID NO: 90203 - protein, 197 aa, Arabidopsis thaliana; identical to SEQ ID NO: 75073
  peptide (1)..(197): Ceres Seq. ID no. 12722984
  misc_feature (111)..(197): Pfam Name: Ribosomal protein L9, C-terminal domain Pfam Description: Ribosomal protein L9, C-terminal domain
  misc_feature (1)..(197): Homolog of NCBI NO: 15230544 NR Description: RP19 gene for chloroplast ribosomal protein CL9; id: At3g44890.1, supported by cDNA: 13554., supported by cDNA: [Arabidopsis thaliana] >gi|133028|sp|P25864|RK9_ARATH 50S
  misc_feature (1)..(197): Homolog of NCBI NO: 1173069 NR Description: 50S RIBOSOMAL PROTEIN L9, CHLOROPLAST PRECURSOR
  misc_feature (1)..(197): Homolog of NCBI NO: 71256 NR Description: ribosomal protein L9 precursor, chloroplast -
  misc_feature (40)..(195): Homolog of NCBI NO: 22204126 NR Description: putative plastid ribosomal protein CL9 [Triticum
  misc_feature (46)..(194): Homolog of NCBI NO: 33862229 NR Description: 50S ribosomal protein L9 [Prochlorococcus marinus pastoris str. CCMP1378] >gi|33634447|emb|CAE20132.1| 50S protein L9 [Prochlorococcus marinus subsp. pastoris str.
  misc_feature (46)..(197): Homolog of NCBI NO: 33241283 NR Description: Ribosomal protein L9 [Prochlorococcus marinus marinus str. CCMP1375] >gi|33238813|gb|AAQ00878.1| Ribosomal
  misc_feature (46)..(194): Homolog of NCBI NO: 33864439 NR Description: 50S ribosomal protein L9 [Prochlorococcus marinus MIT 9313] >gi|33641219|emb|CAE22349.1| 50S ribosomal protein L9
  misc_feature (46)..(194): Homolog of NCBI NO: 7676164 NR Description: 50S RIBOSOMAL PROTEIN L9
  misc_feature (46)..(194): Homolog of NCBI NO: 16330765 NR Description: 50S ribosomal protein L9 [Synechocystis sp. PCC
  misc_feature (51)..(197): Homolog of NCBI NO: 17228075 NR Description: 50S ribosomal protein L9 [Nostoc sp. PCC 7120]

SEQ ID NO: 90204 - protein, 110 aa, Arabidopsis thaliana; identical to SEQ ID NO: 75074
  peptide (1)..(110): Ceres Seq. ID no. 12722985
  misc_feature (24)..(110): Pfam Name: Ribosomal protein L9, C-terminal domain Pfam Description: Ribosomal protein L9, C-terminal domain
  misc_feature (1)..(110): Homolog of NCBI NO: 15230544 NR Description: RP19 gene for chloroplast ribosomal protein CL9; id: At3g44890.1, supported by cDNA: 13554., supported by cDNA: [Arabidopsis thaliana] >gi|133028|sp|P25864|RK9_ARATH 50S
  misc_feature (1)..(110): Homolog of NCBI NO: 1173069 NR Description: 50S RIBOSOMAL PROTEIN L9, CHLOROPLAST PRECURSOR
  misc_feature (1)..(110): Homolog of NCBI NO: 71256 NR Description: ribosomal protein L9 precursor, chloroplast -
  misc_feature (1)..(108): Homolog of NCBI NO: 22204126 NR Description: putative plastid ribosomal protein CL9 [Triticum
  misc_feature (1)..(107): Homolog of NCBI NO: 33862229 NR Description: 50S ribosomal protein L9 [Prochlorococcus marinus pastoris str. CCMP1378] >gi|33634447|emb|CAE20132.1| 50S protein L9 [Prochlorococcus marinus subsp. pastoris str.
  misc_feature (1)..(110): Homolog of NCBI NO: 33241283 NR Description: Ribosomal protein L9 [Prochlorococcus marinus marinus str. CCMP1375] >gi|33238813|gb|AAQ00878.1| Ribosomal
  misc_feature (1)..(107): Homolog of NCBI NO: 33864439 NR Description: 50S ribosomal protein L9 [Prochlorococcus marinus MIT 9313] >gi|33641219|emb|CAE22349.1| 50S ribosomal protein L9
  misc_feature (1)..(107): Homolog of NCBI NO: 7676164 NR Description: 50S RIBOSOMAL PROTEIN L9
  misc_feature (1)..(107): Homolog of NCBI NO: 16330765 NR Description: 50S ribosomal protein L9 [Synechocystis sp. PCC
  misc_feature (1)..(110): Homolog of NCBI NO: 17228075 NR Description: 50S ribosomal protein L9 [Nostoc sp. PCC 7120]

SEQ ID NO: 90205 - DNA, 1896 bp, Arabidopsis thaliana
  misc_feature (1)..(1896): Ceres Seq. ID no. 12723002
  misc_feature: MA Experiment ID: 20000182 Result: Up-regulated in Transcription
  misc_feature: MA Experiment 20000182 PARAMETER Experiment Name: At_2mM_SA_P Parameter: Age (day) Value: 14
  misc_feature: MA Experiment 20000182 PARAMETER Experiment Name: At_2mM_SA_P Parameter: Organism Value: A. thaliana
  misc_feature: MA Experiment 20000182 PARAMETER Experiment Name: At_2mM_SA_P Parameter: Plant Line Value: WS
  misc_feature: MA Experiment 20000182 PARAMETER Experiment Name: At_2mM_SA_P Parameter: Timepoint (hr) Value: 6
  misc_feature: MA Experiment 20000182 PARAMETER Experiment Name: At_2mM_SA_P Parameter: Tissue Value: Aerial
  misc_feature: MA Experiment 20000182 PARAMETER Experiment Name: At_2mM_SA_P Parameter: Treatment Value: 2mM SA vs. No Treatment
  misc_feature: MA Experiment ID: 20000184 Result: Down-regulated in Transcription
  misc_feature: MA Experiment 20000184 PARAMETER Experiment Name: At_Shoots__P Parameter: Age (day) Value: 7
  misc_feature: MA Experiment 20000184 PARAMETER Experiment Name: At_Shoots__P Parameter: Tissue Value: Shoots vs. Whole Plant
  misc_feature: MA Experiment ID: 20000234 Result: Down-regulated in Transcription
  misc_feature: MA Experiment 20000234 PARAMETER Experiment Name: At_Siliques_P Parameter: Age (day) Value: 21
  misc_feature: MA Experiment 20000234 PARAMETER Experiment Name: At_Siliques_P Parameter: Organism Value: A. thaliana
  misc_feature: MA Experiment 20000234 PARAMETER Experiment Name: At_Siliques_P Parameter: Plant Line Value: WS
  misc_feature: MA Experiment 20000234 PARAMETER Experiment Name: At_Siliques_P Parameter: Tissue Value: Less Than 5mm Siliques vs. Whole Plant
  misc_feature: MA Experiment ID: 20000235 Result: Down-regulated in Transcription
  misc_feature: MA Experiment 20000235 PARAMETER Experiment Name: At_Siliques_P Parameter: Age (day) Value: 21
  misc_feature: MA Experiment 20000235 PARAMETER Experiment Name: At_Siliques_P Parameter: Organism Value: A. thaliana
  misc_feature: MA Experiment 20000235 PARAMETER Experiment Name: At_Siliques_P Parameter: Plant Line Value: WS
  misc_feature: MA Experiment 20000235 PARAMETER Experiment Name: At_Siliques_P Parameter: Tissue Value: 5-10mm Siliques vs. Whole Plant
  misc_feature: MA Experiment ID: 20000264 Result: Down-regulated in Transcription
  misc_feature: MA Experiment 20000264 PARAMETER Experiment Name: At_Open_Flower_P Parameter: Age (day) Value: 21
  misc_feature: MA Experiment 20000264 PARAMETER Experiment Name: At_Open_Flower_P Parameter: Plant Line Value: WS
  misc_feature: MA Experiment 20000264 PARAMETER Experiment Name: At_Open_Flower_P Parameter: Tissue Value: Open Flower vs. Whole Plant
  misc_feature: MA Experiment ID: 20000265 Result: Down-regulated in Transcription
  misc_feature: MA Experiment 20000265 PARAMETER Experiment Name: At_Open_Flower_P Parameter: Age (day) Value: 21
  misc_feature: MA Experiment 20000265 PARAMETER Experiment Name: At_Open_Flower_P Parameter: Plant Line Value: WS
  misc_feature: MA Experiment 20000265 PARAMETER Experiment Name: At_Open_Flower_P Parameter: Tissue Value: Closed Flower vs. Whole Plant
  misc_feature: MA Experiment ID: 20000286 Result: Down-regulated in Transcription
  misc_feature: MA Experiment 20000286 PARAMETER Experiment Name: At_Open_Flower_P Parameter: Age (day) Value: 21
  misc_feature: MA Experiment 20000286 PARAMETER Experiment Name: At_Open_Flower_P Parameter: Plant Line Value: WS
  misc_feature: MA Experiment 20000286 PARAMETER Experiment Name: At_Open_Flower_P Parameter: Tissue Value: Half Open vs. Whole Plant
  misc_feature: MA Experiment ID: 20000437 Result: Up-regulated in Transcription
  misc_feature: MA Experiment 20000437 PARAMETER Experiment Name: At_Drought_P Parameter: Age (day) Value: 8
  misc_feature: MA Experiment 20000437 PARAMETER Experiment Name: At_Drought_P Parameter: Organism Value: A. thaliana
  misc_feature: MA Experiment 20000437 PARAMETER Experiment Name: At_Drought_P Parameter: Plant Line Value: WS
  misc_feature: MA Experiment 20000437 PARAMETER Experiment Name: At_Drought_P Parameter: Timepoint (hr) Value: 24
  misc_feature: MA Experiment 20000437 PARAMETER Experiment Name: At_Drought_P Parameter: Tissue Value: Whole Plant
  misc_feature: MA Experiment 20000437 PARAMETER Experiment Name: At_Drought_P Parameter: Treatment Value: Drought vs. No Drought
  misc_feature: MA Experiment ID: 20000438 Result: Down-regulated in Transcription
  misc_feature: MA Experiment 20000438 PARAMETER Experiment Name: At_Shoots__P Parameter: Age (day) Value: 14
  misc_feature: MA Experiment 20000438 PARAMETER Experiment Name: At_Shoots__P Parameter: Tissue Value: Shoots vs. Whole Plant
  misc_feature: MA Experiment ID: 20001247 Result: Up-regulated in Transcription
  misc_feature: MA Experiment 20001247 PARAMETER Experiment Name: At_Far-red-induction_P Parameter: Age (day) Value: 7
  misc_feature: MA Experiment 20001247 PARAMETER Experiment Name: At_Far-red-induction_P Parameter: Light Value: Far-red vs. White
  misc_feature: MA Experiment 20001247 PARAMETER Experiment Name: At_Far-red-induction_P Parameter: Organism Value: A. thaliana
  misc_feature: MA Experiment 20001247 PARAMETER Experiment Name: At_Far-red-induction_P Parameter: Plant Line Value: Columbia
  misc_feature: MA Experiment 20001247 PARAMETER Experiment Name: At_Far-red-induction_P Parameter: Timepoint (hr) Value: 1
  misc_feature: MA Experiment 20001247 PARAMETER Experiment Name: At_Far-red-induction_P Parameter: Tissue Value: Whole Plant
  misc_feature: MA Experiment ID: 20001248 Result: Up-regulated in Transcription
  misc_feature: MA Experiment 20001248 PARAMETER Experiment Name: At_Far-red-induction_P Parameter: Age (day) Value: 7
  misc_feature: MA Experiment 20001248 PARAMETER Experiment Name: At_Far-red-induction_P Parameter: Light Value: Far-red vs. White
  misc_feature: MA Experiment 20001248 PARAMETER Experiment Name: At_Far-red-induction_P Parameter: Organism Value: A. thaliana
  misc_feature: MA Experiment 20001248 PARAMETER Experiment Name: At_Far-red-induction_P Parameter: Plant Line Value: Columbia
  misc_feature: MA Experiment 20001248 PARAMETER Experiment Name: At_Far-red-induction_P Parameter: Timepoint (hr) Value: 4
  misc_feature: MA Experiment 20001248 PARAMETER Experiment Name: At_Far-red-induction_P Parameter: Tissue Value: Whole Plant
  misc_feature: MA Experiment ID: 20001558 Result: Down-regulated in Transcription
  misc_feature: MA Experiment 20001558 PARAMETER Experiment Name: At_Drought_Soil_Dry_P Parameter: Age (day) Value: 27
  misc_feature: MA Experiment 20001558 PARAMETER Experiment Name: At_Drought_Soil_Dry_P Parameter: Organism Value: A. thaliana
  misc_feature: MA Experiment 20001558 PARAMETER Experiment Name: At_Drought_Soil_Dry_P Parameter: Plant Line Value: WS
  misc_feature: MA Experiment 20001558 PARAMETER Experiment Name: At_Drought_Soil_Dry_P Parameter: Post Timepoint (hr) Value: 6
  misc_feature: MA Experiment 20001558 PARAMETER Experiment Name: At_Drought_Soil_Dry_P Parameter: Post-Treatment Value: Re-Water vs. No Drought
  misc_feature: MA Experiment 20001558 PARAMETER Experiment Name: At_Drought_Soil_Dry_P Parameter: Timepoint (day) Value: 13
  misc_feature: MA Experiment 20001558 PARAMETER Experiment Name: At_Drought_Soil_Dry_P Parameter: Treatment Value: Drought vs. No Drought
atcgcgccttaaaacaacgaatctccggcgaaatcatcatcttctccggcgatgaagacgacggcgacgtcgtttgtaacgggagagagagttgtagttttcgtcgtggtttctcgtattctcttatctcttcctttatcacttatctcccatggcttctccctcttcctcctctctctctccgccttcctcgtcgagatccgcgtcgagacttctccgtttcttctctctcatttcagctccagacgcggtgcgtcttcagggatattactaggagctgtgacacttccttctgttatgatatctaagttagttcagctttcaagagctatttcaatccatgaagctgaacaagatgagcttgcacatgtgacaatgcagtattgggcagcatcggctagttgttgtgctatacttatatatctatcagtgattatgtcacaagtgagaaaagatgaatctttgtcgtcatcgtctatttggcttacgagagttagcttgactgggacagtgttgtatggagtagcatgttttgtttcactttccatgatttcacacactggcttgaatacgtcattgaaaatgttgtggatgttatttcatggacttgcagctgtgaagttgattcgacatttgctttgcactttcccatcgtgtgcttcgataggggaagcacttcttgtgaccagtggtcttgttctctattttggcgactttttggcatgcacaattgcaaagatttttgagaaattgatacctgtggatcttgtctcaataagctatggaataaagagaacggaaaccggcataatcgttcagggtctactgttgggccttctacttttcccgatggtgtttagatttgttctgcatatatatgaaagctctttgagaaagagagatgctcgacaaagaaactgcagtgatgctgcaaaatctgtcttattctttgtttcacttctattttttatggtcgtggctgttccttcttggatgcagtttgtacacgatttcaaccagcatcccttcttatgggtgctcacatttgtcttttctgaacctctgaagagactttcattatgtatctactggattctgttgatcgttgtgtctgtctcacgattttataacatctcgaggagtagcaaggttgagagaatcttgcttcggaagtactaccatctgatggctgttttaatgttcttgccagctcttgtcttacagcctaaatttctcgatctagcatttggtgcagcattggcagtatttgttgcattggagatcattcgaatatggagaattcagcctcttggagagcctttacatcaattcatgaatgctttcactgaccatcgtgactcagagcatctgattgtcagccacttctcactcttgcttgggtgtgcgcttccgatttggatgtcatctgggttcaatgaccgagccttatctccatttgctggaattctcagcctaggaattggagatacaatggcatcgatggttggtcacaaatatggggtgttgagatggagcaagacaggaaagaaaacggttgaaggaacagcagcgggaataacatcgatgatggcagtgtgctttgttctggtcccaatattagcatcaatgggttatatactaagtcaaggatggtggtcgcttctggtggctgtgacagccaccgggatgttggaagcttacacggcgcagttagacaatgcctttatacctcttgtcttctactcactcctctgcttgtaaattagttaagcctagagtcaacattctacgttttttcacttcatgtacataacaaagtatcttactactaaccatacttcctcttgttaattgccgtatctctttaagagacaaatgtgttttttgatctcaact

SEQ ID NO: 90206 - protein, 569 aa, Arabidopsis thaliana
  peptide (1)..(569): Ceres Seq. ID no. 12723003
  misc_feature (1)..(569): Homolog of NCBI NO: 22331608 NR Description: putative protein; protein id: At3g45040.1,
  misc_feature (1)..(569): Homolog of NCBI NO: 18389248 NR Description: unknown protein [Arabidopsis thaliana]
  misc_feature (1)..(414): Homolog of NCBI NO: 11357412 NR Description: hypothetical protein F14D17.110 - Arabidopsis >gi|7671405|emb|CAB89319.1| putative protein [Arabidopsis
  misc_feature (413)..(569): Homolog of NCBI NO: 11357412 NR Description: hypothetical protein F14D17.110 - Arabidopsis >gi|7671405|emb|CAB89319.1| putative protein [Arabidopsis
  misc_feature (204)..(567): Homolog of NCBI NO: 7662482 NR Description: KIAA1094 protein [Homo sapiens] Hypothetical protein KIAA1094 >gi|5689525|dbj|BAA83046.1| protein [Homo sapiens] >gi|23272297|gb|AAH35556.1| KIAA1094
  misc_feature (204)..(567): Homolog of NCBI NO: 40789043 NR Description: KIAA1094 protein [Homo sapiens]
  misc_feature (128)..(567): Homolog of NCBI NO: 27706618 NR Description: similar to Hypothetical protein KIAA1094 [Rattus
  misc_feature (128)..(567): Homolog of NCBI NO: 29244058 NR Description: cDNA sequence BC026973 [Mus musculus]
  misc_feature (325)..(569): Homolog of NCBI NO: 24654201 NR Description: CG8311-PA [Drosophila melanogaster]
  misc_feature (297)..(566): Homolog of NCBI NO: 19075483 NR Description: putative dolichol kinase [Schizosaccharomyces
MKTTATSFVTGERVVVFVVVSRILLSLPLSLISHGFSLFLLSLSAFLVEIRVETSPFLLSHFSSRRGASSGILLGAVTLPSVMISKLVQLSRAISIHEAEQDELAHVTMQYWAASASCCAILIYLSVIMSQVRKDESLSSSSIWLTRVSLTGTVLYGVACFVSLSMISHTGLNTSLKMLWMLFHGLAAVKLIRHLLCTFPSCASIGEALLVTSGLVLYFGDFLACTIAKIFEKLIPVDLVSISYGIKRTETGIIVQGLLLGLLLFPMVFRFVLHIYESSLRKRDARQRNCSDAAKSVLFFVSLLFFMVVAVPSWMQFVHDFNQHPFLWVLTFVFSEPLKRLSLCIYWILLIVVSVSRFYNISRSSKVERILLRKYYHLMAVLMFLPALVLQPKFLDLAFGAALAVFVALEIIRIWRIQPLGEPLHQFMNAFTDHRDSEHLIVSHFSLLLGCALPIWMSSGFNDRALSPFAGILSLGIGDTMASMVGHKYGVLRWSKTGKKTVEGTAAGITSMMAVCFVLVPILASMGYILSQGWWSLLVAVTATGMLEAYTAQLDNAFIPLVFYSLLCL

SEQ ID NO: 90207 - protein, 487 aa, Arabidopsis thaliana; identical to SEQ ID NO: 86417
  peptide (1)..(487): Ceres Seq. ID no. 12723004
  misc_feature (1)..(487): Homolog of NCBI NO: 22331608 NR Description: putative protein; protein id: At3g45040.1,
  misc_feature (1)..(487): Homolog of NCBI NO: 18389248 NR Description: unknown protein [Arabidopsis thaliana]
  misc_feature (1)..(332): Homolog of NCBI NO: 11357412 NR Description: hypothetical protein F14D17.110 - Arabidopsis >gi|7671405|emb|CAB89319.1| putative protein [Arabidopsis
  misc_feature (331)..(487): Homolog of NCBI NO: 11357412 NR Description: hypothetical protein F14D17.110 - Arabidopsis >gi|7671405|emb|CAB89319.1| putative protein [Arabidopsis
  misc_feature (122)..(485): Homolog of NCBI NO: 7662482 NR Description: KIAA1094 protein [Homo sapiens] Hypothetical protein KIAA1094 >gi|5689525|dbj|BAA83046.1| protein [Homo sapiens] >gi|23272297|gb|AAH35556.1| KIAA1094
  misc_feature (122)..(485): Homolog of NCBI NO: 40789043 NR Description: KIAA1094 protein [Homo sapiens]
  misc_feature (46)..(485): Homolog of NCBI NO: 27706618 NR Description: similar to Hypothetical protein KIAA1094 [Rattus
  misc_feature (46)..(485): Homolog of NCBI NO: 29244058 NR Description: cDNA sequence BC026973 [Mus musculus]
  misc_feature (243)..(487): Homolog of NCBI NO: 24654201 NR Description: CG8311-PA [Drosophila melanogaster]
  misc_feature (215)..(484): Homolog of NCBI NO: 19075483 NR Description: putative dolichol kinase [Schizosaccharomyces

SEQ ID NO: 90208 - protein, 461 aa, Arabidopsis thaliana; identical to SEQ ID NO: 86418
  peptide (1)..(461): Ceres Seq. ID no. 12723005
  misc_feature (1)..(461): Homolog of NCBI NO: 22331608 NR Description: putative protein; protein id: At3g45040.1,
  misc_feature (1)..(461): Homolog of NCBI NO: 18389248 NR Description: unknown protein [Arabidopsis thaliana]
  misc_feature (1)..(306): Homolog of NCBI NO: 11357412 NR Description: hypothetical protein F14D17.110 - Arabidopsis >gi|7671405|emb|CAB89319.1| putative protein [Arabidopsis
  misc_feature (305)..(461): Homolog of NCBI NO: 11357412 NR Description: hypothetical protein F14D17.110 - Arabidopsis >gi|7671405|emb|CAB89319.1| putative protein [Arabidopsis
  misc_feature (96)..(459): Homolog of NCBI NO: 7662482 NR Description: KIAA1094 protein [Homo sapiens] Hypothetical protein KIAA1094 >gi|5689525|dbj|BAA83046.1| protein [Homo sapiens] >gi|23272297|gb|AAH35556.1| KIAA1094
  misc_feature (96)..(459): Homolog of NCBI NO: 40789043 NR Description: KIAA1094 protein [Homo sapiens]
  misc_feature (20)..(459): Homolog of NCBI NO: 27706618 NR Description: similar to Hypothetical protein KIAA1094 [Rattus
  misc_feature (20)..(459): Homolog of NCBI NO: 29244058 NR Description: cDNA sequence BC026973 [Mus musculus]
  misc_feature (217)..(461): Homolog of NCBI NO: 24654201 NR Description: CG8311-PA [Drosophila melanogaster]
  misc_feature (189)..(458): Homolog of NCBI NO: 19075483 NR Description: putative dolichol kinase [Schizosaccharomyces

SEQ ID NO: 90209 - DNA, 972 bp, Arabidopsis thaliana
  misc_feature (1)..(972): Ceres Seq. ID no. 12723010
  misc_feature: MA Experiment ID: 20000314 Result: Up-regulated in Transcription
  misc_feature: MA Experiment 20000314 PARAMETER Experiment Name: At_14day_Shoots-Roots_Sub_P Parameter: Age (day) Value: 14
  misc_feature: MA Experiment 20000314 PARAMETER Experiment Name: At_14day_Shoots-Roots_Sub_P Parameter: Organism Value: A. thaliana
  misc_feature: MA Experiment 20000314 PARAMETER Experiment Name: At_14day_Shoots-Roots_Sub_P Parameter: Plant Line Value: WS
  misc_feature: MA Experiment 20000314 PARAMETER Experiment Name: At_14day_Shoots-Roots_Sub_P Parameter: Tissue Value: Roots vs. Whole Plant
  misc_feature: MA Experiment ID: 20000347 Result: Down-regulated in Transcription
  misc_feature: MA Experiment 20000347 PARAMETER Experiment Name: At_2mM_SA_Sub_P Parameter: Age (day) Value: 14
  misc_feature: MA Experiment 20000347 PARAMETER Experiment Name: At_2mM_SA_Sub_P Parameter: Organism Value: A. thaliana
  misc_feature: MA Experiment 20000347 PARAMETER Experiment Name: At_2mM_SA_Sub_P Parameter: Plant Line Value: WS
  misc_feature: MA Experiment 20000347 PARAMETER Experiment Name: At_2mM_SA_Sub_P Parameter: Timepoint (hr) Value: 6
  misc_feature: MA Experiment 20000347 PARAMETER Experiment Name: At_2mM_SA_Sub_P Parameter: Tissue Value: Aerial
  misc_feature: MA Experiment 20000347 PARAMETER Experiment Name: At_2mM_SA_Sub_P Parameter: Treatment Value: 2mM SA vs. No Treatment
  misc_feature: MA Experiment ID: 20000634 Result: Down-regulated in Transcription
  misc_feature: MA Experiment 20000634 PARAMETER Experiment Name: At_10percent_PEG_Sub_P Parameter: Age (day) Value: 12
  misc_feature: MA Experiment 20000634 PARAMETER Experiment Name: At_10percent_PEG_Sub_P Parameter: Organism Value: A. thaliana
  misc_feature: MA Experiment 20000634 PARAMETER Experiment Name: At_10percent_PEG_Sub_P Parameter: Plant Line Value: WS
  misc_feature: MA Experiment 20000634 PARAMETER Experiment Name: At_10percent_PEG_Sub_P Parameter: Timepoint (day) Value: 12
  misc_feature: MA Experiment 20000634 PARAMETER Experiment Name: At_10percent_PEG_Sub_P Parameter: Tissue Value: Whole Plant
  misc_feature: MA Experiment 20000634 PARAMETER Experiment Name: At_10percent_PEG_Sub_P Parameter: Treatment Value: 10% PEG vs. No Treatment
atggagatgaacttgagaattgaagacctaaacgaagaaacaaagactctaatctcttcacttccttcagacaaagatttcactgggaaaactatttgcaagtatcaaggatgttggtatactcacaatgttcttcaagctgtcctcaatttccagaaaagcttcaagcctcaagacaccgatatcatcgttgcttcgttccctaaatgcggcaccacttggctcaaggcgcttacattcgcactccttcatagatcaaaacagccttctcatgatgatgatcatcctcttctttctaataatccacacgttcttgtaccctactttgagatagatctctatctacgtagcgaaaatcctgaccttaccaagttctcatcatctccgaggctgttttcgacacacgtgccgtcacatacgttgcaagaaggtctcaaaggttctacttgtaaaattgtgtatatatctagaaacgtaaaagacacattggtttcatattggcatttctttactaagaaacaaaccgatgaaaaaataataagcagtttcgaggatacgtttgagatgttttgtaggggagtcagcattttcgggcctttttgggatcatgtcttaagctattggagaggaagcttggaagatccaaaccatgtgctttttatgaagtttgaagagatgaaagcagaacctcgtgaccagatcaagaaatttgccgagttcttaggttgtccttttactaaggaagaagaagagagcggatcggtggatgagattatcgatctttgttctctacgtaatctgagcagtttggagatcaataagaccggaaaattgaattctggtagagaaaacaaaatgtttttccgtaaaggagaagttggtgattggaagaactatttgactcctgaaatggagaacaaaatcgacatgatcattcaagagaaacttcaaaactctggtttgaaattctga

SEQ ID NO: 90210 - protein, 323 aa, Arabidopsis thaliana
  peptide (1)..(323): Ceres Seq. ID no. 12723011
  misc_feature (59)..(320): Pfam Name: Sulfotransferase domain Pfam Description: Sulfotransferase domain
  misc_feature (1)..(323): Homolog of NCBI NO: 15230602 NR Description: sulfotransferase-like protein; protein id:
  misc_feature (3)..(323): Homolog of NCBI NO: 15230603 NR Description: sulfotransferase-like protein; protein id:
  misc_feature (6)..(323): Homolog of NCBI NO: 15239947 NR Description: steroid sulfotransferase-like; protein id:
  misc_feature (8)..(322): Homolog of NCBI NO: 15222843 NR Description: steroid sulfotransferase, putative; protein id: supported by cDNA: 150484. [Arabidopsis thaliana]
  misc_feature (8)..(322): Homolog of NCBI NO: 21553545 NR Description: steroid sulfotransferase, putative [Arabidopsis
  misc_feature (6)..(323): Homolog of NCBI NO: 15217849 NR Description: steroid sulfotransferase, putative; protein id: [Arabidopsis thaliana] >gi|25288810|pir||F86407 probable
  misc_feature (4)..(323): Homolog of NCBI NO: 15226028 NR Description: putative steroid sulfotransferase; protein id:
  misc_feature (3)..(318): Homolog of NCBI NO: 15236162 NR Description: steroid sulfotransferase - like protein; protein At4g26280.1 [Arabidopsis thaliana] >gi|7434975|pir||T06012
  misc_feature (5)..(323): Homolog of NCBI NO: 18395604 NR Description: putative steroid sulfotransferase; protein id: supported by cDNA: 3964., supported by cDNA: gi_20260123 thaliana] >gi|20197902|gb|AAD20077.2| putative steroid putative
  misc_feature (5)..(323): Homolog of NCBI NO: 38230552 NR Description: steroid sulfotransferase 4 [Brassica napus]
MEMNLRIEDLNEETKTLISSLPSDKDFTGKTICKYQGCWYTHNVLQAVLNFQKSFKPQDTDIIVASFPKCGTTWLKALTFALLHRSKQPSHDDDHPLLSNNPHVLVPYFEIDLYLRSENPDLTKFSSSPRLFSTHVPSHTLQEGLKGSTCKIVYISRNVKDTLVSYWHFFTKKQTDEKIISSFEDTFEMFCRGVSIFGPFWDHVLSYWRGSLEDPNHVLFMKFEEMKAEPRDQIKKFAEFLGCPFTKEEEESGSVDEIIDLCSLRNLSSLEINKTGKLNSGRENKMFFRKGEVGDWKNYLTPEMENKIDMIIQEKLQNSGLKF

SEQ ID NO: 90211 - protein, 321 aa, Arabidopsis thaliana
  peptide (1)..(321): Ceres Seq. ID no. 12723012
  misc_feature (57)..(318): Pfam Name: Sulfotransferase domain Pfam Description: Sulfotransferase domain
  misc_feature (1)..(321): Homolog of NCBI NO: 15230602 NR Description: sulfotransferase-like protein; protein id:
  misc_feature (1)..(321): Homolog of NCBI NO: 15230603 NR Description: sulfotransferase-like protein; protein id:
  misc_feature (4)..(321): Homolog of NCBI NO: 15239947 NR Description: steroid sulfotransferase-like; protein id:
  misc_feature (6)..(320): Homolog of NCBI NO: 15222843 NR Description: steroid sulfotransferase, putative; protein id: supported by cDNA: 150484. [Arabidopsis thaliana]
  misc_feature (6)..(320): Homolog of NCBI NO: 21553545 NR Description: steroid sulfotransferase, putative [Arabidopsis
  misc_feature (4)..(321): Homolog of NCBI NO: 15217849 NR Description: steroid sulfotransferase, putative; protein id: [Arabidopsis thaliana] >gi|25288810|pir||F86407 probable
  misc_feature (2)..(321): Homolog of NCBI NO: 15226028 NR Description: putative steroid sulfotransferase; protein id:
  misc_feature (1)..(316): Homolog of NCBI NO: 15236162 NR Description: steroid sulfotransferase - like protein; protein At4g26280.1 [Arabidopsis thaliana] >gi|7434975|pir||T06012
  misc_feature (3)..(321): Homolog of NCBI NO: 18395604 NR Description: putative steroid sulfotransferase; protein id: supported by cDNA: 3964., supported by cDNA: gi_20260123 thaliana] >gi|20197902|gb|AAD20077.2| putative steroid putative
  misc_feature (3)..(321): Homolog of NCBI NO: 38230552 NR Description: steroid sulfotransferase 4 [Brassica napus]
MNLRIEDLNEETKTLISSLPSDKDFTGKTICKYQGCWYTHNVLQAVLNFQKSFKPQDTDIIVASFPKCGTTWLKALTFALLHRSKQPSHDDDHPLLSNNPHVLVPYFEIDLYLRSENPDLTKFSSSPRLFSTHVPSHTLQEGLKGSTCKIVYISRNVKDTLVSYWHFFTKKQTDEKIISSFEDTFEMFCRGVSIFGPFWDHVLSYWRGSLEDPNHVLFMKFEEMKAEPRDQIKKFAEFLGCPFTKEEEESGSVDEIIDLCSLRNLSSLEINKTGKLNSGRENKMFFRKGEVGDWKNYLTPEMENKIDMIIQEKLQNSGLKF

SEQ ID NO: 90212 - DNA, 1050 bp, Arabidopsis thaliana
  misc_feature (1)..(1050): Ceres Seq. ID no. 12723062
  misc_feature: MA Experiment ID: 20000440 Result: Up-regulated in Transcription
  misc_feature: MA Experiment 20000440 PARAMETER Experiment Name: At_Closed-Flower__Sub_P Parameter: Tissue Value: Closed Flower vs. Whole Plant
atgaagattcaaatattattgttcgctttggttttaatcttcgtggaagctaatgcagcgacgcaaggaaaaaacacaacaatcccagcactaatagtttttggagattcaataatggatacaggaaataacaataatcttcccactcttctaaagtgtaactttcctccatatggaaaagattatcctggaggcttcgctactggaagattttctgatggaagagttccttctgatcttattgcggaaaagttgggattggctaagacattaccagcatatatgaatccgtatttgaagccagaggatcttcttaaaggtgtaacatttgcatctggaggaactggttatgatccattgacagcaaaaattatgtcagtaatatcggtgtgggatcaactcataaatttcaaagaatatatatcaaagatcaagaggcatttcggagaagaaaaagccaaagatatcttggaacatagtttctttcttgtggtgtctagtagcaatgaccttgctcacacttatttagctcaaactcatcgatatgatcgtacctcttatgccaatttcttggctgactctgctgtccatttcgtgagagaattacataagcttggagctcggaaaataggagtgtttagtgcagtccccgtcggttgtgttccactccaaagaacagtttttggaggtttttttacaagaggatgtaatcaacctctaaacaacatggcaaaacaatttaacgcaagactttctccagctttagattctttagataaagagctagatggtgttatcctttacattaatgtttatgatactcttttcgacatgatccaacaccctaaaaaatacggttttgaggtagctgatagaggatgttgcggtaaaggattgcttgcgatatcctatttgtgtaactcattgaacccatttacgtgttctaattcttcagcatacatattttgggatagctatcatccatctgaaagagcttatcaagttatcgtcgacaatttactcgacaaatatttgagcaaagtctattga

SEQ ID NO: 90213 - protein, 349 aa, Arabidopsis thaliana
  peptide (1)..(349): Ceres Seq. ID no. 12723063
  misc_feature (31)..(340): Pfam Name: GDSL-like Lipase/Acylhydrolase Pfam Description: GDSL-like Lipase/Acylhydrolase
  misc_feature (1)..(349): Homolog of NCBI NO: 18406327 NR Description: proline-rich protein, putative; protein id:
  misc_feature (1)..(349): Homolog of NCBI NO: 15217977 NR Description: proline-rich protein, putative; protein id:
  misc_feature (1)..(229): Homolog of NCBI NO: 15229719 NR Description: putative protein; protein id: At3g43570.1 thaliana] >gi|9967506|emb|CAC05631.1| putative protein
  misc_feature (259)..(349): Homolog of NCBI NO: 15229719 NR Description: putative protein; protein id: At3g43570.1 thaliana] >gi|9967506|emb|CAC05631.1| putative protein
  misc_feature (39)..(229): Homolog of NCBI NO: 22330312 NR Description: similar to proline-rich protein, putative;
  misc_feature (259)..(349): Homolog of NCBI NO: 22330312 NR Description: similar to proline-rich protein, putative;
  misc_feature (39)..(344): Homolog of NCBI NO: 15231934 NR Description: hypothetical protein; protein id: At3g14820.1
  misc_feature (1)..(202): Homolog of NCBI NO: 15229307 NR Description: putative protein; protein id: At3g43550.1
  misc_feature (4)..(347): Homolog of NCBI NO: 15222901 NR Description: family II extracellular lipase 3 (EXL3); protein At1g75900.1, supported by cDNA: gi_15054385 [Arabidopsis >gi|15054386|gb|AAK30018.1| family II lipase EXL3 [Arabidopsis
  misc_feature (4)..(347): Homolog of NCBI NO: 26449364 NR Description: putative family II lipase EXL3 [Arabidopsis
MKIQILLFALVLIFVEANAATQGKNTTIPALIVFGDSIMDTGNNNNLPTLLKCNFPPYGKDYPGGFATGRFSDGRVPSDLIAEKLGLAKTLPAYMNPYLKPEDLLKGVTFASGGTGYDPLTAKIMSVISVWDQLINFKEYISKIKRHFGEEKAKDILEHSFFLVVSSSNDLAHTYLAQTHRYDRTSYANFLADSAVHFVRELHKLGARKIGVFSAVPVGCVPLQRTVFGGFFTRGCNQPLNNMAKQFNARLSPALDSLDKELDGVILYINVYDTLFDMIQHPKKYGFEVADRGCCGKGLLAISYLCNSLNPFTCSNSSAYIFWDSYHPSERAYQVIVDNLLDKYLSKVY

SEQ ID NO: 90214 - protein, 311 aa, Arabidopsis thaliana
  peptide (1)..(311): Ceres Seq. ID no. 12723064
  misc_feature (1)..(302): Pfam Name: GDSL-like Lipase/Acylhydrolase Pfam Description: GDSL-like Lipase/Acylhydrolase
  misc_feature (1)..(311): Homolog of NCBI NO: 18406327 NR Description: proline-rich protein, putative; protein id:
  misc_feature (1)..(311): Homolog of NCBI NO: 15217977 NR Description: proline-rich protein, putative; protein id:
  misc_feature (1)..(191): Homolog of NCBI NO: 15229719 NR Description: putative protein; protein id: At3g43570.1 thaliana] >gi|9967506|emb|CAC05631.1| putative protein
  misc_feature (221)..(311): Homolog of NCBI NO: 15229719 NR Description: putative protein; protein id: At3g43570.1 thaliana] >gi|9967506|emb|CAC05631.1| putative protein
  misc_feature (1)..(191): Homolog of NCBI NO: 22330312 NR Description: similar to proline-rich protein, putative;
  misc_feature (221)..(311): Homolog of NCBI NO: 22330312 NR Description: similar to proline-rich protein, putative;
  misc_feature (1)..(306): Homolog of NCBI NO: 15231934 NR Description: hypothetical protein; protein id: At3g14820.1
  misc_feature (1)..(164): Homolog of NCBI NO: 15229307 NR Description: putative protein; protein id: At3g43550.1
  misc_feature (1)..(309): Homolog of NCBI NO: 15222901 NR Description: family II extracellular lipase 3 (EXL3); protein At1g75900.1, supported by cDNA: gi_15054385 [Arabidopsis >gi|15054386|gb|AAK30018.1| family II lipase EXL3 [Arabidopsis
  misc_feature (1)..(309): Homolog of NCBI NO: 26449364 NR Description: putative family II lipase EXL3 [Arabidopsis
MDTGNNNNLPTLLKCNFPPYGKDYPGGFATGRFSDGRVPSDLIAEKLGLAKTLPAYMNPYLKPEDLLKGVTFASGGTGYDPLTAKIMSVISVWDQLINFKEYISKIKRHFGEEKAKDILEHSFFLVVSSSNDLAHTYLAQTHRYDRTSYANFLADSAVHFVRELHKLGARKIGVFSAVPVGCVPLQRTVFGGFFTRGCNQPLNNMAKQFNARLSPALDSLDKELDGVILYINVYDTLFDMIQHPKKYGFEVADRGCCGKGLLAISYLCNSLNPFTCSNSSAYIFWDSYHPSERAYQVIVDNLLDKYLSKVY

SEQ ID NO: 90215 - protein, 255 aa, Arabidopsis thaliana
  peptide (1)..(255): Ceres Seq. ID no. 12723065
  misc_feature (1)..(246): Pfam Name: GDSL-like Lipase/Acylhydrolase Pfam Description: GDSL-like Lipase/Acylhydrolase
  misc_feature (1)..(255): Homolog of NCBI NO: 18406327 NR Description: proline-rich protein, putative; protein id:
  misc_feature (1)..(255): Homolog of NCBI NO: 15217977 NR Description: proline-rich protein, putative; protein id:
  misc_feature (1)..(135): Homolog of NCBI NO: 15229719 NR Description: putative protein; protein id: At3g43570.1 thaliana] >gi|9967506|emb|CAC05631.1| putative protein
  misc_feature (165)..(255): Homolog of NCBI NO: 15229719 NR Description: putative protein; protein id: At3g43570.1 thaliana] >gi|9967506|emb|CAC05631.1| putative protein
  misc_feature (1)..(135): Homolog of NCBI NO: 22330312 NR Description: similar to proline-rich protein, putative;
  misc_feature (165)..(255): Homolog of NCBI NO: 22330312 NR Description: similar to proline-rich protein, putative;
  misc_feature (1)..(250): Homolog of NCBI NO: 15231934 NR Description: hypothetical protein; protein id: At3g14820.1
  misc_feature (1)..(108): Homolog of NCBI NO: 15229307 NR Description: putative protein; protein id: At3g43550.1
  misc_feature (1)..(253): Homolog of NCBI NO: 15222901 NR Description: family II extracellular lipase 3 (EXL3); protein At1g75900.1, supported by cDNA: gi_15054385 [Arabidopsis >gi|15054386|gb|AAK30018.1| family II lipase EXL3 [Arabidopsis
  misc_feature (1)..(253): Homolog of NCBI NO: 26449364 NR Description: putative family II lipase EXL3 [Arabidopsis
MNPYLKPEDLLKGVTFASGGTGYDPLTAKIMSVISVWDQLINFKEYISKIKRHFGEEKAKDILEHSFFLVVSSSNDLAHTYLAQTHRYDRTSYANFLADSAVHFVRELHKLGARKIGVFSAVPVGCVPLQRTVFGGFFTRGCNQPLNNMAKQFNARLSPALDSLDKELDGVILYINVYDTLFDMIQHPKKYGFEVADRGCCGKGLLAISYLCNSLNPFTCSNSSAYIFWDSYHPSERAYQVIVDNLLDKYLSKVY

SEQ ID NO: 90216 - DNA, 1938 bp, Arabidopsis thaliana
  misc_feature (1)..(1938): Ceres Seq. ID no. 12723110
  misc_feature: MA Experiment ID: 20000286 Result: Up-regulated in Transcription
  misc_feature: MA Experiment 20000286 PARAMETER Experiment Name: At_Open_Flower_P Parameter: Age (day) Value: 21
  misc_feature: MA Experiment 20000286 PARAMETER Experiment Name: At_Open_Flower_P Parameter: Plant Line Value: WS
  misc_feature: MA Experiment 20000286 PARAMETER Experiment Name: At_Open_Flower_P Parameter: Tissue Value: Half Open vs. Whole Plant
  misc_feature: MA Experiment ID: 20000439 Result: Up-regulated in Transcription
  misc_feature: MA Experiment 20000439 PARAMETER Experiment Name: At_Roots__P Parameter: Age (day) Value: 14 vs. 21
  misc_feature: MA Experiment 20000439 PARAMETER Experiment Name: At_Roots__P Parameter: Organism Value: A. thaliana
  misc_feature: MA Experiment 20000439 PARAMETER Experiment Name: At_Roots__P Parameter: Tissue Value: Roots vs. Whole Plant
  misc_feature: MA Experiment ID: 20000451 Result: Up-regulated in Transcription
  misc_feature: MA Experiment 20000451 PARAMETER Experiment Name: At_CS6879_Shoots-Roots_P Parameter: Age (day) Value: 14
  misc_feature: MA Experiment 20000451 PARAMETER Experiment Name: At_CS6879_Shoots-Roots_P Parameter: Organism Value: A. thaliana
  misc_feature: MA Experiment 20000451 PARAMETER Experiment Name: At_CS6879_Shoots-Roots_P Parameter: Plant Line Value: CS6879 vs. WS
  misc_feature: MA Experiment 20000451 PARAMETER Experiment Name: At_CS6879_Shoots-Roots_P Parameter: Tissue Value: Roots
  misc_feature: MA Experiment ID: 20000495 Result: Up-regulated in Transcription
  misc_feature: MA Experiment 20000495 PARAMETER Experiment Name: At_Guard_Cells_P Parameter: Harvest Date Value: 8/2/2002
  misc_feature: MA Experiment 20000495 PARAMETER Experiment Name: At_Guard_Cells_P Parameter: Organism Value: A. thaliana
  misc_feature: MA Experiment 20000495 PARAMETER Experiment Name: At_Guard_Cells_P Parameter: Tissue Value: Guard Cells vs. Leaves
gtcctcaaagatagtaaagaagccaaataataaccaatctttcttctatcttctctccctcaatatctttctctcactctctgatctccctggcacaactaaagtagagatatagagagagaggaactttggattgtttgtgtctttgtgacagatggcagagataaacaaacaaagcaacaaatgggaacaagaagaggttagtaatgaaaataattgggaattggctgaagaagaaagtgttgactggagagggagaccttccaaccctaacaagcatggtggaatgagagctgctctctttgttcttggactacaagcctttgagataatggggatagcagcagtagggaacaaccttataacttatgtaataaacgaaatgcatttccctttgtctaaagcggccaatattgttaccaactttgtcggtaccatctttatctttgcccttctcggcggctatctctcggacgcctttctaggcagcttctggaccattatcatattcggcttcgtcgagctttctggtttcatactactatcagtacaagcacatttaccccaactaaagccaccaaaatgtaacccattgatagaccaaacatgtgaagaagccaaaggtttcaaggcaatgatcttcttcatggcactctacttggtggctttaggaagtggctgcgtgaaaccaaacatgatagctcacggtgcggaccagttctctcagtcgcatcctaaacaatctaaaagactgtcatcttacttcaatgctgcctattttgcattctcaatgggcgagcttatcgctctaactctccttgtttgggttcaaactcattcgggcatggacattggatttggagtctctgctgcagcgatgactatgggcatcattagcttagtctccggtactatgtattttcgtaacaaacgtccacgtcgaagcatcttcactcccattgcccatgttattgtggctgccatattaaaaagaaagcttgcgtctccctctgacccaagaatgctccatggagaccaccatgtcgcaaacgacgtcgtaccctcctccactttaccacacactcctcgtttcaggttcttggacaaggcatgcatcaaaatccaagacacaaacacaaaggagagtccatggaggctatgcacagtaacacaagtagagcaagtaaaaaccctaatctcacttgtccctatctttgcaagcaccatagtcttcaacaccatcttggcacagctccaaacgttttcagtccaacaaggaagttccatgaacactcgtctctcaaattccttccacatccctccggcttcactccaggccatcccttacataatgctcatattccttgtccctctctacgactctttcttagtcccttttgcacgtaagctcacaggacataactcaggtattcctccattgactcggataggaattggactcttcctctccactttctccatggtttcagctgccatgctcgagaagaaacgtagagactcttcggttcttgacggtagaatcttgagtatcttctggatcacgccacagttcttgatctttggtatctccgagatgtttacagctgttggattaatcgagtttttttacaagcaatctgcaaagggcatggaatcattcttgatggcattgacttattgttcctactcctttgggttttacttcagctcggtgctcgtttcggtcgtaaacaagatcacttccacgtcagtcgactctaaagggtggctcggggagaacgacctaaataaggacaggctcgatctattttactggcttttagcggttcttagtctcttgaactttcttagctatctcttttggtctcgttggaacattaagtcttcgagacgcaacaacactaatgttgtgggtgatgagaacatttagcttgatgc

SEQ ID NO: 90217 - protein, 591 aa, Arabidopsis thaliana
  peptide (1)..(591): Ceres Seq. ID no. 12723111
  misc_feature (126)..(511): Pfam Name: POT family Pfam Description: POT family
  misc_feature (1)..(591): Homolog of NCBI NO: 15218903 NR Description: oligopeptide transporter, putative; protein id: supported by cDNA: gi_14334727, supported by cDNA: gi_15293214 thaliana] >gi|14334728|gb|AAK59542.1| putative oligopeptide
  misc_feature (126)..(591): Homolog of NCBI NO: 25404224 NR Description: hypothetical protein F23H11.6 [imported] - thaliana >gi|5080808|gb|AAD39317.1|AC007258_6 Similar to nitrate
  misc_feature (23)..(573): Homolog of NCBI NO: 15217546 NR Description: nitrate transporter NTL1, putative; protein id: [Arabidopsis thaliana] >gi|25403523|pir||B86458 probable protein
  misc_feature (27)..(461): Homolog of NCBI NO: 38346577 NR Description: OSJNBa0064D20.8 [Oryza sativa (japonica
  misc_feature (197)..(573): Homolog of NCBI NO: 38346577 NR Description: OSJNBa0064D20.8 [Oryza sativa (japonica
  misc_feature (4)..(591): Homolog of NCBI NO: 34909514 NR Description: putative nitrate transporter [Oryza sativa
  misc_feature (19)..(580): Homolog of NCBI NO: 33411520 NR Description: nitrate transporter [Prunus persica]
  misc_feature (27)..(572): Homolog of NCBI NO: 22329803 NR Description: nitrate transporter, putative; protein id: supported by cDNA: gi_18175947, supported by cDNA: gi_20465362 thaliana] >gi|18175948|gb|AAL59956.1| putative nitrate
  misc_feature (27)..(572): Homolog of NCBI NO: 25403281 NR Description: protein T7N9.10 [imported] - Arabidopsis thaliana
  misc_feature (26)..(578): Homolog of NCBI NO: 15232435 NR Description: peptide transport - like protein; protein id: supported by cDNA: 117581., supported by cDNA: gi_13430485,
MAEINKQSNKWEQEEVSNENNWELAEEESVDWRGRPSNPNKHGGMRAALFVLGLQAFEIMGIAAVGNNLITYVINEMHFPLSKAANIVTNFVGTIFIFALLGGYLSDAFLGSFWTIIIFGFVELSGFILLSVQAHLPQLKPPKCNPLIDQTCEEAKGFKAMIFFMALYLVALGSGCVKPNMIAHGADQFSQSHPKQSKRLSSYFNAAYFAFSMGELIALTLLVWVQTHSGMDIGFGVSAAAMTMGIISLVSGTMYFRNKRPRRSIFTPIAHVIVAAILKRKLASPSDPRMLHGDHHVANDVVPSSTLPHTPRFRFLDKACIKIQDTNTKESPWRLCTVTQVEQVKTLISLVPIFASTIVFNTILAQLQTFSVQQGSSMNTRLSNSFHIPPASLQAIPYIMLIFLVPLYDSFLVPFARKLTGHNSGIPPLTRIGIGLFLSTFSMVSAAMLEKKRRDSSVLDGRILSIFWITPQFLIFGISEMFTAVGLIEFFYKQSAKGMESFLMALTYCSYSFGFYFSSVLVSVVNKITSTSVDSKGWLGENDLNKDRLDLFYWLLAVLSLLNFLSYLFWSRWNIKSSRRNNTNVVGDENI

SEQ ID NO: 90218 - protein, 547 aa, Arabidopsis thaliana
  peptide (1)..(547): Ceres Seq. ID no. 12723112
  misc_feature (82)..(467): Pfam Name: POT family Pfam Description: POT family
  misc_feature (1)..(547): Homolog of NCBI NO: 15218903 NR Description: oligopeptide transporter, putative; protein id: supported by cDNA: gi_14334727, supported by cDNA: gi_15293214 thaliana] >gi|14334728|gb|AAK59542.1| putative oligopeptide
  misc_feature (82)..(547): Homolog of NCBI NO: 25404224 NR Description: hypothetical protein F23H11.6 [imported] - thaliana >gi|5080808|gb|AAD39317.1|AC007258_6 Similar to nitrate
  misc_feature (1)..(529): Homolog of NCBI NO: 15217546 NR Description: nitrate transporter NTL1, putative; protein id: [Arabidopsis thaliana] >gi|25403523|pir||B86458 probable protein
  misc_feature (1)..(417): Homolog of NCBI NO: 38346577 NR Description: OSJNBa0064D20.8 [Oryza sativa (japonica
  misc_feature (153)..(529): Homolog of NCBI NO: 38346577 NR Description: OSJNBa0064D20.8 [Oryza sativa (japonica
  misc_feature (1)..(547): Homolog of NCBI NO: 34909514 NR Description: putative nitrate transporter [Oryza sativa
  misc_feature (1)..(536): Homolog of NCBI NO: 33411520 NR Description: nitrate transporter [Prunus persica]
  misc_feature (1)..(528): Homolog of NCBI NO: 22329803 NR Description: nitrate transporter, putative; protein id: supported by cDNA: gi_18175947, supported by cDNA: gi_20465362 thaliana] >gi|18175948|gb|AAL59956.1| putative nitrate
  misc_feature (1)..(528): Homolog of NCBI NO: 25403281 NR Description: protein T7N9.10 [imported] - Arabidopsis thaliana
  misc_feature (1)..(534): Homolog of NCBI NO: 15232435 NR Description: peptide transport - like protein; protein id: supported by cDNA: 117581., supported by cDNA: gi_13430485,
MRAALFVLGLQAFEIMGIAAVGNNLITYVINEMHFPLSKAANIVTNFVGTIFIFALLGGYLSDAFLGSFWTIIIFGFVELSGFILLSVQAHLPQLKPPKCNPLIDQTCEEAKGFKAMIFFMALYLVALGSGCVKPNMIAHGADQFSQSHPKQSKRLSSYFNAAYFAFSMGELIALTLLVWVQTHSGMDIGFGVSAAAMTMGIISLVSGTMYFRNKRPRRSIFTPIAHVIVAAILKRKLASPSDPRMLHGDHHVANDVVPSSTLPHTPRFRFLDKACIKIQDTNTKESPWRLCTVTQVEQVKTLISLVPIFASTIVFNTILAQLQTFSVQQGSSMNTRLSNSFHIPPASLQAIPYIMLIFLVPLYDSFLVPFARKLTGHNSGIPPLTRIGIGLFLSTFSMVSAAMLEKKRRDSSVLDGRILSIFWITPQFLIFGISEMFTAVGLIEFFYKQSAKGMESFLMALTYCSYSFGFYFSSVLVSVVNKITSTSVDSKGWLGENDLNKDRLDLFYWLLAVLSLLNFLSYLFWSRWNIKSSRRNNTNVVGDENI

SEQ ID NO: 90219 - protein, 532 aa, Arabidopsis thaliana
  peptide (1)..(532): Ceres Seq. ID no. 12723113
  misc_feature (67)..(452): Pfam Name: POT family Pfam Description: POT family
  misc_feature (1)..(532): Homolog of NCBI NO: 15218903 NR Description: oligopeptide transporter, putative; protein id: supported by cDNA: gi_14334727, supported by cDNA: gi_15293214 thaliana] >gi|14334728|gb|AAK59542.1| putative oligopeptide
  misc_feature (67)..(532): Homolog of NCBI NO: 25404224 NR Description: hypothetical protein F23H11.6 [imported] - thaliana >gi|5080808|gb|AAD39317.1|AC007258_6 Similar to nitrate
  misc_feature (1)..(514): Homolog of NCBI NO: 15217546 NR Description: nitrate transporter NTL1, putative; protein id: [Arabidopsis thaliana] >gi|25403523|pir||B86458 probable protein
  misc_feature (1)..(402): Homolog of NCBI NO: 38346577 NR Description: OSJNBa0064D20.8 [Oryza sativa (japonica
  misc_feature (138)..(514): Homolog of NCBI NO: 38346577 NR Description: OSJNBa0064D20.8 [Oryza sativa (japonica
  misc_feature (1)..(532): Homolog of NCBI NO: 34909514 NR Description: putative nitrate transporter [Oryza sativa
  misc_feature (1)..(521): Homolog of NCBI NO: 33411520 NR Description: nitrate transporter [Prunus persica]
  misc_feature (1)..(513): Homolog of NCBI NO: 22329803 NR Description: nitrate transporter, putative; protein id: supported by cDNA: gi_18175947, supported by cDNA: gi_20465362 thaliana] >gi|18175948|gb|AAL59956.1| putative nitrate
  misc_feature (1)..(513): Homolog of NCBI NO: 25403281 NR Description: protein T7N9.10 [imported] - Arabidopsis thaliana
  misc_feature (1)..(519): Homolog of NCBI NO: 15232435 NR Description: peptide transport - like protein; protein id: supported by cDNA: 117581., supported by cDNA: gi_13430485,
MGIAAVGNNLITYVINEMHFPLSKAANIVTNFVGTIFIFALLGGYLSDAFLGSFWTIIIFGFVELSGFILLSVQAHLPQLKPPKCNPLIDQTCEEAKGFKAMIFFMALYLVALGSGCVKPNMIAHGADQFSQSHPKQSKRLSSYFNAAYFAFSMGELIALTLLVWVQTHSGMDIGFGVSAAAMTMGIISLVSGTMYFRNKRPRRSIFTPIAHVIVAAILKRKLASPSDPRMLHGDHHVANDVVPSSTLPHTPRFRFLDKACIKIQDTNTKESPWRLCTVTQVEQVKTLISLVPIFASTIVFNTILAQLQTFSVQQGSSMNTRLSNSFHIPPASLQAIPYIMLIFLVPLYDSFLVPFARKLTGHNSGIPPLTRIGIGLFLSTFSMVSAAMLEKKRRDSSVLDGRILSIFWITPQFLIFGISEMFTAVGLIEFFYKQSAKGMESFLMALTYCSYSFGFYFSSVLVSVVNKITSTSVDSKGWLGENDLNKDRLDLFYWLLAVLSLLNFLSYLFWSRWNIKSSRRNNTNVVGDENI

SEQ ID NO: 90220 - DNA, 1028 bp, Arabidopsis thaliana
  misc_feature (1)..(1028): Ceres Seq. ID no. 12723139
ggaactagtagcaatatctctcttctatcttttcatttcctactcttttctcactatggccaaagacggtggcgtttcttgtctacgaaggtcggagatgatcggtataggaatcggagaacttgaatctccgccgctagattctgatcaagtccacgttctcgccgttgatgacagcctagttgatcgaatagtcatcgaaagattgcttcgaatcacatcctgcaaagtcacggcggttgatagcggatggcgtgctctcgaattcttaggattagacgacgacaaagccgccgtcgaattcgatagattgaaggtggatttgatcatcactgattactgtatgcctggaatgactggatacgagcttctgaaaaagattaaggaatcgacaagttttaaggaagttcctgttgtaattatgtcgtcggagaatgtaatgactcgtatcgacagatgtcttgaagaaggtgcggaggattttttactaaaaccggtgaaactcgccgacgtgaaacgtctgaggagttacttgacgagagacgttaaagtcgccgccgaaggaaacaaacggaagctgaccactccaccgccgccgcctccgctctcagccacatcctcgatggaatcttcggactctacggtggaatcgcctctgtctatggttgacgatgaagattcgttgacaatgtcgccggagtctgcaacttcgcttgtggattcgccgatgaggagtcccggattagcttagagagatccgtgtgataacgatctccgttaactttttacttttgacggttttattgactgcaacgttgacttgaacgccgtcagtttatacttatagatctctctctctctttttatatcgttgcacgtggggtctctttgctcacgaaggaacttttataaaaacaagtattgtatttatttaattacgtatatttgataattttaaaattaaataatgtttctatttctaataatatcataataatcaaataatgtgtgacagtttacctctgtgt

SEQ ID NO: 90221 - protein, 249 aa, Arabidopsis thaliana
  peptide (1)..(249): Ceres Seq. ID no. 12723140
  misc_feature (51)..(182): Pfam Name: Response regulator receiver domain Pfam Description: Response regulator receiver domain
  misc_feature (19)..(249): Homolog of NCBI NO: 15218957 NR Description: response regulator 3; protein id: At1g59940.1, by cDNA: gi_3953594 [Arabidopsis thaliana]
  misc_feature (19)..(246): Homolog of NCBI NO: 15218550 NR Description: putative response regulator 3; protein id: supported by cDNA: gi_3273195, supported by cDNA: gi_3323582, by cDNA: gi_3953596 [Arabidopsis thaliana]
  misc_feature (15)..(236): Homolog of NCBI NO: 13173408 NR Description: response regulator protein [Dianthus caryophyllus]
  misc_feature (50)..(241): Homolog of NCBI NO: 33330864 NR Description: type-A response regulator [Catharanthus roseus]
  misc_feature (49)..(195): Homolog of NCBI NO: 15242000 NR Description: response regulator 6 (ARR6); protein id: supported by cDNA: gi_3953600 [Arabidopsis thaliana]
  misc_feature (30)..(193): Homolog of NCBI NO: 11358906 NR Description: two-component response regulator homolog
  misc_feature (30)..(193): Homolog of NCBI NO: 15228338 NR Description: response reactor 2 (ATRR2); protein id: supported by cDNA: gi_18252910, supported by cDNA: gi_3273197, by cDNA: gi_3323580, supported by cDNA: gi_3953598 [Arabidopsis
  misc_feature (30)..(193): Homolog of NCBI NO: 11358763 NR Description: response regulator 5 [imported] - Arabidopsis >gi|3953599|dbj|BAA34727.1| response regulator 5 [Arabidopsis
  misc_feature (50)..(216): Homolog of NCBI NO: 15221927 NR Description: response regulator 5, putative; protein id: supported by cDNA: gi_3953602 [Arabidopsis thaliana]
  misc_feature (48)..(225): Homolog of NCBI NO: 15222035 NR Description: response regulator 7, putative; protein id: supported by cDNA: gi_11870064 [Arabidopsis thaliana]
ELVAISLFYLFISYSFLTMAKDGGVSCLRRSEMIGIGIGELESPPLDSDQVHVLAVDDSLVDRIVIERLLRITSCKVTAVDSGWRALEFLGLDDDKAAVEFDRLKVDLIITDYCMPGMTGYELLKKIKESTSFKEVPVVIMSSENVMTRIDRCLEEGAEDFLLKPVKLADVKRLRSYLTRDVKVAAEGNKRKLTTPPPPPPLSATSSMESSDSTVESPLSMVDDEDSLTMSPESATSLVDSPMRSPGLA

SEQ ID NO: 90222 - protein, 231 aa, Arabidopsis thaliana
  peptide (1)..(231): Ceres Seq. ID no. 12723141
  misc_feature (33)..(164): Pfam Name: Response regulator receiver domain Pfam Description: Response regulator receiver domain
  misc_feature (1)..(231): Homolog of NCBI NO: 15218957 NR Description: response regulator 3; protein id: At1g59940.1, by cDNA: gi_3953594 [Arabidopsis thaliana]
  misc_feature (1)..(228): Homolog of NCBI NO: 15218550 NR Description: putative response regulator 3; protein id: supported by cDNA: gi_3273195, supported by cDNA: gi_3323582, by cDNA: gi_3953596 [Arabidopsis thaliana]
  misc_feature (1)..(218): Homolog of NCBI NO: 13173408 NR Description: response regulator protein [Dianthus caryophyllus]
  misc_feature (32)..(223): Homolog of NCBI NO: 33330864 NR Description: type-A response regulator [Catharanthus roseus]
  misc_feature (31)..(177): Homolog of NCBI NO: 15242000 NR Description: response regulator 6 (ARR6); protein id: supported by cDNA: gi_3953600 [Arabidopsis thaliana]
  misc_feature (12)..(175): Homolog of NCBI NO: 11358906 NR Description: two-component response regulator homolog
  misc_feature (12)..(175): Homolog of NCBI NO: 15228338 NR Description: response reactor 2 (ATRR2); protein id: supported by cDNA: gi_18252910, supported by cDNA: gi_3273197, by cDNA: gi_3323580, supported by cDNA: gi_3953598 [Arabidopsis
  misc_feature (12)..(175): Homolog of NCBI NO: 11358763 NR Description: response regulator 5 [imported] - Arabidopsis >gi|3953599|dbj|BAA34727.1| response regulator 5 [Arabidopsis
  misc_feature (32)..(198): Homolog of NCBI NO: 15221927 NR Description: response regulator 5, putative; protein id: supported by cDNA: gi_3953602 [Arabidopsis thaliana]
  misc_feature (30)..(207): Homolog of NCBI NO: 15222035 NR Description: response regulator 7, putative; protein id: supported by cDNA: gi_11870064 [Arabidopsis thaliana]
MAKDGGVSCLRRSEMIGIGIGELESPPLDSDQVHVLAVDDSLVDRIVIERLLRITSCKVTAVDSGWRALEFLGLDDDKAAVEFDRLKVDLIITDYCMPGMTGYELLKKIKESTSFKEVPVVIMSSENVMTRIDRCLEEGAEDFLLKPVKLADVKRLRSYLTRDVKVAAEGNKRKLTTPPPPPPLSATSSMESSDSTVESPLSMVDDEDSLTMSPESATSLVDSPMRSPGLA

SEQ ID NO: 90223 - protein, 217 aa, Arabidopsis thaliana
  peptide (1)..(217): Ceres Seq. ID no. 12723142
  misc_feature (19)..(150): Pfam Name: Response regulator receiver domain Pfam Description: Response regulator receiver domain
  misc_feature (1)..(217): Homolog of NCBI NO: 15218957 NR Description: response regulator 3; protein id: At1g59940.1, by cDNA: gi_3953594 [Arabidopsis thaliana]
  misc_feature (1)..(214): Homolog of NCBI NO: 15218550 NR Description: putative response regulator 3; protein id: supported by cDNA: gi_3273195, supported by cDNA: gi_3323582, by cDNA: gi_3953596 [Arabidopsis thaliana]
  misc_feature (1)..(204): Homolog of NCBI NO: 13173408 NR Description: response regulator protein [Dianthus caryophyllus]
  misc_feature (18)..(209): Homolog of NCBI NO: 33330864 NR Description: type-A response regulator [Catharanthus roseus]
  misc_feature (17)..(163): Homolog of NCBI NO: 15242000 NR Description: response regulator 6 (ARR6); protein id: supported by cDNA: gi_3953600 [Arabidopsis thaliana]
  misc_feature (1)..(161): Homolog of NCBI NO: 11358906 NR Description: two-component response regulator homolog
  misc_feature (1)..(161): Homolog of NCBI NO: 15228338 NR Description: response reactor 2 (ATRR2); protein id: supported by cDNA: gi_18252910, supported by cDNA: gi_3273197, by cDNA: gi_3323580, supported by cDNA: gi_3953598 [Arabidopsis
  misc_feature (1)..(161): Homolog of NCBI NO: 11358763 NR Description: response regulator 5 [imported] - Arabidopsis >gi|3953599|dbj|BAA34727.1| response regulator 5 [Arabidopsis
  misc_feature (18)..(184): Homolog of NCBI NO: 15221927 NR Description: response regulator 5, putative; protein id: supported by cDNA: gi_3953602 [Arabidopsis thaliana]
  misc_feature (16)..(193): Homolog of NCBI NO: 15222035 NR Description: response regulator 7, putative; protein id: supported by cDNA: gi_11870064 [Arabidopsis thaliana]
MIGIGIGELESPPLDSDQVHVLAVDDSLVDRIVIERLLRITSCKVTAVDSGWRALEFLGLDDDKAAVEFDRLKVDLIITDYCMPGMTGYELLKKIKESTSFKEVPVVIMSSENVMTRIDRCLEEGAEDFLLKPVKLADVKRLRSYLTRDVKVAAEGNKRKLTTPPPPPPLSATSSMESSDSTVESPLSMVDDEDSLTMSPESATSLVDSPMRSPGLA

SEQ ID NO: 90224 - DNA, 1174 bp, Arabidopsis thaliana
  misc_feature (1)..(1174): Ceres Seq. ID no. 12723147
  misc_feature: MA Experiment ID: 20000169 Result: Down-regulated in Transcription
  misc_feature: MA Experiment 20000169 PARAMETER Experiment Name: At_100uM_ABA_P Parameter: Age (day) Value: 14
  misc_feature: MA Experiment 20000169 PARAMETER Experiment Name: At_100uM_ABA_P Parameter: Organism Value: A. thaliana
  misc_feature: MA Experiment 20000169 PARAMETER Experiment Name: At_100uM_ABA_P Parameter: Plant Line Value: WS
  misc_feature: MA Experiment 20000169 PARAMETER Experiment Name: At_100uM_ABA_P Parameter: Timepoint (hr) Value: 6
  misc_feature: MA Experiment 20000169 PARAMETER Experiment Name: At_100uM_ABA_P Parameter: Tissue Value: Aerial
  misc_feature: MA Experiment 20000169 PARAMETER Experiment Name: At_100uM_ABA_P Parameter: Treatment Value: 100uM ABA vs. No Treatment
  misc_feature: MA Experiment ID: 20000179 Result: Up-regulated in Transcription
  misc_feature: MA Experiment 20000179 PARAMETER Experiment Name: At_Germinating_Seeds_P Parameter: Age (hr) Value: 6 vs. 0
  misc_feature: MA Experiment 20000179 PARAMETER Experiment Name: At_Germinating_Seeds_P Parameter: Tissue Value: Germinating Seeds
  misc_feature: MA Experiment ID: 20000180 Result: Up-regulated in Transcription
  misc_feature: MA Experiment 20000180 PARAMETER Experiment Name: At_Germinating_Seeds_P Parameter: Age (hr) Value: 24 vs. 0
  misc_feature: MA Experiment 20000180 PARAMETER Experiment Name: At_Germinating_Seeds_P Parameter: Tissue Value: Germinating Seeds
  misc_feature: MA Experiment ID: 20000182 Result: Up-regulated in Transcription
  misc_feature: MA Experiment 20000182 PARAMETER Experiment Name: At_2mM_SA_P Parameter: Age (day) Value: 14
  misc_feature: MA Experiment 20000182 PARAMETER Experiment Name: At_2mM_SA_P Parameter: Organism Value: A. thaliana
  misc_feature: MA Experiment 20000182 PARAMETER Experiment Name: At_2mM_SA_P Parameter: Plant Line Value: WS
  misc_feature: MA Experiment 20000182 PARAMETER Experiment Name: At_2mM_SA_P Parameter: Timepoint (hr) Value: 6
  misc_feature: MA Experiment 20000182 PARAMETER Experiment Name: At_2mM_SA_P Parameter: Tissue Value: Aerial
  misc_feature: MA Experiment 20000182 PARAMETER Experiment Name: At_2mM_SA_P Parameter: Treatment Value: 2mM SA vs. No Treatment
  misc_feature: MA Experiment ID: 20000184 Result: Down-regulated in Transcription
  misc_feature: MA Experiment 20000184 PARAMETER Experiment Name: At_Shoots__P Parameter: Age (day) Value: 7
  misc_feature: MA Experiment 20000184 PARAMETER Experiment Name: At_Shoots__P Parameter: Tissue Value: Shoots vs. Whole Plant
  misc_feature: MA Experiment ID: 20000185 Result: Up-regulated in Transcription
  misc_feature: MA Experiment 20000185 PARAMETER Experiment Name: At_Roots__P Parameter: Age (day) Value: 7 vs. 21
  misc_feature: MA Experiment 20000185 PARAMETER Experiment Name: At_Roots__P Parameter: Organism Value: A. thaliana
  misc_feature: MA Experiment 20000185 PARAMETER Experiment Name: At_Roots__P Parameter: Tissue Value: Roots vs. Whole Plant
  misc_feature: MA Experiment ID: 20000234 Result: Down-regulated in Transcription
  misc_feature: MA Experiment 20000234 PARAMETER Experiment Name: At_Siliques_P Parameter: Age (day) Value: 21
  misc_feature: MA Experiment 20000234 PARAMETER Experiment Name: At_Siliques_P Parameter: Organism Value: A. thaliana
  misc_feature: MA Experiment 20000234 PARAMETER Experiment Name: At_Siliques_P Parameter: Plant Line Value: WS
  misc_feature: MA Experiment 20000234 PARAMETER Experiment Name: At_Siliques_P Parameter: Tissue Value: Less Than 5mm Siliques vs. Whole Plant
  misc_feature: MA Experiment ID: 20000264 Result: Down-regulated in Transcription
  misc_feature: MA Experiment 20000264 PARAMETER Experiment Name: At_Open_Flower_P Parameter: Age (day) Value: 21
  misc_feature: MA Experiment 20000264 PARAMETER Experiment Name: At_Open_Flower_P Parameter: Plant Line Value: WS
  misc_feature: MA Experiment 20000264 PARAMETER Experiment Name: At_Open_Flower_P Parameter: Tissue Value: Open Flower vs. Whole Plant
  misc_feature: MA Experiment ID: 20000265 Result: Down-regulated in Transcription
  misc_feature: MA Experiment 20000265 PARAMETER Experiment Name: At_Open_Flower_P Parameter: Age (day) Value: 21
  misc_feature: MA Experiment 20000265 PARAMETER Experiment Name: At_Open_Flower_P Parameter: Plant Line Value: WS
  misc_feature: MA Experiment 20000265 PARAMETER Experiment Name: At_Open_Flower_P Parameter: Tissue Value: Closed Flower vs. Whole Plant
  misc_feature: MA Experiment ID: 20000286 Result: Down-regulated in Transcription
  misc_feature: MA Experiment 20000286 PARAMETER Experiment Name: At_Open_Flower_P Parameter: Age (day) Value: 21
  misc_feature: MA Experiment 20000286 PARAMETER Experiment Name: At_Open_Flower_P Parameter: Plant Line Value: WS
  misc_feature: MA Experiment 20000286 PARAMETER Experiment Name: At_Open_Flower_P Parameter: Tissue Value: Half Open vs. Whole Plant
  misc_feature: MA Experiment ID: 20000437 Result: Down-regulated in Transcription
  misc_feature: MA Experiment 20000437 PARAMETER Experiment Name: At_Drought_P Parameter: Age (day) Value: 8
  misc_feature: MA Experiment 20000437 PARAMETER Experiment Name: At_Drought_P Parameter: Organism Value: A. thaliana
  misc_feature: MA Experiment 20000437 PARAMETER Experiment Name: At_Drought_P Parameter: Plant Line Value: WS
  misc_feature: MA Experiment 20000437 PARAMETER Experiment Name: At_Drought_P Parameter: Timepoint (hr) Value: 24
  misc_feature: MA Experiment 20000437 PARAMETER Experiment Name: At_Drought_P Parameter: Tissue Value: Whole Plant
  misc_feature: MA Experiment 20000437 PARAMETER Experiment Name: At_Drought_P Parameter: Treatment Value: Drought vs. No Drought
  misc_feature: MA Experiment ID: 20000438 Result: Down-regulated in Transcription
  misc_feature: MA Experiment 20000438 PARAMETER Experiment Name: At_Shoots__P Parameter: Age (day) Value: 14
  misc_feature: MA Experiment 20000438 PARAMETER Experiment Name: At_Shoots__P Parameter: Tissue Value: Shoots vs. Whole Plant
  misc_feature: MA Experiment ID: 20000439 Result: Up-regulated in Transcription
  misc_feature: MA Experiment 20000439 PARAMETER Experiment Name: At_Roots__P Parameter: Age (day) Value: 14 vs. 21
  misc_feature: MA Experiment 20000439 PARAMETER Experiment Name: At_Roots__P Parameter: Organism Value: A. thaliana
  misc_feature: MA Experiment 20000439 PARAMETER Experiment Name: At_Roots__P Parameter: Tissue Value: Roots vs. Whole Plant
  misc_feature: MA Experiment ID: 20000452 Result: Up-regulated in Transcription
  misc_feature: MA Experiment 20000452 PARAMETER Experiment Name: At_CS6879_Shoots-Roots_P Parameter: Age (day) Value: 14
  misc_feature: MA Experiment 20000452 PARAMETER Experiment Name: At_CS6879_Shoots-Roots_P Parameter: Organism Value: A. thaliana
  misc_feature: MA Experiment 20000452 PARAMETER Experiment Name: At_CS6879_Shoots-Roots_P Parameter: Plant Line Value: CS6879 vs. WS
  misc_feature: MA Experiment 20000452 PARAMETER Experiment Name: At_CS6879_Shoots-Roots_P Parameter: Tissue Value: Shoots
  misc_feature: MA Experiment ID: 20001904 Result: Down-regulated in Transcription
  misc_feature: MA Experiment 20001904 PARAMETER Experiment Name: At_Drought_Reproduction_P Parameter: Age (day) Value: 37
  misc_feature: MA Experiment 20001904 PARAMETER Experiment Name: At_Drought_Reproduction_P Parameter: Organism Value: A. thaliana
  misc_feature: MA Experiment 20001904 PARAMETER Experiment Name: At_Drought_Reproduction_P Parameter: Plant Line Value: WS
  misc_feature: MA Experiment 20001904 PARAMETER Experiment Name: At_Drought_Reproduction_P Parameter: Timepoint (day) Value: 7
  misc_feature: MA Experiment 20001904 PARAMETER Experiment Name: At_Drought_Reproduction_P Parameter: Tissue Value: Rosettes
  misc_feature: MA Experiment 20001904 PARAMETER Experiment Name: At_Drought_Reproduction_P Parameter: Treatment Value: Drought vs. No Drought
agtggctactgagtaaagctttgggccaccgagagaaaccattttctgagagcacactttcgttgacttctctttaaccaatgtctttaaccacagtccctacgctcgccatcagatccggaccatccggtcatcactcgatgccggttcttggttttggaaccgccgcttctccgctaccggaaccaacgatgctgaaagagacggtgattgaggctattaagcttggttatcgccatttcgacacctctccaaggtaccaaacggaggagccgatcggcgaagctttagcggaggcggtttcactcggcttagttcgatctcgatctgaattctttgtcactaccaaactttggtgtgctgatgctcatggtggtctcgtcgtaccggcgatcaaacggagtttgaaaaaccttaaactggactatcttgatctttatataattcattggccggttagctcgaaacctggtaaatacaagtttcctattgatgaagatgattttatgccaatggatttcgaagtagtgtggtctgaaatggaggagtgtcagagacttgggctcgcaaaatgcataggagtaagcaatttttcatgtaagaagcttcaacacatactctctatcgcgacaatcccgcctagcgtcaatcaagttgagatgagtccaatatggcaacaaagaaagctaagggagctttgtagatcgaacgacattgttgtcacagcgtactcggtgttgggatctagaggagctttttggggaactcccaaaattatggaatctgatgttctcaaagaaatagcagaagcaaaggaaaaaacagtggcccaggtgagtatgagatgggcttatgaacaaggagtgagcatggtagtgaagagctttaccaaagagagattagaagagaatctaaagatatttgattggtctttgacagaggatgagacacagagaatttcaactgagattcctcagttcagaaacgtccacggagaggtttatacctctaagaaaggtcccatcaaatctgtcgccgagatgtgggacggggagatctgatcactttgtgtgaaaatagcctattgaaaacggcacaattatcattcgtcacaatgattttcttgtcattctctctaataatgaaataatgaataatgaataaggactatctc

SEQ ID NO: 90225 - protein, 326 aa, Arabidopsis thaliana
  peptide (1)..(326): Ceres Seq. ID no. 12723148
  misc_feature (1)..(326): Homolog of NCBI NO: 15218960 NR Description: aldo/keto reductase, putative; protein id: supported by cDNA: gi_15451097, supported by cDNA: gi_18377507 thaliana] >gi|25283478|pir||H96623 probable Aldo/keto reductase
  misc_feature (6)..(326): Homolog of NCBI NO: 25283477 NR Description: probable Aldo/keto reductase F23H11.26 [imported] Arabidopsis thaliana >gi|5080825|gb|AAD39334.1|AC007258_23
  misc_feature (16)..(326): Homolog of NCBI NO: 15218958 NR Description: aldo/keto reductase, putative; protein id:
  misc_feature (5)..(325): Homolog of NCBI NO: 40781598 NR Description: reductase 2 [Hydrangea macrophylla]
  misc_feature (16)..(326): Homolog of NCBI NO: 40781599 NR Description: reductase 1 [Hydrangea macrophylla]
  misc_feature (1)..(326): Homolog of NCBI NO: 6478216 NR Description: putative NADPH-dependent oxidoreductase [Papaver
  misc_feature (21)..(326): Homolog of NCBI NO: 27357979 NR Description: Putative NADPH-dependent oxidoreductase [Oryza
  misc_feature (1)..(176): Homolog of NCBI NO: 4249390 NR Description: Similar to gb|AF039182 probable aldo-keto from Fragaria x ananassa. This gene may be cut off. EST gb|U74151
  misc_feature (1)..(323): Homolog of NCBI NO: 6478210 NR Description: NADPH-dependent codeinone reductase [Papaver
  misc_feature (1)..(323): Homolog of NCBI NO: 6478204 NR Description: NADPH-dependent codeinone reductase [Papaver
MSLTTVPTLAIRSGPSGHHSMPVLGFGTAASPLPEPTMLKETVIEAIKLGYRHFDTSPRYQTEEPIGEALAEAVSLGLVRSRSEFFVTTKLWCADAHGGLVVPAIKRSLKNLKLDYLDLYIIHWPVSSKPGKYKFPIDEDDFMPMDFEVVWSEMEECQRLGLAKCIGVSNFSCKKLQHILSIATIPPSVNQVEMSPIWQQRKLRELCRSNDIVVTAYSVLGSRGAFWGTPKIMESDVLKEIAEAKEKTVAQVSMRWAYEQGVSMVVKSFTKERLEENLKIFDWSLTEDETQRISTEIPQFRNVHGEVYTSKKGPIKSVAEMWDGEI

SEQ ID NO: 90226 - protein, 306 aa, Arabidopsis thaliana
  peptide (1)..(306): Ceres Seq. ID no. 12723149
  misc_feature (1)..(306): Homolog of NCBI NO: 15218960 NR Description: aldo/keto reductase, putative; protein id: supported by cDNA: gi_15451097, supported by cDNA: gi_18377507 thaliana] >gi|25283478|pir||H96623 probable Aldo/keto reductase
  misc_feature (1)..(306): Homolog of NCBI NO: 25283477 NR Description: probable Aldo/keto reductase F23H11.26 [imported] Arabidopsis thaliana >gi|5080825|gb|AAD39334.1|AC007258_23
  misc_feature (1)..(306): Homolog of NCBI NO: 15218958 NR Description: aldo/keto reductase, putative; protein id:
  misc_feature (1)..(305): Homolog of NCBI NO: 40781598 NR Description: reductase 2 [Hydrangea macrophylla]
  misc_feature (1)..(306): Homolog of NCBI NO: 40781599 NR Description: reductase 1 [Hydrangea macrophylla]
  misc_feature (1)..(306): Homolog of NCBI NO: 6478216 NR Description: putative NADPH-dependent oxidoreductase [Papaver
  misc_feature (1)..(306): Homolog of NCBI NO: 27357979 NR Description: Putative NADPH-dependent oxidoreductase [Oryza
  misc_feature (1)..(156): Homolog of NCBI NO: 4249390 NR Description: Similar to gb|AF039182 probable aldo-keto from Fragaria x ananassa. This gene may be cut off. EST gb|U74151
  misc_feature (1)..(303): Homolog of NCBI NO: 6478210 NR Description: NADPH-dependent codeinone reductase [Papaver
  misc_feature (1)..(303): Homolog of NCBI NO: 6478204 NR Description: NADPH-dependent codeinone reductase [Papaver
MPVLGFGTAASPLPEPTMLKETVIEAIKLGYRHFDTSPRYQTEEPIGEALAEAVSLGLVRSRSEFFVTTKLWCADAHGGLVVPAIKRSLKNLKLDYLDLYIIHWPVSSKPGKYKFPIDEDDFMPMDFEVVWSEMEECQRLGLAKCIGVSNFSCKKLQHILSIATIPPSVNQVEMSPIWQQRKLRELCRSNDIVVTAYSVLGSRGAFWGTPKIMESDVLKEIAEAKEKTVAQVSMRWAYEQGVSMVVKSFTKERLEENLKIFDWSLTEDETQRISTEIPQFRNVHGEVYTSKKGPIKSVAEMWDGEI

SEQ ID NO: 90227 - protein, 289 aa, Arabidopsis thaliana
  peptide (1)..(289): Ceres Seq. ID no. 12723150
  misc_feature (1)..(289): Homolog of NCBI NO: 15218960 NR Description: aldo/keto reductase, putative; protein id: supported by cDNA: gi_15451097, supported by cDNA: gi_18377507 thaliana] >gi|25283478|pir||H96623 probable Aldo/keto reductase
  misc_feature (1)..(289): Homolog of NCBI NO: 25283477 NR Description: probable Aldo/keto reductase F23H11.26 [imported] Arabidopsis thaliana >gi|5080825|gb|AAD39334.1|AC007258_23
  misc_feature (1)..(289): Homolog of NCBI NO: 15218958 NR Description: aldo/keto reductase, putative; protein id:
  misc_feature (1)..(288): Homolog of NCBI NO: 40781598 NR Description: reductase 2 [Hydrangea macrophylla]
  misc_feature (1)..(289): Homolog of NCBI NO: 40781599 NR Description: reductase 1 [Hydrangea macrophylla]
  misc_feature (1)..(289): Homolog of NCBI NO: 6478216 NR Description: putative NADPH-dependent oxidoreductase [Papaver
  misc_feature (1)..(289): Homolog of NCBI NO: 27357979 NR Description: Putative NADPH-dependent oxidoreductase [Oryza
  misc_feature (1)..(139): Homolog of NCBI NO: 4249390 NR Description: Similar to gb|AF039182 probable aldo-keto from Fragaria x ananassa. This gene may be cut off. EST gb|U74151
  misc_feature (1)..(286): Homolog of NCBI NO: 6478210 NR Description: NADPH-dependent codeinone reductase [Papaver
  misc_feature (1)..(286): Homolog of NCBI NO: 6478204 NR Description: NADPH-dependent codeinone reductase [Papaver
MLKETVIEAIKLGYRHFDTSPRYQTEEPIGEALAEAVSLGLVRSRSEFFVTTKLWCADAHGGLVVPAIKRSLKNLKLDYLDLYIIHWPVSSKPGKYKFPIDEDDFMPMDFEVVWSEMEECQRLGLAKCIGVSNFSCKKLQHILSIATIPPSVNQVEMSPIWQQRKLRELCRSNDIVVTAYSVLGSRGAFWGTPKIMESDVLKEIAEAKEKTVAQVSMRWAYEQGVSMVVKSFTKERLEENLKIFDWSLTEDETQRISTEIPQFRNVHGEVYTSKKGPIKSVAEMWDGEI

SEQ ID NO: 90228 - DNA, 1539 bp, Arabidopsis thaliana
  misc_feature (1)..(1539): Ceres Seq. ID no. 12723159
  misc_feature: MA Experiment ID: 20000179 Result: Up-regulated in Transcription
  misc_feature: MA Experiment 20000179 PARAMETER Experiment Name: At_Germinating_Seeds_P Parameter: Age (hr) Value: 6 vs. 0
  misc_feature: MA Experiment 20000179 PARAMETER Experiment Name: At_Germinating_Seeds_P Parameter: Tissue Value: Germinating Seeds
  misc_feature: MA Experiment ID: 20000227 Result: Down-regulated in Transcription
  misc_feature: MA Experiment 20000227 PARAMETER Experiment Name: At_Root-Tips-vs-Tops_P Parameter: Tissue Value: Root Tips vs. Root Tops
  misc_feature: MA Experiment ID: 20001248 Result: Down-regulated in Transcription
  misc_feature: MA Experiment 20001248 PARAMETER Experiment Name: At_Far-red-induction_P Parameter: Age (day) Value: 7
  misc_feature: MA Experiment 20001248 PARAMETER Experiment Name: At_Far-red-induction_P Parameter: Light Value: Far-red vs. White
  misc_feature: MA Experiment 20001248 PARAMETER Experiment Name: At_Far-red-induction_P Parameter: Organism Value: A. thaliana
  misc_feature: MA Experiment 20001248 PARAMETER Experiment Name: At_Far-red-induction_P Parameter: Plant Line Value: Columbia
  misc_feature: MA Experiment 20001248 PARAMETER Experiment Name: At_Far-red-induction_P Parameter: Timepoint (hr) Value: 4
  misc_feature: MA Experiment 20001248 PARAMETER Experiment Name: At_Far-red-induction_P Parameter: Tissue Value: Whole Plant
  misc_feature: Pfam Name: Glyco_hydro_1 Pfam Description: Glycosyl hydrolase family 1
atggaacagattttggctctgtttgccatttttcttgcttttgctttctccgggaaatgcagcgacgttttcagcagatctgactaccctgagggattcgtctttggagccggcacttctgcttatcagtgggaaggagctgctgcagaagacggaaggaaacctagcctgtgggacactctttgtcactctcgtgaccaaggtaacggagatatagcatgtgatgggtatcacaagtacaaggatgatgtgaagttgatggtggacactaacttagatgctttcagattctccatctcttggtctaggctaatacctaatggaagagggcctgttaaccaaaagggtctacagttctacaagaacctcatccaagagttagtaagccacggaattgaaccacatgttacactctaccactatgatcatcctcagtctctggaggatgaatatggaggatggctcaaccacagaatgatcaaagactttactacttatgcagatgtttgcttcagagagtttgggaaccatgtcaaactatggaccacgatcaacgaggctaatatattctctataggaggttacaacgatggggatacaccgcctggtcgttgttccaaaccgagcaaaaactgttcttcagggaactcttccattgaaccatatattgtaggccataatttgttgcttgcgcacgcctctgtttcaagacgatacaaacaaaaatacaaggataagcagggaggttccataggatttagcttattcatattagggcttattcctactacaagctccaaggatgatgccactgcaacccaaagagcccaagatttctacgtcggctggttccttagacctcttttatttggagactatcctgatacaatgaaaagaaccattggatcaagactgccagttttctctgagaaagaatcagaacaagttaaaggctcatgtgactttgtaggagtcatacactatcatgcggcttctgtcactaacatcaaatccaaaccttctctgtccggaaacccggatttctactcatacatggagacagattttggaaaaagtttagattttcagtatgctaatactccatgggctatggaagttgtgctggagtatataaagcagagctatggaaatcctcctgtctacattcttgagagtgctaaattcactttccaatggcaacaaataggtacaccgatgaagcaagattcgcagctgaaacagaaggatataccaagggtggaatacttgcatgcctacattggtggtgtgctcaaatccataaggaatggatcagacacgagaggctacttcgtatggtcatttatggatttatacgagcttctagggggatatgaggttggttttgggttgtacactgtcaatttcagcgatcctcatcgcaagagatctcccaaactctctgcttattggtactctgattttctcaagggtgaatctgcctttcttgattcccaaggcatcaaggaattgcagagcaaatactcttcttccttctag

SEQ ID NO: 90229 - protein, 512 aa, Arabidopsis thaliana
  peptide (1)..(512): Ceres Seq. ID no. 12723160
  misc_feature: Pfam Name: Glyco_hydro_1 Pfam Description: Glycosyl hydrolase family 1
  misc_feature (1)..(512): Homolog of NCBI NO: 22330338 NR Description: glycosyl hydrolase family 1; protein id:
  misc_feature (1)..(512): Homolog of NCBI NO: 25289447 NR Description: hypothetical protein T2K10.15 [imported] - thaliana >gi|4249391|gb|AAD14488.1|AAD14488 Similar to gi|3249076
  misc_feature (1)..(511): Homolog of NCBI NO: 22328869 NR Description: glycosyl hydrolase family 1; protein id:
  misc_feature (1)..(357): Homolog of NCBI NO: 15219037 NR Description: glycosyl hydrolase family 1; protein id:
  misc_feature (378)..(509): Homolog of NCBI NO: 15219037 NR Description: glycosyl hydrolase family 1; protein id:
  misc_feature (1)..(315): Homolog of NCBI NO: 15219036 NR Description: glycosyl hydrolase family 1; protein id:
  misc_feature (356)..(511): Homolog of NCBI NO: 15219036 NR Description: glycosyl hydrolase family 1; protein id:
  misc_feature (43)..(352): Homolog of NCBI NO: 7435457 NR Description: hypothetical protein T13D8.15 - Arabidopsis >gi|3249077|gb|AAC24061.1| Similar to prunasin hydrolase gb|U50201 from Prunus serotina. ESTs gb|T21225 and gb|AA586305
  misc_feature (355)..(511): Homolog of NCBI NO: 7435457 NR Description: hypothetical protein T13D8.15 - Arabidopsis >gi|3249077|gb|AAC24061.1| Similar to prunasin hydrolase gb|U50201 from Prunus serotina. ESTs gb|T21225 and gb|AA586305
  misc_feature (1)..(378): Homolog of NCBI NO: 11264219 NR Description: glucosidase like protein - Arabidopsis thaliana glucosidase like protein [Arabidopsis thaliana]
MEQILALFAIFLAFAFSGKCSDVFSRSDYPEGFVFGAGTSAYQWEGAAAEDGRKPSLWDTLCHSRDQGNGDIACDGYHKYKDDVKLMVDTNLDAFRFSISWSRLIPNGRGPVNQKGLQFYKNLIQELVSHGIEPHVTLYHYDHPQSLEDEYGGWLNHRMIKDFTTYADVCFREFGNHVKLWTTINEANIFSIGGYNDGDTPPGRCSKPSKNCSSGNSSIEPYIVGHNLLLAHASVSRRYKQKYKDKQGGSIGFSLFILGLIPTTSSKDDATATQRAQDFYVGWFLRPLLFGDYPDTMKRTIGSRLPVFSEKESEQVKGSCDFVGVIHYHAASVTNIKSKPSLSGNPDFYSYMETDFGKSLDFQYANTPWAMEVVLEYIKQSYGNPPVYILESAKFTFQWQQIGTPMKQDSQLKQKDIPRVEYLHAYIGGVLKSIRNGSDTRGYFVWSFMDLYELLGGYEVGFGLYTVNFSDPHRKRSPKLSAYWYSDFLKGESAFLDSQGIKELQSKYSSSF

SEQ ID NO: 90230 - protein, 426 aa, Arabidopsis thaliana
  peptide (1)..(426): Ceres Seq. ID no. 12723161
  misc_feature: Pfam Name: Glyco_hydro_1 Pfam Description: Glycosyl hydrolase family 1
  misc_feature (1)..(426): Homolog of NCBI NO: 22330338 NR Description: glycosyl hydrolase family 1; protein id:
  misc_feature (1)..(426): Homolog of NCBI NO: 25289447 NR Description: hypothetical protein T2K10.15 [imported] - thaliana >gi|4249391|gb|AAD14488.1|AAD14488 Similar to gi|3249076
  misc_feature (1)..(425): Homolog of NCBI NO: 22328869 NR Description: glycosyl hydrolase family 1; protein id:
  misc_feature (1)..(271): Homolog of NCBI NO: 15219037 NR Description: glycosyl hydrolase family 1; protein id:
  misc_feature (292)..(423): Homolog of NCBI NO: 15219037 NR Description: glycosyl hydrolase family 1; protein id:
  misc_feature (1)..(229): Homolog of NCBI NO: 15219036 NR Description: glycosyl hydrolase family 1; protein id:
  misc_feature (270)..(425): Homolog of NCBI NO: 15219036 NR Description: glycosyl hydrolase family 1; protein id:
  misc_feature (1)..(266): Homolog of NCBI NO: 7435457 NR Description: hypothetical protein T13D8.15 - Arabidopsis >gi|3249077|gb|AAC24061.1| Similar to prunasin hydrolase gb|U50201 from Prunus serotina. ESTs gb|T21225 and gb|AA586305
  misc_feature (269)..(425): Homolog of NCBI NO: 7435457 NR Description: hypothetical protein T13D8.15 - Arabidopsis >gi|3249077|gb|AAC24061.1| Similar to prunasin hydrolase gb|U50201 from Prunus serotina. ESTs gb|T21225 and gb|AA586305
  misc_feature (1)..(292): Homolog of NCBI NO: 11264219 NR Description: glucosidase like protein - Arabidopsis thaliana glucosidase like protein [Arabidopsis thaliana]
MVDTNLDAFRFSISWSRLIPNGRGPVNQKGLQFYKNLIQELVSHGIEPHVTLYHYDHPQSLEDEYGGWLNHRMIKDFTTYADVCFREFGNHVKLWTTINEANIFSIGGYNDGDTPPGRCSKPSKNCSSGNSSIEPYIVGHNLLLAHASVSRRYKQKYKDKQGGSIGFSLFILGLIPTTSSKDDATATQRAQDFYVGWFLRPLLFGDYPDTMKRTIGSRLPVFSEKESEQVKGSCDFVGVIHYHAASVTNIKSKPSLSGNPDFYSYMETDFGKSLDFQYANTPWAMEVVLEYIKQSYGNPPVYILESAKFTFQWQQIGTPMKQDSQLKQKDIPRVEYLHAYIGGVLKSIRNGSDTRGYFVWSFMDLYELLGGYEVGFGLYTVNFSDPHRKRSPKLSAYWYSDFLKGESAFLDSQGIKELQSKYSSSF

SEQ ID NO: 90231 - protein, 354 aa, Arabidopsis thaliana
  peptide (1)..(354): Ceres Seq. ID no. 12723162
  misc_feature: Pfam Name: Glyco_hydro_1 Pfam Description: Glycosyl hydrolase family 1
  misc_feature (1)..(354): Homolog of NCBI NO: 22330338 NR Description: glycosyl hydrolase family 1; protein id:
  misc_feature (1)..(354): Homolog of NCBI NO: 25289447 NR Description: hypothetical protein T2K10.15 [imported] - thaliana >gi|4249391|gb|AAD14488.1|AAD14488 Similar to gi|3249076
  misc_feature (1)..(353): Homolog of NCBI NO: 22328869 NR Description: glycosyl hydrolase family 1; protein id:
  misc_feature (1)..(199): Homolog of NCBI NO: 15219037 NR Description: glycosyl hydrolase family 1; protein id:
  misc_feature (220)..(351): Homolog of NCBI NO: 15219037 NR Description: glycosyl hydrolase family 1; protein id:
  misc_feature (1)..(157): Homolog of NCBI NO: 15219036 NR Description: glycosyl hydrolase family 1; protein id:
  misc_feature (198)..(353): Homolog of NCBI NO: 15219036 NR Description: glycosyl hydrolase family 1; protein id:
  misc_feature (1)..(194): Homolog of NCBI NO: 7435457 NR Description: hypothetical protein T13D8.15 - Arabidopsis >gi|3249077|gb|AAC24061.1| Similar to prunasin hydrolase gb|U50201 from Prunus serotina. ESTs gb|T21225 and gb|AA586305
  misc_feature (197)..(353): Homolog of NCBI NO: 7435457 NR Description: hypothetical protein T13D8.15 - Arabidopsis >gi|3249077|gb|AAC24061.1| Similar to prunasin hydrolase gb|U50201 from Prunus serotina. ESTs gb|T21225 and gb|AA586305
  misc_feature (1)..(220): Homolog of NCBI NO: 11264219 NR Description: glucosidase like protein - Arabidopsis thaliana glucosidase like protein [Arabidopsis thaliana]
MIKDFTTYADVCFREFGNHVKLWTTINEANIFSIGGYNDGDTPPGRCSKPSKNCSSGNSSIEPYIVGHNLLLAHASVSRRYKQKYKDKQGGSIGFSLFILGLIPTTSSKDDATATQRAQDFYVGWFLRPLLFGDYPDTMKRTIGSRLPVFSEKESEQVKGSCDFVGVIHYHAASVTNIKSKPSLSGNPDFYSYMETDFGKSLDFQYANTPWAMEVVLEYIKQSYGNPPVYILESAKFTFQWQQIGTPMKQDSQLKQKDIPRVEYLHAYIGGVLKSIRNGSDTRGYFVWSFMDLYELLGGYEVGFGLYTVNFSDPHRKRSPKLSAYWYSDFLKGESAFLDSQGIKELQSKYSSSF

SEQ ID NO: 90232 - DNA, 2586 bp, Arabidopsis thaliana
  misc_feature (1)..(2586): Ceres Seq. ID no. 12723163
  misc_feature: MA Experiment ID: 20000182 Result: Up-regulated in Transcription
  misc_feature: MA Experiment 20000182 PARAMETER Experiment Name: At_2mM_SA_P Parameter: Age (day) Value: 14
  misc_feature: MA Experiment 20000182 PARAMETER Experiment Name: At_2mM_SA_P Parameter: Organism Value: A. thaliana
  misc_feature: MA Experiment 20000182 PARAMETER Experiment Name: At_2mM_SA_P Parameter: Plant Line Value: WS
  misc_feature: MA Experiment 20000182 PARAMETER Experiment Name: At_2mM_SA_P Parameter: Timepoint (hr) Value: 6
  misc_feature: MA Experiment 20000182 PARAMETER Experiment Name: At_2mM_SA_P Parameter: Tissue Value: Aerial
  misc_feature: MA Experiment 20000182 PARAMETER Experiment Name: At_2mM_SA_P Parameter: Treatment Value: 2mM SA vs. No Treatment
  misc_feature: MA Experiment ID: 20000234 Result: Down-regulated in Transcription
  misc_feature: MA Experiment 20000234 PARAMETER Experiment Name: At_Siliques_P Parameter: Age (day) Value: 21
  misc_feature: MA Experiment 20000234 PARAMETER Experiment Name: At_Siliques_P Parameter: Organism Value: A. thaliana
  misc_feature: MA Experiment 20000234 PARAMETER Experiment Name: At_Siliques_P Parameter: Plant Line Value: WS
  misc_feature: MA Experiment 20000234 PARAMETER Experiment Name: At_Siliques_P Parameter: Tissue Value: Less Than 5mm Siliques vs. Whole Plant
  misc_feature: MA Experiment ID: 20000235 Result: Down-regulated in Transcription
  misc_feature: MA Experiment 20000235 PARAMETER Experiment Name: At_Siliques_P Parameter: Age (day) Value: 21
  misc_feature: MA Experiment 20000235 PARAMETER Experiment Name: At_Siliques_P Parameter: Organism Value: A. thaliana
  misc_feature: MA Experiment 20000235 PARAMETER Experiment Name: At_Siliques_P Parameter: Plant Line Value: WS
  misc_feature: MA Experiment 20000235 PARAMETER Experiment Name: At_Siliques_P Parameter: Tissue Value: 5-10mm Siliques vs. Whole Plant
  misc_feature: MA Experiment ID: 20000264 Result: Down-regulated in Transcription
  misc_feature: MA Experiment 20000264 PARAMETER Experiment Name: At_Open_Flower_P Parameter: Age (day) Value: 21
  misc_feature: MA Experiment 20000264 PARAMETER Experiment Name: At_Open_Flower_P Parameter: Plant Line Value: WS
  misc_feature: MA Experiment 20000264 PARAMETER Experiment Name: At_Open_Flower_P Parameter: Tissue Value: Open Flower vs. Whole Plant
  misc_feature: MA Experiment ID: 20000265 Result: Down-regulated in Transcription
  misc_feature: MA Experiment 20000265 PARAMETER Experiment Name: At_Open_Flower_P Parameter: Age (day) Value: 21
  misc_feature: MA Experiment 20000265 PARAMETER Experiment Name: At_Open_Flower_P Parameter: Plant Line Value: WS
  misc_feature: MA Experiment 20000265 PARAMETER Experiment Name: At_Open_Flower_P Parameter: Tissue Value: Closed Flower vs. Whole Plant
  misc_feature: MA Experiment ID: 20000269 Result: Down-regulated in Transcription
  misc_feature: MA Experiment 20000269 PARAMETER Experiment Name: At_1mM_KNO3_L-vs-H_Roots_P Parameter: Age (day) Value: 7,10,12
  misc_feature: MA Experiment 20000269 PARAMETER Experiment Name: At_1mM_KNO3_L-vs-H_Roots_P Parameter: Organism Value: A. thaliana
  misc_feature: MA Experiment 20000269 PARAMETER Experiment Name: At_1mM_KNO3_L-vs-H_Roots_P Parameter: Plant Line Value: WS
  misc_feature: MA Experiment 20000269 PARAMETER Experiment Name: At_1mM_KNO3_L-vs-H_Roots_P Parameter: Timepoint (day) Value: 7,10,12
  misc_feature: MA Experiment 20000269 PARAMETER Experiment Name: At_1mM_KNO3_L-vs-H_Roots_P Parameter: Tissue Value: Roots
  misc_feature: MA Experiment 20000269 PARAMETER Experiment Name: At_1mM_KNO3_L-vs-H_Roots_P Parameter: Treatment Value: 1mM KNO3 vs. 50mM KNO3
  misc_feature: MA Experiment ID: 20000437 Result: Up-regulated in Transcription
  misc_feature: MA Experiment 20000437 PARAMETER Experiment Name: At_Drought_P Parameter: Age (day) Value: 8
  misc_feature: MA Experiment 20000437 PARAMETER Experiment Name: At_Drought_P Parameter: Organism Value: A. thaliana
  misc_feature: MA Experiment 20000437 PARAMETER Experiment Name: At_Drought_P Parameter: Plant Line Value: WS
  misc_feature: MA Experiment 20000437 PARAMETER Experiment Name: At_Drought_P Parameter: Timepoint (hr) Value: 24
  misc_feature: MA Experiment 20000437 PARAMETER Experiment Name: At_Drought_P Parameter: Tissue Value: Whole Plant
  misc_feature: MA Experiment 20000437 PARAMETER Experiment Name: At_Drought_P Parameter: Treatment Value: Drought vs. No Drought
  misc_feature: MA Experiment ID: 20000573 Result: Up-regulated in Transcription
  misc_feature: MA Experiment 20000573 PARAMETER Experiment Name: At_100uM_ABA_Mutants__P Parameter: Organism Value: A. thaliana
  misc_feature: MA Experiment 20000573 PARAMETER Experiment Name: At_100uM_ABA_Mutants__P Parameter: Plant Line Value: CS22 vs. Ler wt
  misc_feature: MA Experiment 20000573 PARAMETER Experiment Name: At_100uM_ABA_Mutants__P Parameter: Timepoint (hr) Value: N/A
  misc_feature: MA Experiment 20000573 PARAMETER Experiment Name: At_100uM_ABA_Mutants__P Parameter: Tissue Value: Whole Plant
  misc_feature: MA Experiment 20000573 PARAMETER Experiment Name: At_100uM_ABA_Mutants__P Parameter: Treatment Value: None
  misc_feature: MA Experiment ID: 20001248 Result: Up-regulated in Transcription
  misc_feature: MA Experiment 20001248 PARAMETER Experiment Name: At_Far-red-induction_P Parameter: Age (day) Value: 7
  misc_feature: MA Experiment 20001248 PARAMETER Experiment Name: At_Far-red-induction_P Parameter: Light Value: Far-red vs. White
  misc_feature: MA Experiment 20001248 PARAMETER Experiment Name: At_Far-red-induction_P Parameter: Organism Value: A. thaliana
  misc_feature: MA Experiment 20001248 PARAMETER Experiment Name: At_Far-red-induction_P Parameter: Plant Line Value: Columbia
  misc_feature: MA Experiment 20001248 PARAMETER Experiment Name: At_Far-red-induction_P Parameter: Timepoint (hr) Value: 4
  misc_feature: MA Experiment 20001248 PARAMETER Experiment Name: At_Far-red-induction_P Parameter: Tissue Value: Whole Plant
  misc_feature: MA Experiment ID: 20001450 Result: Up-regulated in Transcription
  misc_feature: MA Experiment 20001450 PARAMETER Experiment Name: At_Far-red-induction_P Parameter: Age (day) Value: 7
  misc_feature: MA Experiment 20001450 PARAMETER Experiment Name: At_Far-red-induction_P Parameter: Light Value: Far-red vs. White
  misc_feature: MA Experiment 20001450 PARAMETER Experiment Name: At_Far-red-induction_P Parameter: Organism Value: A. thaliana
  misc_feature: MA Experiment 20001450 PARAMETER Experiment Name: At_Far-red-induction_P Parameter: Plant Line Value: Columbia
  misc_feature: MA Experiment 20001450 PARAMETER Experiment Name: At_Far-red-induction_P Parameter: Timepoint (hr) Value: 8
  misc_feature: MA Experiment 20001450 PARAMETER Experiment Name: At_Far-red-induction_P Parameter: Tissue Value: Whole Plant
  misc_feature: MA Experiment ID: 20001451 Result: Up-regulated in Transcription
  misc_feature: MA Experiment 20001451 PARAMETER Experiment Name: At_Far-red-induction_P Parameter: Age (day) Value: 7
  misc_feature: MA Experiment 20001451 PARAMETER Experiment Name: At_Far-red-induction_P Parameter: Light Value: Far-red vs. White
  misc_feature: MA Experiment 20001451 PARAMETER Experiment Name: At_Far-red-induction_P Parameter: Organism Value: A. thaliana
  misc_feature: MA Experiment 20001451 PARAMETER Experiment Name: At_Far-red-induction_P Parameter: Plant Line Value: Columbia
  misc_feature: MA Experiment 20001451 PARAMETER Experiment Name: At_Far-red-induction_P Parameter: Timepoint (hr) Value: 24
  misc_feature: MA Experiment 20001451 PARAMETER Experiment Name: At_Far-red-induction_P Parameter: Tissue Value: Whole Plant
atggggtcaaaatcatttggaaatctattagacttggcctctggggatcttttggacattcctcagactccgagatatcttccaagagtgatgactgttcctggcattatctctgacgttgatggatatggaattagtgatggcgattcagatgtcatttcattaccttgccgtgagcggaaaatcattgtggccaattttcttcctttgaatggtaaaaaggattcagaaactggaaagtggaaattcagtctcgacaatgattctcccctgttacatctcaaggatggtttttctccagagactgaagtcatttatgttggatcgctcaagacgcatgttgatgttagtgagcaagacgaggtttcccataatctttttgaggaattcaattgtgtagcgactttcctcccacaagatgtgcataaaaaattctaccttggcttttgtaaacagcaactatggccacttttccattacatgttacccatgtgtcctgatcatggtgaacggtttgatcgtggtctttggcaggcatatgtttctgccaacaagatatttgcagataaggtaatgggtgtgattaatcttgaagaagattatatctggattcatgactatcatttaatggttctcccaacatttttgagaaggcggtttcacagggttaagcttggtttcttcctccacagtccattcccttcttcagaaatttatcgaaccttacctgttcgagaggaactactaagagggctcttaaattgtgacttaattggttttcacacgtttgattatgcacggcatttcttgtcatgctgctgtagaatgcttggattggagtatgaatctaagagagggcatattgctcttgactacttgggacgtacagtttttctgaagattcttcctataggtattcacatgggaaggctggaatccgttctgaatcttcctgctacagctgaaaagctgaaagagattcaagaaaagtatcggggtaaaaagataattctcggtgttgatgacatggatatattcaaaggtttaagtcttaaaattttggcctttgaacacctccttcagcaatatcctagcatgctagggaaaatagttcttattcagattgtgaacccagccagaggctcaggtaaagacgttcaggaagcgaggaaagaaacgtatgatactgttaaaagaatcaacgagcgttatggttcacatgattatgagccagtggttctgattgatcgccctgttcctcggtttgagaagtctgcctattatgccctggcagaatgctgcatagtcaatgcagtgagggatgggatgaacttagttccgtacaagtacactgtttgtcggcagggaactcctagtatgaataagtctttgggagtaagtgatgatttgcctcgcacaagcacccttgttctgtccgagttcattggttgctcgccttctctaagtggtgcgattagggttaatccttgggacgttgacgcggtagccgattcactatattctgctattaccatgtctgattttgagaagcaactacgacataaaaaacactttcactacattagtacacatgatgtgggttattgggcgcgcagcttttcgcaggatttggagagggcatctcgagatcattacagtaaacggtgctggggtgtgggttggggtttgggtttcaggcttgtcgctctctctcctaatttcagaaggctatccattgagcaaactgttagtgcttacagaagatcgagcaagagagcaatatttcttgattatgatggtactttagttcctgagacctcgattgtaaaggacccaagtgctgaagttatatctgcgttgaaggcactgtgtagtgatcctaacaacactatatttattgttagcgggaggggaaaagtttctttgagcgagtggcttgcgccatgtgagaatcttggaatagcggctgaacatggttactttacaaggtggaataagtcttctgactgggaaacaagcggcttatctgatgaccttgagtggaagaaagttgtggaacctattatgagactttatacagagactactgatggatccaatatagaagcaaaagagagtgctttagtctggcatcaccaagatgctgacccagactttggttcttgtcaagccaaggaactactggaccatctagaaactgttcttgtgaatgaaccagttattgtgaacagaggccaccaaatcgttgaagttaagcctcagggagtaagcaaagggcttgtcaccgggaaaattcttagccgaatgcttgaagatgggatagcgccagattttgtggtatgcattggggatgatagatcagacgaggagatgtttgaaaacatatcaacaaccctctcagctcaatcatcgtcaatgtctacagagatattcgcgtgtactgtgggaagaaaaccgagcaaagccaaatacttcctcgatgaagtaagcgacgtggtgaagttgcttcaaggacttgccaacacttcgagcccaaagcctaggtacccttctcacctcagagtctccttcgaaagcgtggtatga

SEQ ID NO: 90233 - protein, 861 aa, Arabidopsis thaliana
  peptide (1)..(861): Ceres Seq. ID no. 12723164
  misc_feature (59)..(546): Pfam Name: Glycosyltransferase family 20 Pfam Description: Glycosyltransferase family 20
  misc_feature (1)..(844): Homolog of NCBI NO: 18414960 NR Description: trehalose-6-phosphate synthase like protein;
  misc_feature (1)..(843): Homolog of NCBI NO: 25347119 NR Description: hypothetical protein T23K23.13 [imported] -
  misc_feature (1)..(844): Homolog of NCBI NO: 7488400 NR Description: trehalose-6-phosphate synthase homolog DL4920W -
  misc_feature (1)..(843): Homolog of NCBI NO: 15221478 NR Description: trehalose-6-phosphate synthase, putative; protein At1g06410.1 [Arabidopsis thaliana] >gi|25347117|pir||A86200
  misc_feature (1)..(845): Homolog of NCBI NO: 19568935 NR Description: putative trehalose synthase [Solanum tuberosum]
  misc_feature (1)..(851): Homolog of NCBI NO: 34902280 NR Description: Putative trehalose-6-phosphate synthase [Oryza
  misc_feature (1)..(843): Homolog of NCBI NO: 15224213 NR Description: putative trehalose-6-phosphate synthase; protein
  misc_feature (50)..(847): Homolog of NCBI NO: 34909526 NR Description: putative trehalose-6-phosphate synthase homolog
  misc_feature (58)..(477): Homolog of NCBI NO: 1865677 NR Description: trehalose-6-phosphate synthase [Arabidopsis
  misc_feature (418)..(820): Homolog of NCBI NO: 1865677 NR Description: trehalose-6-phosphate synthase [Arabidopsis
MGSKSFGNLLDLASGDLLDIPQTPRYLPRVMTVPGIISDVDGYGISDGDSDVISLPCRERKIIVANFLPLNGKKDSETGKWKFSLDNDSPLLHLKDGFSPETEVIYVGSLKTHVDVSEQDEVSHNLFEEFNCVATFLPQDVHKKFYLGFCKQQLWPLFHYMLPMCPDHGERFDRGLWQAYVSANKIFADKVMGVINLEEDYIWIHDYHLMVLPTFLRRRFHRVKLGFFLHSPFPSSEIYRTLPVREELLRGLLNCDLIGFHTFDYARHFLSCCCRMLGLEYESKRGHIALDYLGRTVFLKILPIGIHMGRLESVLNLPATAEKLKEIQEKYRGKKIILGVDDMDIFKGLSLKILAFEHLLQQYPSMLGKIVLIQIVNPARGSGKDVQEARKETYDTVKRINERYGSHDYEPVVLIDRPVPRFEKSAYYALAECCIVNAVRDGMNLVPYKYTVCRQGTPSMNKSLGVSDDLPRTSTLVLSEFIGCSPSLSGAIRVNPWDVDAVADSLYSAITMSDFEKQLRHKKHFHYISTHDVGYWARSFSQDLERASRDHYSKRCWGVGWGLGFRLVALSPNFRRLSIEQTVSAYRRSSKRAIFLDYDGTLVPETSIVKDPSAEVISALKALCSDPNNTIFIVSGRGKVSLSEWLAPCENLGIAAEHGYFTRWNKSSDWETSGLSDDLEWKKVVEPIMRLYTETTDGSNIEAKESALVWHHQDADPDFGSCQAKELLDHLETVLVNEPVIVNRGHQIVEVKPQGVSKGLVTGKILSRMLEDGIAPDFVVCIGDDRSDEEMFENISTTLSAQSSSMSTEIFACTVGRKPSKAKYFLDEVSDVVKLLQGLANTSSPKPRYPSHLRVSFESVV

SEQ ID NO: 90234 - protein, 831 aa, Arabidopsis thaliana
  peptide (1)..(831): Ceres Seq. ID no. 12723165
  misc_feature (29)..(516): Pfam Name: Glycosyltransferase family 20 Pfam Description: Glycosyltransferase family 20
  misc_feature (1)..(814): Homolog of NCBI NO: 18414960 NR Description: trehalose-6-phosphate synthase like protein;
  misc_feature (1)..(813): Homolog of NCBI NO: 25347119 NR Description: hypothetical protein T23K23.13 [imported] -
  misc_feature (1)..(814): Homolog of NCBI NO: 7488400 NR Description: trehalose-6-phosphate synthase homolog DL4920W -
  misc_feature (1)..(813): Homolog of NCBI NO: 15221478 NR Description: trehalose-6-phosphate synthase, putative; protein At1g06410.1 [Arabidopsis thaliana] >gi|25347117|pir||A86200
  misc_feature (1)..(815): Homolog of NCBI NO: 19568935 NR Description: putative trehalose synthase [Solanum tuberosum]
  misc_feature (1)..(821): Homolog of NCBI NO: 34902280 NR Description: Putative trehalose-6-phosphate synthase [Oryza
  misc_feature (1)..(813): Homolog of NCBI NO: 15224213 NR Description: putative trehalose-6-phosphate synthase; protein
  misc_feature (20)..(817): Homolog of NCBI NO: 34909526 NR Description: putative trehalose-6-phosphate synthase homolog
  misc_feature (28)..(447): Homolog of NCBI NO: 1865677 NR Description: trehalose-6-phosphate synthase [Arabidopsis
  misc_feature (388)..(790): Homolog of NCBI NO: 1865677 NR Description: trehalose-6-phosphate synthase [Arabidopsis
MTVPGIISDVDGYGISDGDSDVISLPCRERKIIVANFLPLNGKKDSETGKWKFSLDNDSPLLHLKDGFSPETEVIYVGSLKTHVDVSEQDEVSHNLFEEFNCVATFLPQDVHKKFYLGFCKQQLWPLFHYMLPMCPDHGERFDRGLWQAYVSANKIFADKVMGVINLEEDYIWIHDYHLMVLPTFLRRRFHRVKLGFFLHSPFPSSEIYRTLPVREELLRGLLNCDLIGFHTFDYARHFLSCCCRMLGLEYESKRGHIALDYLGRTVFLKILPIGIHMGRLESVLNLPATAEKLKEIQEKYRGKKIILGVDDMDIFKGLSLKILAFEHLLQQYPSMLGKIVLIQIVNPARGSGKDVQEARKETYDTVKRINERYGSHDYEPVVLIDRPVPRFEKSAYYALAECCIVNAVRDGMNLVPYKYTVCRQGTPSMNKSLGVSDDLPRTSTLVLSEFIGCSPSLSGAIRVNPWDVDAVADSLYSAITMSDFEKQLRHKKHFHYISTHDVGYWARSFSQDLERASRDHYSKRCWGVGWGLGFRLVALSPNFRRLSIEQTVSAYRRSSKRAIFLDYDGTLVPETSIVKDPSAEVISALKALCSDPNNTIFIVSGRGKVSLSEWLAPCENLGIAAEHGYFTRWNKSSDWETSGLSDDLEWKKVVEPIMRLYTETTDGSNIEAKESALVWHHQDADPDFGSCQAKELLDHLETVLVNEPVIVNRGHQIVEVKPQGVSKGLVTGKILSRMLEDGIAPDFVVCIGDDRSDEEMFENISTTLSAQSSSMSTEIFACTVGRKPSKAKYFLDEVSDVVKLLQGLANTSSPKPRYPSHLRVSFESVV

SEQ ID NO: 90235 - protein, 701 aa, Arabidopsis thaliana
  peptide (1)..(701): Ceres Seq. ID no. 12723166
  misc_feature (1)..(386): Pfam Name: Glycosyltransferase family 20 Pfam Description: Glycosyltransferase family 20
  misc_feature (1)..(684): Homolog of NCBI NO: 18414960 NR Description: trehalose-6-phosphate synthase like protein;
  misc_feature (1)..(683): Homolog of NCBI NO: 25347119 NR Description: hypothetical protein T23K23.13 [imported] -
  misc_feature (1)..(684): Homolog of NCBI NO: 7488400 NR Description: trehalose-6-phosphate synthase homolog DL4920W -
  misc_feature (1)..(683): Homolog of NCBI NO: 15221478 NR Description: trehalose-6-phosphate synthase, putative; protein At1g06410.1 [Arabidopsis thaliana] >gi|25347117|pir||A86200
  misc_feature (1)..(685): Homolog of NCBI NO: 19568935 NR Description: putative trehalose synthase [Solanum tuberosum]
  misc_feature (1)..(691): Homolog of NCBI NO: 34902280 NR Description: Putative trehalose-6-phosphate synthase [Oryza
  misc_feature (1)..(683): Homolog of NCBI NO: 15224213 NR Description: putative trehalose-6-phosphate synthase; protein
  misc_feature (1)..(687): Homolog of NCBI NO: 34909526 NR Description: putative trehalose-6-phosphate synthase homolog
  misc_feature (1)..(317): Homolog of NCBI NO: 1865677 NR Description: trehalose-6-phosphate synthase [Arabidopsis
  misc_feature (258)..(660): Homolog of NCBI NO: 1865677 NR Description: trehalose-6-phosphate synthase [Arabidopsis
MLPMCPDHGERFDRGLWQAYVSANKIFADKVMGVINLEEDYIWIHDYHLMVLPTFLRRRFHRVKLGFFLHSPFPSSEIYRTLPVREELLRGLLNCDLIGFHTFDYARHFLSCCCRMLGLEYESKRGHIALDYLGRTVFLKILPIGIHMGRLESVLNLPATAEKLKEIQEKYRGKKIILGVDDMDIFKGLSLKILAFEHLLQQYPSMLGKIVLIQIVNPARGSGKDVQEARKETYDTVKRINERYGSHDYEPVVLIDRPVPRFEKSAYYALAECCIVNAVRDGMNLVPYKYTVCRQGTPSMNKSLGVSDDLPRTSTLVLSEFIGCSPSLSGAIRVNPWDVDAVADSLYSAITMSDFEKQLRHKKHFHYISTHDVGYWARSFSQDLERASRDHYSKRCWGVGWGLGFRLVALSPNFRRLSIEQTVSAYRRSSKRAIFLDYDGTLVPETSIVKDPSAEVISALKALCSDPNNTIFIVSGRGKVSLSEWLAPCENLGIAAEHGYFTRWNKSSDWETSGLSDDLEWKKVVEPIMRLYTETTDGSNIEAKESALVWHHQDADPDFGSCQAKELLDHLETVLVNEPVIVNRGHQIVEVKPQGVSKGLVTGKILSRMLEDGIAPDFVVCIGDDRSDEEMFENISTTLSAQSSSMSTEIFACTVGRKPSKAKYFLDEVSDVVKLLQGLANTSSPKPRYPSHLRVSFESVV

SEQ ID NO: 90236 - DNA, 1815 bp, Arabidopsis thaliana
  misc_feature (1)..(1815): Ceres Seq. ID no. 12723177
  misc_feature: MA Experiment ID: 20000184 Result: Down-regulated in Transcription
  misc_feature: MA Experiment 20000184 PARAMETER Experiment Name: At_Shoots__P Parameter: Age (day) Value: 7
  misc_feature: MA Experiment 20000184 PARAMETER Experiment Name: At_Shoots__P Parameter: Tissue Value: Shoots vs. Whole Plant
  misc_feature: MA Experiment ID: 20000794 Result: Up-regulated in Transcription
  misc_feature: MA Experiment 20000794 PARAMETER Experiment Name: At_Petals_P Parameter: Age (day) Value: 23-25 days
  misc_feature: MA Experiment 20000794 PARAMETER Experiment Name: At_Petals_P Parameter: Plant Line Value: WS
  misc_feature: MA Experiment 20000794 PARAMETER Experiment Name: At_Petals_P Parameter: Tissue Value: Petals vs. Whole plant
atgacgaagaggaagaaggaagtaatagatgtcgattgctccgagaagaaagattttgtgattgattggtcttccgctatggataaggaagacgaagttcccgagctcgagattgttaataccaccaaacctactcctccgccaccgccaacgtttttctccgacgatcaaaccgattctccgaaactcctaaccgatcgtgacctcgacgagcagctagagcgtaaaaaagcgatcctgacattaggtccgggcttacccgacaagggtgagaaaattcgactcaaaatcgctgatctcgaagaggagaagcagcgtagagttttagaaggctcgaaaatgaacatctatgtgttcgagctcatttatgtgtttgaatatgaatatgatgctacaaaagacttttttggcaggaggtggacagaagttctaaggtcgtgtcttcgactagctcaggttcagatgttttaccgcaaggaaatgcagtttcaaaagatacctctagagggaatgcagactcaaaagacacctctagacaagggaatgcagattcaaaagaagtctcacggtcaacattttctgcggttttcaacggattctcagtcaaagaaagcctttggtaaagaactagaagatctgggatgtgaaaggaggaaacacaaggctggtagaaagcctgtaacaaggctgagcaacgggtggcggttgttgccagatgtagggaaagctgagcacagtgcaaagcagtttgattctggacttaaagaatcaaaagggaataagaaatccaaggaaccttatggaaagaaaaggcccatggaatcttcgacttattctctgattgatgatgatgatgatgatgatgatgatgatgacaacgacaccagtggccatgaaactcctagggagtggtcttgggaaaaatctccatcacaaagttcaaggcgccgtaagaaatcagaggacacagtgataaatgtggatgaagaagaagctcagccttcaacagtggcggagcaagcggctgaactgcctgaaggcttacaggaagatatatgctacccaacaagggatgatcctcactttgttcaagtttgtcttaaagatcttgaatgccttgcacctcgagaatatctgacatcgccggttatgaatttctacatgaggttcttgcagcagcagatatcatcatcgaatcaaatctctgctgattgtcacttctttaatacctatttctacaagaagctcagtgacgctgttacgtacaaggggaatgacaaggatgccttctttgtgaggttcaggcggtggtggaagggtattgatctatttcgtaaggcttatattttcataccaatacatgaagatctccactggagccttgtgatagtttgcatccctgataagaaagatgaatcggggttgactatacttcaccttgattctctaggacttcactcgagaaaatcaattgttgaaaatgtaaaaaggtttctaaaagacgaatggaattatttgaatcaagatgactattccttggatctgcctatctcagaaaaagtatggaaaaacctccctcgtaggatcagcgaagctgttgttcaggttccgcagcagaaaaacgattttgattgtggtccgtttgtgctcttcttcattaaacggttcattgaagaggcgcctcaaaggctgaaaaggaaagacctgggaatgttcgacaagaagtggtttagacccgatgaagcctctgctctgagaatcaaaatccgaaacacgctcatcgagctattccgtgtcagtgaccagacagagtaa

SEQ ID NO: 90237 - protein, 604 aa, Arabidopsis thaliana
  peptide (1)..(604): Ceres Seq. ID no. 12723178
  misc_feature (183)..(604): Homolog of NCBI NO: 7486914 NR Description: hypothetical protein T13D8.11 - Arabidopsis
  misc_feature (1)..(106): Homolog of NCBI NO: 7486914 NR Description: hypothetical protein T13D8.11 - Arabidopsis
  misc_feature (126)..(604): Homolog of NCBI NO: 22329476 NR Description: putative protein-tyrosine phosphatase 2; protein At1g10570.1, supported by cDNA: gi_20260163 [Arabidopsis
  misc_feature (4)..(110): Homolog of NCBI NO: 22329476 NR Description: putative protein-tyrosine phosphatase 2; protein At1g10570.1, supported by cDNA: gi_20260163 [Arabidopsis
  misc_feature (30)..(604): Homolog of NCBI NO: 5091551 NR Description: T10O24.20 [Arabidopsis thaliana]
  misc_feature (308)..(603): Homolog of NCBI NO: 34909336 NR Description: OSJNBb0021A09.14 [Oryza sativa (japonica
  misc_feature (303)..(601): Homolog of NCBI NO: 30689748 NR Description: Ulp1 protease family [Arabidopsis thaliana]
  misc_feature (302)..(454): Homolog of NCBI NO: 15218250 NR Description: unknown protein; protein id: At1g09730.1
  misc_feature (498)..(596): Homolog of NCBI NO: 15218250 NR Description: unknown protein; protein id: At1g09730.1
  misc_feature (350)..(486): Homolog of NCBI NO: 7487082 NR Description: hypothetical protein T16L1.110 - Arabidopsis >gi|3549664|emb|CAA20575.1| putative protein [Arabidopsis >gi|7270310|emb|CAB80079.1| putative protein [Arabidopsis
MTKRKKEVIDVDCSEKKDFVIDWSSAMDKEDEVPELEIVNTTKPTPPPPPTFFSDDQTDSPKLLTDRDLDEQLERKKAILTLGPGLPDKGEKIRLKIADLEEEKQRRVLEGSKMNIYVFELIYVFEYEYDATKDFFGRRWTEVLRSCLRLAQVQMFYRKEMQFQKIPLEGMQTQKTPLDKGMQIQKKSHGQHFLRFSTDSQSKKAFGKELEDLGCERRKHKAGRKPVTRLSNGWRLLPDVGKAEHSAKQFDSGLKESKGNKKSKEPYGKKRPMESSTYSLIDDDDDDDDDDDNDTSGHETPREWSWEKSPSQSSRRRKKSEDTVINVDEEEAQPSTVAEQAAELPEGLQEDICYPTRDDPHFVQVCLKDLECLAPREYLTSPVMNFYMRFLQQQISSSNQISADCHFFNTYFYKKLSDAVTYKGNDKDAFFVRFRRWWKGIDLFRKAYIFIPIHEDLHWSLVIVCIPDKKDESGLTILHLDSLGLHSRKSIVENVKRFLKDEWNYLNQDDYSLDLPISEKVWKNLPRRISEAVVQVPQQKNDFDCGPFVLFFIKRFIEEAPQRLKRKDLGMFDKKWFRPDEASALRIKIRNTLIELFRVSDQTE

SEQ ID NO: 90238 - protein, 578 aa, Arabidopsis thaliana
  peptide (1)..(578): Ceres Seq. ID no. 12723179
  misc_feature (157)..(578): Homolog of NCBI NO: 7486914 NR Description: hypothetical protein T13D8.11 - Arabidopsis
  misc_feature (1)..(80): Homolog of NCBI NO: 7486914 NR Description: hypothetical protein T13D8.11 - Arabidopsis
  misc_feature (100)..(578): Homolog of NCBI NO: 22329476 NR Description: putative protein-tyrosine phosphatase 2; protein At1g10570.1, supported by cDNA: gi_20260163 [Arabidopsis
  misc_feature (1)..(84): Homolog of NCBI NO: 22329476 NR Description: putative protein-tyrosine phosphatase 2; protein At1g10570.1, supported by cDNA: gi_20260163 [Arabidopsis
  misc_feature (4)..(578): Homolog of NCBI NO: 5091551 NR Description: T10O24.20 [Arabidopsis thaliana]
  misc_feature (282)..(577): Homolog of NCBI NO: 34909336 NR Description: OSJNBb0021A09.14 [Oryza sativa (japonica
  misc_feature (277)..(575): Homolog of NCBI NO: 30689748 NR Description: Ulp1 protease family [Arabidopsis thaliana]
  misc_feature (276)..(428): Homolog of NCBI NO: 15218250 NR Description: unknown protein; protein id: At1g09730.1
  misc_feature (472)..(570): Homolog of NCBI NO: 15218250 NR Description: unknown protein; protein id: At1g09730.1
  misc_feature (324)..(460): Homolog of NCBI NO: 7487082 NR Description: hypothetical protein T16L1.110 - Arabidopsis >gi|3549664|emb|CAA20575.1| putative protein [Arabidopsis >gi|7270310|emb|CAB80079.1| putative protein [Arabidopsis
MDKEDEVPELEIVNTTKPTPPPPPTFFSDDQTDSPKLLTDRDLDEQLERKKAILTLGPGLPDKGEKIRLKIADLEEEKQRRVLEGSKMNIYVFELIYVFEYEYDATKDFFGRRWTEVLRSCLRLAQVQMFYRKEMQFQKIPLEGMQTQKTPLDKGMQIQKKSHGQHFLRFSTDSQSKKAFGKELEDLGCERRKHKAGRKPVTRLSNGWRLLPDVGKAEHSAKQFDSGLKESKGNKKSKEPYGKKRPMESSTYSLIDDDDDDDDDDDNDTSGHETPREWSWEKSPSQSSRRRKKSEDTVINVDEEEAQPSTVAEQAAELPEGLQEDICYPTRDDPHFVQVCLKDLECLAPREYLTSPVMNFYMRFLQQQISSSNQISADCHFFNTYFYKKLSDAVTYKGNDKDAFFVRFRRWWKGIDLFRKAYIFIPIHEDLHWSLVIVCIPDKKDESGLTILHLDSLGLHSRKSIVENVKRFLKDEWNYLNQDDYSLDLPISEKVWKNLPRRISEAVVQVPQQKNDFDCGPFVLFFIKRFIEEAPQRLKRKDLGMFDKKWFRPDEASALRIKIRNTLIELFRVSDQTE

SEQ ID NO: 90239 - protein, 491 aa, Arabidopsis thaliana
  peptide (1)..(491): Ceres Seq. ID no. 12723180
  misc_feature (70)..(491): Homolog of NCBI NO: 7486914 NR Description: hypothetical protein T13D8.11 - Arabidopsis
  misc_feature (13)..(491): Homolog of NCBI NO: 22329476 NR Description: putative protein-tyrosine phosphatase 2; protein At1g10570.1, supported by cDNA: gi_20260163 [Arabidopsis
  misc_feature (1)..(491): Homolog of NCBI NO: 5091551 NR Description: T10O24.20 [Arabidopsis thaliana]
  misc_feature (195)..(490): Homolog of NCBI NO: 34909336 NR Description: OSJNBb0021A09.14 [Oryza sativa (japonica
  misc_feature (190)..(488): Homolog of NCBI NO: 30689748 NR Description: Ulp1 protease family [Arabidopsis thaliana]
  misc_feature (189)..(341): Homolog of NCBI NO: 15218250 NR Description: unknown protein; protein id: At1g09730.1
  misc_feature (385)..(483): Homolog of NCBI NO: 15218250 NR Description: unknown protein; protein id: At1g09730.1
  misc_feature (237)..(373): Homolog of NCBI NO: 7487082 NR Description: hypothetical protein T16L1.110 - Arabidopsis >gi|3549664|emb|CAA20575.1| putative protein [Arabidopsis >gi|7270310|emb|CAB80079.1| putative protein [Arabidopsis
  misc_feature (250)..(409): Homolog of NCBI NO: 28528970 NR Description: similar to SUMO-1-specific protease [Mus musculus]
  misc_feature (146)..(389): Homolog of NCBI NO: 34878121 NR Description: similar to bM573K1.5 (novel Ulp1 protease family
MNIYVFELIYVFEYEYDATKDFFGRRWTEVLRSCLRLAQVQMFYRKEMQFQKIPLEGMQTQKTPLDKGMQIQKKSHGQHFLRFSTDSQSKKAFGKELEDLGCERRKHKAGRKPVTRLSNGWRLLPDVGKAEHSAKQFDSGLKESKGNKKSKEPYGKKRPMESSTYSLIDDDDDDDDDDDNDTSGHETPREWSWEKSPSQSSRRRKKSEDTVINVDEEEAQPSTVAEQAAELPEGLQEDICYPTRDDPHFVQVCLKDLECLAPREYLTSPVMNFYMRFLQQQISSSNQISADCHFFNTYFYKKLSDAVTYKGNDKDAFFVRFRRWWKGIDLFRKAYIFIPIHEDLHWSLVIVCIPDKKDESGLTILHLDSLGLHSRKSIVENVKRFLKDEWNYLNQDDYSLDLPISEKVWKNLPRRISEAVVQVPQQKNDFDCGPFVLFFIKRFIEEAPQRLKRKDLGMFDKKWFRPDEASALRIKIRNTLIELFRVSDQTE

SEQ ID NO: 90240 - DNA, 1350 bp, Arabidopsis thaliana
  misc_feature (1)..(1350): Ceres Seq. ID no. 12723189
  misc_feature: MA Experiment ID: 20000173 Result: Down-regulated in Transcription
  misc_feature: MA Experiment 20000173 PARAMETER Experiment Name: At_42deg_Heat_P Parameter: Age (day) Value: 14
  misc_feature: MA Experiment 20000173 PARAMETER Experiment Name: At_42deg_Heat_P Parameter: Organism Value: A. thaliana
  misc_feature: MA Experiment 20000173 PARAMETER Experiment Name: At_42deg_Heat_P Parameter: Plant Line Value: WS
  misc_feature: MA Experiment 20000173 PARAMETER Experiment Name: At_42deg_Heat_P Parameter: Temperature (deg C) Value: 42 vs. 22
  misc_feature: MA Experiment 20000173 PARAMETER Experiment Name: At_42deg_Heat_P Parameter: Timepoint (hr) Value: 6
  misc_feature: MA Experiment 20000173 PARAMETER Experiment Name: At_42deg_Heat_P Parameter: Tissue Value: Aerial
  misc_feature: MA Experiment ID: 20000184 Result: Down-regulated in Transcription
  misc_feature: MA Experiment 20000184 PARAMETER Experiment Name: At_Shoots__P Parameter: Age (day) Value: 7
  misc_feature: MA Experiment 20000184 PARAMETER Experiment Name: At_Shoots__P Parameter: Tissue Value: Shoots vs. Whole Plant
  misc_feature: MA Experiment ID: 20000185 Result: Down-regulated in Transcription
  misc_feature: MA Experiment 20000185 PARAMETER Experiment Name: At_Roots__P Parameter: Age (day) Value: 7 vs. 21
  misc_feature: MA Experiment 20000185 PARAMETER Experiment Name: At_Roots__P Parameter: Organism Value: A. thaliana
  misc_feature: MA Experiment 20000185 PARAMETER Experiment Name: At_Roots__P Parameter: Tissue Value: Roots vs. Whole Plant
  misc_feature: MA Experiment ID: 20000211 Result: Up-regulated in Transcription
  misc_feature: MA Experiment 20000211 PARAMETER Experiment Name: At_0.001percent_MeJA__P Parameter: Age (day) Value: 14
  misc_feature: MA Experiment 20000211 PARAMETER Experiment Name: At_0.001percent_MeJA__P Parameter: Organism Value: A. thaliana
  misc_feature: MA Experiment 20000211 PARAMETER Experiment Name: At_0.001percent_MeJA__P Parameter: Plant Line Value: WS
  misc_feature: MA Experiment 20000211 PARAMETER Experiment Name: At_0.001percent_MeJA__P Parameter: Timepoint (hr) Value: 1
  misc_feature: MA Experiment 20000211 PARAMETER Experiment Name: At_0.001percent_MeJA__P Parameter: Tissue Value: Aerial
  misc_feature: MA Experiment 20000211 PARAMETER Experiment Name: At_0.001percent_MeJA__P Parameter: Treatment Value: 0.001percent MeJA vs. No Treatment
  misc_feature: MA Experiment ID: 20000227 Result: Down-regulated in Transcription
  misc_feature: MA Experiment 20000227 PARAMETER Experiment Name: At_Root-Tips-vs-Tops_P Parameter: Tissue Value: Root Tips vs. Root Tops
  misc_feature: MA Experiment ID: 20000265 Result: Up-regulated in Transcription
  misc_feature: MA Experiment 20000265 PARAMETER Experiment Name: At_Open_Flower_P Parameter: Age (day) Value: 21
  misc_feature: MA Experiment 20000265 PARAMETER Experiment Name: At_Open_Flower_P Parameter: Plant Line Value: WS
  misc_feature: MA Experiment 20000265 PARAMETER Experiment Name: At_Open_Flower_P Parameter: Tissue Value: Closed Flower vs. Whole Plant
  misc_feature: MA Experiment ID: 20000439 Result: Down-regulated in Transcription
  misc_feature: MA Experiment 20000439 PARAMETER Experiment Name: At_Roots__P Parameter: Age (day) Value: 14 vs. 21
  misc_feature: MA Experiment 20000439 PARAMETER Experiment Name: At_Roots__P Parameter: Organism Value: A. thaliana
  misc_feature: MA Experiment 20000439 PARAMETER Experiment Name: At_Roots__P Parameter: Tissue Value: Roots vs. Whole Plant
  misc_feature: MA Experiment ID: 20000574 Result: Down-regulated in Transcription
  misc_feature: MA Experiment 20000574 PARAMETER Experiment Name: At_100uM_ABA_Mutants__P Parameter: Organism Value: A. thaliana
  misc_feature: MA Experiment 20000574 PARAMETER Experiment Name: At_100uM_ABA_Mutants__P Parameter: Plant Line Value: CS23 vs. Ler wt
  misc_feature: MA Experiment 20000574 PARAMETER Experiment Name: At_100uM_ABA_Mutants__P Parameter: Timepoint (hr) Value: N/A
  misc_feature: MA Experiment 20000574 PARAMETER Experiment Name: At_100uM_ABA_Mutants__P Parameter: Tissue Value: Whole Plant
  misc_feature: MA Experiment 20000574 PARAMETER Experiment Name: At_100uM_ABA_Mutants__P Parameter: Treatment Value: None
  misc_feature: MA Experiment ID: 20001248 Result: Down-regulated in Transcription
  misc_feature: MA Experiment 20001248 PARAMETER Experiment Name: At_Far-red-induction_P Parameter: Age (day) Value: 7
  misc_feature: MA Experiment 20001248 PARAMETER Experiment Name: At_Far-red-induction_P Parameter: Light Value: Far-red vs. White
  misc_feature: MA Experiment 20001248 PARAMETER Experiment Name: At_Far-red-induction_P Parameter: Organism Value: A. thaliana
  misc_feature: MA Experiment 20001248 PARAMETER Experiment Name: At_Far-red-induction_P Parameter: Plant Line Value: Columbia
  misc_feature: MA Experiment 20001248 PARAMETER Experiment Name: At_Far-red-induction_P Parameter: Timepoint (hr) Value: 4
  misc_feature: MA Experiment 20001248 PARAMETER Experiment Name: At_Far-red-induction_P Parameter: Tissue Value: Whole Plant
  misc_feature: MA Experiment ID: 20001450 Result: Down-regulated in Transcription
  misc_feature: MA Experiment 20001450 PARAMETER Experiment Name: At_Far-red-induction_P Parameter: Age (day) Value: 7
  misc_feature: MA Experiment 20001450 PARAMETER Experiment Name: At_Far-red-induction_P Parameter: Light Value: Far-red vs. White
  misc_feature: MA Experiment 20001450 PARAMETER Experiment Name: At_Far-red-induction_P Parameter: Organism Value: A. thaliana
  misc_feature: MA Experiment 20001450 PARAMETER Experiment Name: At_Far-red-induction_P Parameter: Plant Line Value: Columbia
  misc_feature: MA Experiment 20001450 PARAMETER Experiment Name: At_Far-red-induction_P Parameter: Timepoint (hr) Value: 8
  misc_feature: MA Experiment 20001450 PARAMETER Experiment Name: At_Far-red-induction_P Parameter: Tissue Value: Whole Plant
  misc_feature: MA Experiment ID: 20001451 Result: Down-regulated in Transcription
  misc_feature: MA Experiment 20001451 PARAMETER Experiment Name: At_Far-red-induction_P Parameter: Age (day) Value: 7
  misc_feature: MA Experiment 20001451 PARAMETER Experiment Name: At_Far-red-induction_P Parameter: Light Value: Far-red vs. White
  misc_feature: MA Experiment 20001451 PARAMETER Experiment Name: At_Far-red-induction_P Parameter: Organism Value: A. thaliana
  misc_feature: MA Experiment 20001451 PARAMETER Experiment Name: At_Far-red-induction_P Parameter: Plant Line Value: Columbia
  misc_feature: MA Experiment 20001451 PARAMETER Experiment Name: At_Far-red-induction_P Parameter: Timepoint (hr) Value: 24
  misc_feature: MA Experiment 20001451 PARAMETER Experiment Name: At_Far-red-induction_P Parameter: Tissue Value: Whole Plant
  misc_feature: MA Experiment ID: 20001555 Result: Up-regulated in Transcription
  misc_feature: MA Experiment 20001555 PARAMETER Experiment Name: At_Drought_Soil_Dry_P Parameter: Age (day) Value: 24
  misc_feature: MA Experiment 20001555 PARAMETER Experiment Name: At_Drought_Soil_Dry_P Parameter: Organism Value: A. thaliana
  misc_feature: MA Experiment 20001555 PARAMETER Experiment Name: At_Drought_Soil_Dry_P Parameter: Plant Line Value: WS
  misc_feature: MA Experiment 20001555 PARAMETER Experiment Name: At_Drought_Soil_Dry_P Parameter: Post Timepoint (hr) Value: None
  misc_feature: MA Experiment 20001555 PARAMETER Experiment Name: At_Drought_Soil_Dry_P Parameter: Post-Treatment Value: None
  misc_feature: MA Experiment 20001555 PARAMETER Experiment Name: At_Drought_Soil_Dry_P Parameter: Timepoint (day) Value: 10
  misc_feature: MA Experiment 20001555 PARAMETER Experiment Name: At_Drought_Soil_Dry_P Parameter: Treatment Value: Drought vs. No Drought
  misc_feature: MA Experiment ID: 20001556 Result: Up-regulated in Transcription
  misc_feature: MA Experiment 20001556 PARAMETER Experiment Name: At_Drought_Soil_Dry_P Parameter: Age (day) Value: 26
  misc_feature: MA Experiment 20001556 PARAMETER Experiment Name: At_Drought_Soil_Dry_P Parameter: Organism Value: A. thaliana
  misc_feature: MA Experiment 20001556 PARAMETER Experiment Name: At_Drought_Soil_Dry_P Parameter: Plant Line Value: WS
  misc_feature: MA Experiment 20001556 PARAMETER Experiment Name: At_Drought_Soil_Dry_P Parameter: Post Timepoint (hr) Value: None
  misc_feature: MA Experiment 20001556 PARAMETER Experiment Name: At_Drought_Soil_Dry_P Parameter: Post-Treatment Value: None
  misc_feature: MA Experiment 20001556 PARAMETER Experiment Name: At_Drought_Soil_Dry_P Parameter: Timepoint (day) Value: 12
  misc_feature: MA Experiment 20001556 PARAMETER Experiment Name: At_Drought_Soil_Dry_P Parameter: Treatment Value: Drought vs. No Drought
  misc_feature: MA Experiment ID: 20001557 Result: Down-regulated in Transcription
  misc_feature: MA Experiment 20001557 PARAMETER Experiment Name: At_Drought_Soil_Dry_P Parameter: Age (day) Value: 27
  misc_feature: MA Experiment 20001557 PARAMETER Experiment Name: At_Drought_Soil_Dry_P Parameter: Organism Value: A. thaliana
  misc_feature: MA Experiment 20001557 PARAMETER Experiment Name: At_Drought_Soil_Dry_P Parameter: Plant Line Value: WS
  misc_feature: MA Experiment 20001557 PARAMETER Experiment Name: At_Drought_Soil_Dry_P Parameter: Post Timepoint (hr) Value: 3
  misc_feature: MA Experiment 20001557 PARAMETER Experiment Name: At_Drought_Soil_Dry_P Parameter: Post-Treatment Value: Re-Water vs. No Drought
  misc_feature: MA Experiment 20001557 PARAMETER Experiment Name: At_Drought_Soil_Dry_P Parameter: Timepoint (day) Value: 13
  misc_feature: MA Experiment 20001557 PARAMETER Experiment Name: At_Drought_Soil_Dry_P Parameter: Treatment Value: Drought vs. No Drought
  misc_feature: MA Experiment ID: 20001905 Result: Down-regulated in Transcription
  misc_feature: MA Experiment 20001905 PARAMETER Experiment Name: At_Drought_Reproduction_P Parameter: Age (day) Value: 40
  misc_feature: MA Experiment 20001905 PARAMETER Experiment Name: At_Drought_Reproduction_P Parameter: Organism Value: A. thaliana
  misc_feature: MA Experiment 20001905 PARAMETER Experiment Name: At_Drought_Reproduction_P Parameter: Plant Line Value: WS
  misc_feature: MA Experiment 20001905 PARAMETER Experiment Name: At_Drought_Reproduction_P Parameter: Timepoint (day) Value: 10
  misc_feature: MA Experiment 20001905 PARAMETER Experiment Name: At_Drought_Reproduction_P Parameter: Tissue Value: Rosettes
  misc_feature: MA Experiment 20001905 PARAMETER Experiment Name: At_Drought_Reproduction_P Parameter: Treatment Value: Drought vs. No Drought
  misc_feature: MA Experiment ID: 20001906 Result: Down-regulated in Transcription
  misc_feature: MA Experiment 20001906 PARAMETER Experiment Name: At_Drought_Reproduction_P Parameter: Age (day) Value: 35
  misc_feature: MA Experiment 20001906 PARAMETER Experiment Name: At_Drought_Reproduction_P Parameter: Organism Value: A. thaliana
  misc_feature: MA Experiment 20001906 PARAMETER Experiment Name: At_Drought_Reproduction_P Parameter: Plant Line Value: WS
  misc_feature: MA Experiment 20001906 PARAMETER Experiment Name: At_Drought_Reproduction_P Parameter: Timepoint (day) Value: 5
  misc_feature: MA Experiment 20001906 PARAMETER Experiment Name: At_Drought_Reproduction_P Parameter: Tissue Value: Siliques
  misc_feature: MA Experiment 20001906 PARAMETER Experiment Name: At_Drought_Reproduction_P Parameter: Treatment Value: Drought vs. No Drought
  misc_feature: MA Experiment ID: 20001908 Result: Down-regulated in Transcription
  misc_feature: MA Experiment 20001908 PARAMETER Experiment Name: At_Drought_Reproduction_P Parameter: Age (day) Value: 40
  misc_feature: MA Experiment 20001908 PARAMETER Experiment Name: At_Drought_Reproduction_P Parameter: Organism Value: A. thaliana
  misc_feature: MA Experiment 20001908 PARAMETER Experiment Name: At_Drought_Reproduction_P Parameter: Plant Line Value: WS
  misc_feature: MA Experiment 20001908 PARAMETER Experiment Name: At_Drought_Reproduction_P Parameter: Timepoint (day) Value: 10
  misc_feature: MA Experiment 20001908 PARAMETER Experiment Name: At_Drought_Reproduction_P Parameter: Tissue Value: Siliques
  misc_feature: MA Experiment 20001908 PARAMETER Experiment Name: At_Drought_Reproduction_P Parameter: Treatment Value: Drought vs. No Drought
atggaacagttttttgctctgtttaccatttttctatcttttgctttccccgggagatgcagcgacgttttcagcagatctgatttccccgagggattcctcttcggagctggcacttctgcttatcagtgggaaggagctgctgcggaagatggaaggaaacctagcgtgtgggacactctttgttactctcgtaacattggtaacggagatgtaacatgtgatgggtatcacaagtataaggaagatgtgaagctgatggtagacactaacttagatgccttcagattctctatatcttggtctaggctaatacctaatggaagaggctctgttaaccaaaagggtctacagttctacaagaacctcatcagcgaattaataacccatgggattgaaccacatgttacactgtatcactacgatcatcctcagtatcttgaggatgaatatggaggatgggtcaacaatatgatgatcaaagacttcactgcttatgtagatgtttgtttcagagagtttgggaactatgtcaaattctggaccactatcaatgaggctaatgtatttactattggaggttacaacgatggggatacaccgcctggtcgttgttctttaccgggcaaaaactgcttgttagggaactcttctactgaaacatatattgtaggccataacttacttcttgcgcacgcctctgcttcaagactatataagcaaaagtacaaggataagcagggtggttccataggctttggcttatatttaatggggttgactccttctacaagctccaaggatgatgccattgcaactcaaagagccaaagatttctatttcggttggttccttggacctcttatatttggagactatccagatacaatgaaaagaaccattggatcaagactgccagttttctcagaggaagaatcagaacaatatcctgttgctccgtggactatggaagctgtcctagagtatataaagcagagctatgacaatcctcctgtctacattcttgagaatggtacaccgatgacgcaacacaaggatacacatagggtggaatacatgaatgcttacattggtggtgtgctcaaatccataaggaatggatcagacactagaggctattttgtatggtcatttatggatttattcgagcttatagggcggtacgattatggttatggattgtactctgtaaatttcagtgatccacatcgcaagagatctcctagactctctgctcattggtactctgattttctcaagggcaaaacttcttttcttgattccaaaggcatcaaggaattgcagagcaacttctcttcttcctcttag

SEQ ID NO: 90241 - protein, 449 aa, Arabidopsis thaliana
  peptide (1)..(449): Ceres Seq. ID no. 12723190
  misc_feature (1)..(449): Homolog of NCBI NO: 15219036 NR Description: glycosyl hydrolase family 1; protein id:
  misc_feature (43)..(316): Homolog of NCBI NO: 7435457 NR Description: hypothetical protein T13D8.15 - Arabidopsis >gi|3249077|gb|AAC24061.1| Similar to prunasin hydrolase gb|U50201 from Prunus serotina. ESTs gb|T21225 and gb|AA586305
  misc_feature (306)..(449): Homolog of NCBI NO: 7435457 NR Description: hypothetical protein T13D8.15 - Arabidopsis >gi|3249077|gb|AAC24061.1| Similar to prunasin hydrolase gb|U50201 from Prunus serotina. ESTs gb|T21225 and gb|AA586305
  misc_feature (1)..(315): Homolog of NCBI NO: 22330338 NR Description: glycosyl hydrolase family 1; protein id:
  misc_feature (308)..(448): Homolog of NCBI NO: 22330338 NR Description: glycosyl hydrolase family 1; protein id:
  misc_feature (1)..(315): Homolog of NCBI NO: 25289447 NR Description: hypothetical protein T2K10.15 [imported] - thaliana >gi|4249391|gb|AAD14488.1|AAD14488 Similar to gi|3249076
  misc_feature (345)..(448): Homolog of NCBI NO: 25289447 NR Description: hypothetical protein T2K10.15 [imported] - thaliana >gi|4249391|gb|AAD14488.1|AAD14488 Similar to gi|3249076
  misc_feature (315)..(345): Homolog of NCBI NO: 25289447 NR Description: hypothetical protein T2K10.15 [imported] - thaliana >gi|4249391|gb|AAD14488.1|AAD14488 Similar to gi|3249076
  misc_feature (1)..(315): Homolog of NCBI NO: 15219037 NR Description: glycosyl hydrolase family 1; protein id:
  misc_feature (330)..(449): Homolog of NCBI NO: 15219037 NR Description: glycosyl hydrolase family 1; protein id:
MEQFFALFTIFLSFAFPGRCSDVFSRSDFPEGFLFGAGTSAYQWEGAAAEDGRKPSVWDTLCYSRNIGNGDVTCDGYHKYKEDVKLMVDTNLDAFRFSISWSRLIPNGRGSVNQKGLQFYKNLISELITHGIEPHVTLYHYDHPQYLEDEYGGWVNNMMIKDFTAYVDVCFREFGNYVKFWTTINEANVFTIGGYNDGDTPPGRCSLPGKNCLLGNSSTETYIVGHNLLLAHASASRLYKQKYKDKQGGSIGFGLYLMGLTPSTSSKDDAIATQRAKDFYFGWFLGPLIFGDYPDTMKRTIGSRLPVFSEEESEQYPVAPWTMEAVLEYIKQSYDNPPVYILENGTPMTQHKDTHRVEYMNAYIGGVLKSIRNGSDTRGYFVWSFMDLFELIGRYDYGYGLYSVNFSDPHRKRSPRLSAHWYSDFLKGKTSFLDSKGIKELQSNFSSSS

SEQ ID NO: 90242 - protein, 363 aa, Arabidopsis thaliana
  peptide (1)..(363): Ceres Seq. ID no. 12723191
  misc_feature (1)..(363): Homolog of NCBI NO: 15219036 NR Description: glycosyl hydrolase family 1; protein id:
  misc_feature (1)..(230): Homolog of NCBI NO: 7435457 NR Description: hypothetical protein T13D8.15 - Arabidopsis >gi|3249077|gb|AAC24061.1| Similar to prunasin hydrolase gb|U50201 from Prunus serotina. ESTs gb|T21225 and gb|AA586305
  misc_feature (220)..(363): Homolog of NCBI NO: 7435457 NR Description: hypothetical protein T13D8.15 - Arabidopsis >gi|3249077|gb|AAC24061.1| Similar to prunasin hydrolase gb|U50201 from Prunus serotina. ESTs gb|T21225 and gb|AA586305
  misc_feature (1)..(229): Homolog of NCBI NO: 22330338 NR Description: glycosyl hydrolase family 1; protein id:
  misc_feature (222)..(362): Homolog of NCBI NO: 22330338 NR Description: glycosyl hydrolase family 1; protein id:
  misc_feature (1)..(229): Homolog of NCBI NO: 25289447 NR Description: hypothetical protein T2K10.15 [imported] - thaliana >gi|4249391|gb|AAD14488.1|AAD14488 Similar to gi|3249076
  misc_feature (259)..(362): Homolog of NCBI NO: 25289447 NR Description: hypothetical protein T2K10.15 [imported] - thaliana >gi|4249391|gb|AAD14488.1|AAD14488 Similar to gi|3249076
  misc_feature (229)..(259): Homolog of NCBI NO: 25289447 NR Description: hypothetical protein T2K10.15 [imported] - thaliana >gi|4249391|gb|AAD14488.1|AAD14488 Similar to gi|3249076
  misc_feature (1)..(229): Homolog of NCBI NO: 15219037 NR Description: glycosyl hydrolase family 1; protein id:
  misc_feature (244)..(363): Homolog of NCBI NO: 15219037 NR Description: glycosyl hydrolase family 1; protein id:
MVDTNLDAFRFSISWSRLIPNGRGSVNQKGLQFYKNLISELITHGIEPHVTLYHYDHPQYLEDEYGGWVNNMMIKDFTAYVDVCFREFGNYVKFWTTINEANVFTIGGYNDGDTPPGRCSLPGKNCLLGNSSTETYIVGHNLLLAHASASRLYKQKYKDKQGGSIGFGLYLMGLTPSTSSKDDAIATQRAKDFYFGWFLGPLIFGDYPDTMKRTIGSRLPVFSEEESEQYPVAPWTMEAVLEYIKQSYDNPPVYILENGTPMTQHKDTHRVEYMNAYIGGVLKSIRNGSDTRGYFVWSFMDLFELIGRYDYGYGLYSVNFSDPHRKRSPRLSAHWYSDFLKGKTSFLDSKGIKELQSNFSSSS

SEQ ID NO: 90243 - protein, 292 aa, Arabidopsis thaliana
  peptide (1)..(292): Ceres Seq. ID no. 12723192
  misc_feature (1)..(292): Homolog of NCBI NO: 15219036 NR Description: glycosyl hydrolase family 1; protein id:
  misc_feature (1)..(159): Homolog of NCBI NO: 7435457 NR Description: hypothetical protein T13D8.15 - Arabidopsis >gi|3249077|gb|AAC24061.1| Similar to prunasin hydrolase gb|U50201 from Prunus serotina. ESTs gb|T21225 and gb|AA586305
  misc_feature (149)..(292): Homolog of NCBI NO: 7435457 NR Description: hypothetical protein T13D8.15 - Arabidopsis >gi|3249077|gb|AAC24061.1| Similar to prunasin hydrolase gb|U50201 from Prunus serotina. ESTs gb|T21225 and gb|AA586305
  misc_feature (1)..(158): Homolog of NCBI NO: 22330338 NR Description: glycosyl hydrolase family 1; protein id:
  misc_feature (151)..(291): Homolog of NCBI NO: 22330338 NR Description: glycosyl hydrolase family 1; protein id:
  misc_feature (1)..(158): Homolog of NCBI NO: 25289447 NR Description: hypothetical protein T2K10.15 [imported] - thaliana >gi|4249391|gb|AAD14488.1|AAD14488 Similar to gi|3249076
  misc_feature (188)..(291): Homolog of NCBI NO: 25289447 NR Description: hypothetical protein T2K10.15 [imported] - thaliana >gi|4249391|gb|AAD14488.1|AAD14488 Similar to gi|3249076
  misc_feature (158)..(188): Homolog of NCBI NO: 25289447 NR Description: hypothetical protein T2K10.15 [imported] - thaliana >gi|4249391|gb|AAD14488.1|AAD14488 Similar to gi|3249076
  misc_feature (1)..(158): Homolog of NCBI NO: 15219037 NR Description: glycosyl hydrolase family 1; protein id:
  misc_feature (173)..(292): Homolog of NCBI NO: 15219037 NR Description: glycosyl hydrolase family 1; protein id:
MMIKDFTAYVDVCFREFGNYVKFWTTINEANVFTIGGYNDGDTPPGRCSLPGKNCLLGNSSTETYIVGHNLLLAHASASRLYKQKYKDKQGGSIGFGLYLMGLTPSTSSKDDAIATQRAKDFYFGWFLGPLIFGDYPDTMKRTIGSRLPVFSEEESEQYPVAPWTMEAVLEYIKQSYDNPPVYILENGTPMTQHKDTHRVEYMNAYIGGVLKSIRNGSDTRGYFVWSFMDLFELIGRYDYGYGLYSVNFSDPHRKRSPRLSAHWYSDFLKGKTSFLDSKGIKELQSNFSSSS

SEQ ID NO: 90244 - DNA, 1005 bp, Arabidopsis thaliana
  misc_feature (1)..(1005): Ceres Seq. ID no. 12723239
  misc_feature: MA Experiment ID: 20000171 Result: Up-regulated in Transcription
  misc_feature: MA Experiment 20000171 PARAMETER Experiment Name: At_42deg_Heat_P Parameter: Age (day) Value: 14
  misc_feature: MA Experiment 20000171 PARAMETER Experiment Name: At_42deg_Heat_P Parameter: Organism Value: A. thaliana
  misc_feature: MA Experiment 20000171 PARAMETER Experiment Name: At_42deg_Heat_P Parameter: Plant Line Value: WS
  misc_feature: MA Experiment 20000171 PARAMETER Experiment Name: At_42deg_Heat_P Parameter: Temperature (deg C) Value: 42 vs. 22
  misc_feature: MA Experiment 20000171 PARAMETER Experiment Name: At_42deg_Heat_P Parameter: Timepoint (hr) Value: 1
  misc_feature: MA Experiment 20000171 PARAMETER Experiment Name: At_42deg_Heat_P Parameter: Tissue Value: Aerial
  misc_feature: MA Experiment ID: 20000173 Result: Up-regulated in Transcription
  misc_feature: MA Experiment 20000173 PARAMETER Experiment Name: At_42deg_Heat_P Parameter: Age (day) Value: 14
  misc_feature: MA Experiment 20000173 PARAMETER Experiment Name: At_42deg_Heat_P Parameter: Organism Value: A. thaliana
  misc_feature: MA Experiment 20000173 PARAMETER Experiment Name: At_42deg_Heat_P Parameter: Plant Line Value: WS
  misc_feature: MA Experiment 20000173 PARAMETER Experiment Name: At_42deg_Heat_P Parameter: Temperature (deg C) Value: 42 vs. 22
  misc_feature: MA Experiment 20000173 PARAMETER Experiment Name: At_42deg_Heat_P Parameter: Timepoint (hr) Value: 6
  misc_feature: MA Experiment 20000173 PARAMETER Experiment Name: At_42deg_Heat_P Parameter: Tissue Value: Aerial
  misc_feature: MA Experiment ID: 20000227 Result: Down-regulated in Transcription
  misc_feature: MA Experiment 20000227 PARAMETER Experiment Name: At_Root-Tips-vs-Tops_P Parameter: Tissue Value: Root Tips vs. Root Tops
  misc_feature: MA Experiment ID: 20000267 Result: Up-regulated in Transcription
  misc_feature: MA Experiment 20000267 PARAMETER Experiment Name: At_Drought_P Parameter: Age (day) Value: 7
  misc_feature: MA Experiment 20000267 PARAMETER Experiment Name: At_Drought_P Parameter: Organism Value: A. thaliana
  misc_feature: MA Experiment 20000267 PARAMETER Experiment Name: At_Drought_P Parameter: Plant Line Value: WS
  misc_feature: MA Experiment 20000267 PARAMETER Experiment Name: At_Drought_P Parameter: Timepoint (hr) Value: 6
  misc_feature: MA Experiment 20000267 PARAMETER Experiment Name: At_Drought_P Parameter: Tissue Value: Whole Plant
  misc_feature: MA Experiment 20000267 PARAMETER Experiment Name: At_Drought_P Parameter: Treatment Value: Drought vs. No Drought
  misc_feature: MA Experiment ID: 20000268 Result: Up-regulated in Transcription
  misc_feature: MA Experiment 20000268 PARAMETER Experiment Name: At_100mM_NaCl__P Parameter: Age (day) Value: 14
  misc_feature: MA Experiment 20000268 PARAMETER Experiment Name: At_100mM_NaCl__P Parameter: Organism Value: A. thaliana
  misc_feature: MA Experiment 20000268 PARAMETER Experiment Name: At_100mM_NaCl__P Parameter: Plant Line Value: WS
  misc_feature: MA Experiment 20000268 PARAMETER Experiment Name: At_100mM_NaCl__P Parameter: Timepoint (hr) Value: 6
  misc_feature: MA Experiment 20000268 PARAMETER Experiment Name: At_100mM_NaCl__P Parameter: Tissue Value: Whole Plant
  misc_feature: MA Experiment 20000268 PARAMETER Experiment Name: At_100mM_NaCl__P Parameter: Treatment Value: 100mM NaCl vs. No Treatment
  misc_feature: MA Experiment ID: 20000436 Result: Up-regulated in Transcription
  misc_feature: MA Experiment 20000436 PARAMETER Experiment Name: At_Drought_P Parameter: Age (day) Value: 7
  misc_feature: MA Experiment 20000436 PARAMETER Experiment Name: At_Drought_P Parameter: Organism Value: A. thaliana
  misc_feature: MA Experiment 20000436 PARAMETER Experiment Name: At_Drought_P Parameter: Plant Line Value: WS
  misc_feature: MA Experiment 20000436 PARAMETER Experiment Name: At_Drought_P Parameter: Timepoint (hr) Value: 12
  misc_feature: MA Experiment 20000436 PARAMETER Experiment Name: At_Drought_P Parameter: Tissue Value: Whole Plant
  misc_feature: MA Experiment 20000436 PARAMETER Experiment Name: At_Drought_P Parameter: Treatment Value: Drought vs. No Drought
  misc_feature: MA Experiment ID: 20000437 Result: Up-regulated in Transcription
  misc_feature: MA Experiment 20000437 PARAMETER Experiment Name: At_Drought_P Parameter: Age (day) Value: 8
  misc_feature: MA Experiment 20000437 PARAMETER Experiment Name: At_Drought_P Parameter: Organism Value: A. thaliana
  misc_feature: MA Experiment 20000437 PARAMETER Experiment Name: At_Drought_P Parameter: Plant Line Value: WS
  misc_feature: MA Experiment 20000437 PARAMETER Experiment Name: At_Drought_P Parameter: Timepoint (hr) Value: 24
  misc_feature: MA Experiment 20000437 PARAMETER Experiment Name: At_Drought_P Parameter: Tissue Value: Whole Plant
  misc_feature: MA Experiment 20000437 PARAMETER Experiment Name: At_Drought_P Parameter: Treatment Value: Drought vs. No Drought
  misc_feature: MA Experiment ID: 20000451 Result: Up-regulated in Transcription
  misc_feature: MA Experiment 20000451 PARAMETER Experiment Name: At_CS6879_Shoots-Roots_P Parameter: Age (day) Value: 14
  misc_feature: MA Experiment 20000451 PARAMETER Experiment Name: At_CS6879_Shoots-Roots_P Parameter: Organism Value: A. thaliana
  misc_feature: MA Experiment 20000451 PARAMETER Experiment Name: At_CS6879_Shoots-Roots_P Parameter: Plant Line Value: CS6879 vs. WS
  misc_feature: MA Experiment 20000451 PARAMETER Experiment Name: At_CS6879_Shoots-Roots_P Parameter: Tissue Value: Roots
atggcccctgagatttccgtaaacccgatgtatttatccgaaaaggcgcatcaagcacctccaaggagagcttatgtgacgtttttggcaggaaatggagactacgtgaagggagtggtgggactagcaaagggtttgcgtaaggtcaaaagtgcgtatcctcttgttgttgctatgttacctgatgtgcctgaggaacatagagagatcttgaggtctcaaggctgtgtcgtgcgtgagatcgaacctgtttatcctccagacaaccaagttgagtttgccatggcttattacgttctcaactactcaaaacttcgtatttggaactttgaagagtacagcaagatgatataccttgacgcagatattcaagtctttgacaatatcgatcacctctttgatttgtctgatgcatatttctatgccgtgatggactgtttctgtgagaaaacatggagccactcgctgcagtattcaattgggtattgtcaacagtgcccggagaaggtcacgtggccagaagatatggaatctccacctcctcctctgtatttcaacgccggtatgtttgtgtttgagcctagtcctttgacttatgagagtctccttcagaccctggagatcacaccaccttcaccgtttgcagaacaagattttctcaatatgttctttgagaaagtgtacaaaccgatccctttggtatacaatctggttttggctatgctttggcgtcacccggagaacgtggagctggagaaagtcaaagttgttcactactgtgcagctggatccaagccatggagatacacaggagaagaagctaacatggacagagaagacatcaagatgttagttgataaatggtgggatgtctataatgatgaatctctcgatttcaaatcgaaaatccctgcagatgcggaagaaaccgttacaaaatcaagcatcctagcttccgttcttgaaccagaaatgacctactttcctgctccttctgctgcttga

SEQ ID NO: 90245 - protein, 334 aa, Arabidopsis thaliana
  peptide (1)..(334): Ceres Seq. ID no. 12723240
  misc_feature (1)..(334): Homolog of NCBI NO: 15219093 NR Description: galactinol synthase, putative; protein id: [Arabidopsis thaliana] >gi|25404266|pir||H96629 hypothetical
  misc_feature (1)..(334): Homolog of NCBI NO: 5608497 NR Description: galactinol synthase, isoform GolS-1 [Ajuga
  misc_feature (1)..(334): Homolog of NCBI NO: 15219087 NR Description: galactinol synthase, putative; protein id:
  misc_feature (23)..(334): Homolog of NCBI NO: 4588376 NR Description: galactinol synthase [Brassica napus]
  misc_feature (23)..(334): Homolog of NCBI NO: 15226522 NR Description: putative galactinol synthase; protein id: supported by cDNA: 124236., supported by cDNA: gi_15810148,
  misc_feature (1)..(334): Homolog of NCBI NO: 18874400 NR Description: galactinol synthase [Cucumis melo]
  misc_feature (1)..(334): Homolog of NCBI NO: 15223567 NR Description: water stress-induced protein, putative; protein At1g56600.1, supported by cDNA: gi_15215761, supported by cDNA:
  misc_feature (1)..(334): Homolog of NCBI NO: 5541885 NR Description: putative galactinol synthase [Pisum sativum]
  misc_feature (1)..(301): Homolog of NCBI NO: 15217486 NR Description: putative galactinol synthase; protein id: supported by cDNA: gi_13899102, supported by cDNA: gi_17298126, by cDNA: gi_20148246 [Arabidopsis thaliana]
  misc_feature (1)..(334): Homolog of NCBI NO: 30089660 NR Description: galactinol synthase [Medicago sativa]
MAPEISVNPMYLSEKAHQAPPRRAYVTFLAGNGDYVKGVVGLAKGLRKVKSAYPLVVAMLPDVPEEHREILRSQGCVVREIEPVYPPDNQVEFAMAYYVLNYSKLRIWNFEEYSKMIYLDADIQVFDNIDHLFDLSDAYFYAVMDCFCEKTWSHSLQYSIGYCQQCPEKVTWPEDMESPPPPLYFNAGMFVFEPSPLTYESLLQTLEITPPSPFAEQDFLNMFFEKVYKPIPLVYNLVLAMLWRHPENVELEKVKVVHYCAAGSKPWRYTGEEANMDREDIKMLVDKWWDVYNDESLDFKSKIPADAEETVTKSSILASVLEPEMTYFPAPSAA

SEQ ID NO: 90246 - protein, 325 aa, Arabidopsis thaliana
  peptide (1)..(325): Ceres Seq. ID no. 12723241
  misc_feature (1)..(325): Homolog of NCBI NO: 15219093 NR Description: galactinol synthase, putative; protein id: [Arabidopsis thaliana] >gi|25404266|pir||H96629 hypothetical
  misc_feature (1)..(325): Homolog of NCBI NO: 5608497 NR Description: galactinol synthase, isoform GolS-1 [Ajuga
  misc_feature (1)..(325): Homolog of NCBI NO: 15219087 NR Description: galactinol synthase, putative; protein id:
  misc_feature (14)..(325): Homolog of NCBI NO: 4588376 NR Description: galactinol synthase [Brassica napus]
  misc_feature (14)..(325): Homolog of NCBI NO: 15226522 NR Description: putative galactinol synthase; protein id: supported by cDNA: 124236., supported by cDNA: gi_15810148,
  misc_feature (1)..(325): Homolog of NCBI NO: 18874400 NR Description: galactinol synthase [Cucumis melo]
  misc_feature (1)..(325): Homolog of NCBI NO: 15223567 NR Description: water stress-induced protein, putative; protein At1g56600.1, supported by cDNA: gi_15215761, supported by cDNA:
  misc_feature (1)..(325): Homolog of NCBI NO: 5541885 NR Description: putative galactinol synthase [Pisum sativum]
  misc_feature (1)..(292): Homolog of NCBI NO: 15217486 NR Description: putative galactinol synthase; protein id: supported by cDNA: gi_13899102, supported by cDNA: gi_17298126, by cDNA: gi_20148246 [Arabidopsis thaliana]
  misc_feature (1)..(325): Homolog of NCBI NO: 30089660 NR Description: galactinol synthase [Medicago sativa]
MYLSEKAHQAPPRRAYVTFLAGNGDYVKGVVGLAKGLRKVKSAYPLVVAMLPDVPEEHREILRSQGCVVREIEPVYPPDNQVEFAMAYYVLNYSKLRIWNFEEYSKMIYLDADIQVFDNIDHLFDLSDAYFYAVMDCFCEKTWSHSLQYSIGYCQQCPEKVTWPEDMESPPPPLYFNAGMFVFEPSPLTYESLLQTLEITPPSPFAEQDFLNMFFEKVYKPIPLVYNLVLAMLWRHPENVELEKVKVVHYCAAGSKPWRYTGEEANMDREDIKMLVDKWWDVYNDESLDFKSKIPADAEETVTKSSILASVLEPEMTYFPAPSAA

SEQ ID NO: 90247 - protein, 276 aa, Arabidopsis thaliana
  peptide (1)..(276): Ceres Seq. ID no. 12723242
  misc_feature (1)..(276): Homolog of NCBI NO: 15219093 NR Description: galactinol synthase, putative; protein id: [Arabidopsis thaliana] >gi|25404266|pir||H96629 hypothetical
  misc_feature (1)..(276): Homolog of NCBI NO: 5608497 NR Description: galactinol synthase, isoform GolS-1 [Ajuga
  misc_feature (1)..(276): Homolog of NCBI NO: 15219087 NR Description: galactinol synthase, putative; protein id:
  misc_feature (1)..(276): Homolog of NCBI NO: 4588376 NR Description: galactinol synthase [Brassica napus]
  misc_feature (1)..(276): Homolog of NCBI NO: 15226522 NR Description: putative galactinol synthase; protein id: supported by cDNA: 124236., supported by cDNA: gi_15810148,
  misc_feature (1)..(276): Homolog of NCBI NO: 18874400 NR Description: galactinol synthase [Cucumis melo]
  misc_feature (1)..(276): Homolog of NCBI NO: 15223567 NR Description: water stress-induced protein, putative; protein At1g56600.1, supported by cDNA: gi_15215761, supported by cDNA:
  misc_feature (1)..(276): Homolog of NCBI NO: 5541885 NR Description: putative galactinol synthase [Pisum sativum]
  misc_feature (1)..(243): Homolog of NCBI NO: 15217486 NR Description: putative galactinol synthase; protein id: supported by cDNA: gi_13899102, supported by cDNA: gi_17298126, by cDNA: gi_20148246 [Arabidopsis thaliana]
  misc_feature (1)..(276): Homolog of NCBI NO: 30089660 NR Description: galactinol synthase [Medicago sativa]
MLPDVPEEHREILRSQGCVVREIEPVYPPDNQVEFAMAYYVLNYSKLRIWNFEEYSKMIYLDADIQVFDNIDHLFDLSDAYFYAVMDCFCEKTWSHSLQYSIGYCQQCPEKVTWPEDMESPPPPLYFNAGMFVFEPSPLTYESLLQTLEITPPSPFAEQDFLNMFFEKVYKPIPLVYNLVLAMLWRHPENVELEKVKVVHYCAAGSKPWRYTGEEANMDREDIKMLVDKWWDVYNDESLDFKSKIPADAEETVTKSSILASVLEPEMTYFPAPSAA

SEQ ID NO: 90248 - DNA, 1406 bp, Arabidopsis thaliana
  misc_feature (1)..(1406): Ceres Seq. ID no. 12723259
  misc_feature: MA Experiment ID: 20001911 Result: Up-regulated in Transcription
  misc_feature: MA Experiment 20001911 PARAMETER Experiment Name: At_Drought_Reproduction_P Parameter: Age (day) Value: 40
  misc_feature: MA Experiment 20001911 PARAMETER Experiment Name: At_Drought_Reproduction_P Parameter: Organism Value: A. thaliana
  misc_feature: MA Experiment 20001911 PARAMETER Experiment Name: At_Drought_Reproduction_P Parameter: Plant Line Value: WS
  misc_feature: MA Experiment 20001911 PARAMETER Experiment Name: At_Drought_Reproduction_P Parameter: Timepoint (day) Value: 10
  misc_feature: MA Experiment 20001911 PARAMETER Experiment Name: At_Drought_Reproduction_P Parameter: Tissue Value: Flowers
  misc_feature: MA Experiment 20001911 PARAMETER Experiment Name: At_Drought_Reproduction_P Parameter: Treatment Value: Drought vs. No Drought
gttttatgaaattgaagaacgaaattgaagtgaaaagtgaaatcgtgcaattttcatcttcctcttctccttaaaccctgatttcggattctcacaatcgaacttggctgcagagaaggatggggactaacgaagtaacaaggattgtgactgatgaagaaaagagagaagcgaagaacttcaacatatttgatctccctgacgttcctaccggacttcctccgcatcttgagctccagcgaactcgcgttgtctgtaagaaggattctaatattcatcctacggctatcactttctcgggtgcctattcctctatgggagtggacaacagtgtgagactagaaaacttctctgaggatttcaaagttgatgtgattagtctcacagagacagatatggtattcgatatgatcggtgtccatgcaggaatcgctaatgctttccgaagaatcctcttagctgagcttccttcaatggctattgaaaaagtgtatgtagcaaacaacacatcggttattcaagacgaagttcttgctcacaggttgggtcttattccaattgccgcagatccgagactctttgaatatttatctgaaaacgatcagccaaatgaaaagaacaccattgttttcaaactccatgtgaaatgtctaaaaggtgacccgcgtcgtaaagtcttaacaagcgaattgaaatggttaccaaatggaagtgagcttatcaaagaatctggaggttcaaccacaacgccaaaaacttacacttcattcaaccatagccaagattccttccctgaatttgctgaaaatcctatcaggccaaccttaaaagatatcttgatagcaaaacttggccctggccaggaaatcgagcttgaggctcatgccgttaagggcattggtaaaacacatgcaaagtggtccccagtagcaacggcttggtatcgaatgcttcctgaggtggttctactaaaggaattcgagggtaaacatgccgaagaactcgtaaaagtctgccccaagaaagtttttgacattgaagacatgggccaaggtaggaagagggcaacagtagctcggccgcgtgattgttcgttgtgtagagaatgcataagagatggagtggaatgggaggaccaagtggatctgcgccgtgtcaagaaccattttatatttacaattgagtccacgggatcacagcctccggaggttcttttcaacgaagcagtgaagatattggaagataaatgtgaaagagtaatctctgaactctcctgaaaagagattaaattggtttagctctaccggcttggttccggtttagttcagttttgggttttgtatcgaagttaatacaaagaacattgaaatttatatatacttggtttcggctcggttcaaatttag

SEQ ID NO: 90249 - protein, 385 aa, Arabidopsis thaliana
  peptide (1)..(385): Ceres Seq. ID no. 12723260
  misc_feature (124)..(268): Pfam Name: RNA polymerase Rpb3/RpoA insert domain Pfam Description: RNA polymerase Rpb3/RpoA insert domain
  misc_feature (1)..(385): Homolog of NCBI NO: 15219773 NR Description: RNA polymerase subunit; protein id: At1g60620.1, by cDNA: gi_14423463, supported by cDNA: gi_514323 [Arabidopsis >gi|25288353|pir||D96631 RNA polymerase subunit (isoform subunit
  misc_feature (9)..(380): Homolog of NCBI NO: 15219820 NR Description: RNA polymerase subunit; protein id: At1g60850.1, by cDNA: 21961., supported by cDNA: gi_514321 [Arabidopsis
  misc_feature (9)..(380): Homolog of NCBI NO: 514322 NR Description: RNA polymerase subunit >gi|1586549|prf||2204246A
  misc_feature (9)..(380): Homolog of NCBI NO: 21592304 NR Description: RNA polymerase subunit [Arabidopsis thaliana]
  misc_feature (37)..(384): Homolog of NCBI NO: 3914807 NR Description: DNA-directed RNA polymerase I 40 kDa polypeptide (RPA39) >gi|2266929|gb|AAC14354.1| RNA polymerase I subunit
  misc_feature (41)..(384): Homolog of NCBI NO: 14198113 NR Description: Unknown (protein for IMAGE:3448039) [Homo sapiens]
  misc_feature (37)..(384): Homolog of NCBI NO: 34874462 NR Description: similar to DNA-directed RNA polymerase I 40 kDa
  misc_feature (37)..(384): Homolog of NCBI NO: 6677787 NR Description: RNA polymerase 1-1; RNA polymerase 1-1 (40 kDa
  misc_feature (37)..(384): Homolog of NCBI NO: 18266895 NR Description: DNA-directed RNA polymerase I 40 kDa polypeptide
  misc_feature (51)..(385): Homolog of NCBI NO: 34193909 NR Description: RNA polymerase 1-1 [Danio rerio]
MGTNEVTRIVTDEEKREAKNFNIFDLPDVPTGLPPHLELQRTRVVCKKDSNIHPTAITFSGAYSSMGVDNSVRLENFSEDFKVDVISLTETDMVFDMIGVHAGIANAFRRILLAELPSMAIEKVYVANNTSVIQDEVLAHRLGLIPIAADPRLFEYLSENDQPNEKNTIVFKLHVKCLKGDPRRKVLTSELKWLPNGSELIKESGGSTTTPKTYTSFNHSQDSFPEFAENPIRPTLKDILIAKLGPGQEIELEAHAVKGIGKTHAKWSPVATAWYRMLPEVVLLKEFEGKHAEELVKVCPKKVFDIEDMGQGRKRATVARPRDCSLCRECIRDGVEWEDQVDLRRVKNHFIFTIESTGSQPPEVLFNEAVKILEDKCERVISELS

SEQ ID NO: 90250 - protein, 320 aa, Arabidopsis thaliana
  peptide (1)..(320): Ceres Seq. ID no. 12723261
  misc_feature (59)..(203): Pfam Name: RNA polymerase Rpb3/RpoA insert domain Pfam Description: RNA polymerase Rpb3/RpoA insert domain
  misc_feature (1)..(320): Homolog of NCBI NO: 15219773 NR Description: RNA polymerase subunit; protein id: At1g60620.1, by cDNA: gi_14423463, supported by cDNA: gi_514323 [Arabidopsis >gi|25288353|pir||D96631 RNA polymerase subunit (isoform subunit
  misc_feature (1)..(315): Homolog of NCBI NO: 15219820 NR Description: RNA polymerase subunit; protein id: At1g60850.1, by cDNA: 21961., supported by cDNA: gi_514321 [Arabidopsis
  misc_feature (1)..(315): Homolog of NCBI NO: 514322 NR Description: RNA polymerase subunit >gi|1586549|prf||2204246A
  misc_feature (1)..(315): Homolog of NCBI NO: 21592304 NR Description: RNA polymerase subunit [Arabidopsis thaliana]
  misc_feature (1)..(319): Homolog of NCBI NO: 3914807 NR Description: DNA-directed RNA polymerase I 40 kDa polypeptide (RPA39) >gi|2266929|gb|AAC14354.1| RNA polymerase I subunit
  misc_feature (1)..(319): Homolog of NCBI NO: 14198113 NR Description: Unknown (protein for IMAGE:3448039) [Homo sapiens]
  misc_feature (1)..(319): Homolog of NCBI NO: 34874462 NR Description: similar to DNA-directed RNA polymerase I 40 kDa
  misc_feature (1)..(319): Homolog of NCBI NO: 6677787 NR Description: RNA polymerase 1-1; RNA polymerase 1-1 (40 kDa
  misc_feature (1)..(319): Homolog of NCBI NO: 18266895 NR Description: DNA-directed RNA polymerase I 40 kDa polypeptide
  misc_feature (1)..(320): Homolog of NCBI NO: 34193909 NR Description: RNA polymerase 1-1 [Danio rerio]
MGVDNSVRLENFSEDFKVDVISLTETDMVFDMIGVHAGIANAFRRILLAELPSMAIEKVYVANNTSVIQDEVLAHRLGLIPIAADPRLFEYLSENDQPNEKNTIVFKLHVKCLKGDPRRKVLTSELKWLPNGSELIKESGGSTTTPKTYTSFNHSQDSFPEFAENPIRPTLKDILIAKLGPGQEIELEAHAVKGIGKTHAKWSPVATAWYRMLPEVVLLKEFEGKHAEELVKVCPKKVFDIEDMGQGRKRATVARPRDCSLCRECIRDGVEWEDQVDLRRVKNHFIFTIESTGSQPPEVLFNEAVKILEDKCERVISELS

SEQ ID NO: 90251 - protein, 293 aa, Arabidopsis thaliana
  peptide (1)..(293): Ceres Seq. ID no. 12723262
  misc_feature (32)..(176): Pfam Name: RNA polymerase Rpb3/RpoA insert domain Pfam Description: RNA polymerase Rpb3/RpoA insert domain
  misc_feature (1)..(293): Homolog of NCBI NO: 15219773 NR Description: RNA polymerase subunit; protein id: At1g60620.1, by cDNA: gi_14423463, supported by cDNA: gi_514323 [Arabidopsis >gi|25288353|pir||D96631 RNA polymerase subunit (isoform subunit
  misc_feature (1)..(288): Homolog of NCBI NO: 15219820 NR Description: RNA polymerase subunit; protein id: At1g60850.1, by cDNA: 21961., supported by cDNA: gi_514321 [Arabidopsis
  misc_feature (1)..(288): Homolog of NCBI NO: 514322 NR Description: RNA polymerase subunit >gi|1586549|prf||2204246A
  misc_feature (1)..(288): Homolog of NCBI NO: 21592304 NR Description: RNA polymerase subunit [Arabidopsis thaliana]
  misc_feature (1)..(292): Homolog of NCBI NO: 3914807 NR Description: DNA-directed RNA polymerase I 40 kDa polypeptide (RPA39) >gi|2266929|gb|AAC14354.1| RNA polymerase I subunit
  misc_feature (1)..(292): Homolog of NCBI NO: 14198113 NR Description: Unknown (protein for IMAGE:3448039) [Homo sapiens]
  misc_feature (1)..(292): Homolog of NCBI NO: 34874462 NR Description: similar to DNA-directed RNA polymerase I 40 kDa
  misc_feature (1)..(292): Homolog of NCBI NO: 6677787 NR Description: RNA polymerase 1-1; RNA polymerase 1-1 (40 kDa
  misc_feature (1)..(292): Homolog of NCBI NO: 18266895 NR Description: DNA-directed RNA polymerase I 40 kDa polypeptide
  misc_feature (1)..(293): Homolog of NCBI NO: 34193909 NR Description: RNA polymerase 1-1 [Danio rerio]
MVFDMIGVHAGIANAFRRILLAELPSMAIEKVYVANNTSVIQDEVLAHRLGLIPIAADPRLFEYLSENDQPNEKNTIVFKLHVKCLKGDPRRKVLTSELKWLPNGSELIKESGGSTTTPKTYTSFNHSQDSFPEFAENPIRPTLKDILIAKLGPGQEIELEAHAVKGIGKTHAKWSPVATAWYRMLPEVVLLKEFEGKHAEELVKVCPKKVFDIEDMGQGRKRATVARPRDCSLCRECIRDGVEWEDQVDLRRVKNHFIFTIESTGSQPPEVLFNEAVKILEDKCERVISELS

SEQ ID NO: 90252 - DNA, 849 bp, Arabidopsis thaliana
  misc_feature (1)..(849): Ceres Seq. ID no. 12723267
  misc_feature: MA Experiment ID: 20000440 Result: Up-regulated in Transcription
  misc_feature: MA Experiment 20000440 PARAMETER Experiment Name: At_Closed-Flower__Sub_P Parameter: Tissue Value: Closed Flower vs. Whole Plant
atggatacaggaaataacaataatcttcccactcttctaaagtgtaactttcctccatatggaaaagattatcctggaggcttcgctactggaagattttctgatggaagagttccttctgatcttattgcggaaaagttgggattggctaagacattaccagcatatatgaatccgtatttgaagccagaggatcttcttaaaggtgtaacatttgcatctggaggaactggttatgatccattgacagcaaaaattatgtcagtaatatcggtgtgggatcaactcataaatttcaaagaatatatatcaaagatcaagaggcatttcggagaagaaaaagccaaagatatcttggaacatagtttctttcttgtggtgtctagtagcaatgaccttgctcacacttatttagctcaaactcatcgatatgatcgtacctcttatgccaatttcttggctgactctgctgtccatttcgtgagagaattacataagcttggagctcggaaaataggagtgtttagtgcagtccccgtcggttgtgttccactccaaagaacagtttttggagataaagagctagatggtgttatcctttacattaatgtttatgatactcttttcgacatgatccaacaccctaaaaaatacggttttgaggtagctgatagaggatgttgcggtaaaggattgcttgcgatatcctatttgtgtaactcattgaacccatttacgtgttctaattcttcagcatacatattttgggatagctatcatccatctgaaagagcttatcaagttatcgtcgacaatttactcgacaaatatttgagcaaagtctattga

SEQ ID NO: 90253 - protein, 282 aa, Arabidopsis thaliana
  peptide (1)..(282): Ceres Seq. ID no. 12723268
  misc_feature (1)..(273): Pfam Name: GDSL-like Lipase/Acylhydrolase Pfam Description: GDSL-like Lipase/Acylhydrolase
  misc_feature (1)..(282): Homolog of NCBI NO: 22330312 NR Description: similar to proline-rich protein, putative;
  misc_feature (1)..(191): Homolog of NCBI NO: 18406327 NR Description: proline-rich protein, putative; protein id:
  misc_feature (192)..(282): Homolog of NCBI NO: 18406327 NR Description: proline-rich protein, putative; protein id:
  misc_feature (1)..(282): Homolog of NCBI NO: 15229719 NR Description: putative protein; protein id: At3g43570.1 thaliana] >gi|9967506|emb|CAC05631.1| putative protein
  misc_feature (1)..(191): Homolog of NCBI NO: 15217977 NR Description: proline-rich protein, putative; protein id:
  misc_feature (192)..(282): Homolog of NCBI NO: 15217977 NR Description: proline-rich protein, putative; protein id:
  misc_feature (1)..(194): Homolog of NCBI NO: 15231934 NR Description: hypothetical protein; protein id: At3g14820.1
  misc_feature (193)..(277): Homolog of NCBI NO: 15231934 NR Description: hypothetical protein; protein id: At3g14820.1
  misc_feature (1)..(164): Homolog of NCBI NO: 15229307 NR Description: putative protein; protein id: At3g43550.1
  misc_feature (42)..(191): Homolog of NCBI NO: 15238307 NR Description: GDSL-motif lipase/hydrolase-like protein; protein
MDTGNNNNLPTLLKCNFPPYGKDYPGGFATGRFSDGRVPSDLIAEKLGLAKTLPAYMNPYLKPEDLLKGVTFASGGTGYDPLTAKIMSVISVWDQLINFKEYISKIKRHFGEEKAKDILEHSFFLVVSSSNDLAHTYLAQTHRYDRTSYANFLADSAVHFVRELHKLGARKIGVFSAVPVGCVPLQRTVFGDKELDGVILYINVYDTLFDMIQHPKKYGFEVADRGCCGKGLLAISYLCNSLNPFTCSNSSAYIFWDSYHPSERAYQVIVDNLLDKYLSKVY

SEQ ID NO: 90254 - protein, 226 aa, Arabidopsis thaliana
  peptide (1)..(226): Ceres Seq. ID no. 12723269
  misc_feature (1)..(217): Pfam Name: GDSL-like Lipase/Acylhydrolase Pfam Description: GDSL-like Lipase/Acylhydrolase
  misc_feature (1)..(226): Homolog of NCBI NO: 22330312 NR Description: similar to proline-rich protein, putative;
  misc_feature (1)..(135): Homolog of NCBI NO: 18406327 NR Description: proline-rich protein, putative; protein id:
  misc_feature (136)..(226): Homolog of NCBI NO: 18406327 NR Description: proline-rich protein, putative; protein id:
  misc_feature (1)..(226): Homolog of NCBI NO: 15229719 NR Description: putative protein; protein id: At3g43570.1 thaliana] >gi|9967506|emb|CAC05631.1| putative protein
  misc_feature (1)..(135): Homolog of NCBI NO: 15217977 NR Description: proline-rich protein, putative; protein id:
  misc_feature (136)..(226): Homolog of NCBI NO: 15217977 NR Description: proline-rich protein, putative; protein id:
  misc_feature (1)..(138): Homolog of NCBI NO: 15231934 NR Description: hypothetical protein; protein id: At3g14820.1
  misc_feature (137)..(221): Homolog of NCBI NO: 15231934 NR Description: hypothetical protein; protein id: At3g14820.1
  misc_feature (1)..(108): Homolog of NCBI NO: 15229307 NR Description: putative protein; protein id: At3g43550.1
  misc_feature (1)..(135): Homolog of NCBI NO: 15238307 NR Description: GDSL-motif lipase/hydrolase-like protein; protein
MNPYLKPEDLLKGVTFASGGTGYDPLTAKIMSVISVWDQLINFKEYISKIKRHFGEEKAKDILEHSFFLVVSSSNDLAHTYLAQTHRYDRTSYANFLADSAVHFVRELHKLGARKIGVFSAVPVGCVPLQRTVFGDKELDGVILYINVYDTLFDMIQHPKKYGFEVADRGCCGKGLLAISYLCNSLNPFTCSNSSAYIFWDSYHPSERAYQVIVDNLLDKYLSKVY

SEQ ID NO: 90255 - protein, 196 aa, Arabidopsis thaliana
  peptide (1)..(196): Ceres Seq. ID no. 12723270
  misc_feature (1)..(187): Pfam Name: GDSL-like Lipase/Acylhydrolase Pfam Description: GDSL-like Lipase/Acylhydrolase
  misc_feature (1)..(196): Homolog of NCBI NO: 22330312 NR Description: similar to proline-rich protein, putative;
  misc_feature (1)..(105): Homolog of NCBI NO: 18406327 NR Description: proline-rich protein, putative; protein id:
  misc_feature (106)..(196): Homolog of NCBI NO: 18406327 NR Description: proline-rich protein, putative; protein id:
  misc_feature (1)..(196): Homolog of NCBI NO: 15229719 NR Description: putative protein; protein id: At3g43570.1 thaliana] >gi|9967506|emb|CAC05631.1| putative protein
  misc_feature (1)..(105): Homolog of NCBI NO: 15217977 NR Description: proline-rich protein, putative; protein id:
  misc_feature (106)..(196): Homolog of NCBI NO: 15217977 NR Description: proline-rich protein, putative; protein id:
  misc_feature (1)..(108): Homolog of NCBI NO: 15231934 NR Description: hypothetical protein; protein id: At3g14820.1
  misc_feature (107)..(191): Homolog of NCBI NO: 15231934 NR Description: hypothetical protein; protein id: At3g14820.1
  misc_feature (1)..(78): Homolog of NCBI NO: 15229307 NR Description: putative protein; protein id: At3g43550.1
  misc_feature (1)..(105): Homolog of NCBI NO: 15238307 NR Description: GDSL-motif lipase/hydrolase-like protein; protein
MSVISVWDQLINFKEYISKIKRHFGEEKAKDILEHSFFLVVSSSNDLAHTYLAQTHRYDRTSYANFLADSAVHFVRELHKLGARKIGVFSAVPVGCVPLQRTVFGDKELDGVILYINVYDTLFDMIQHPKKYGFEVADRGCCGKGLLAISYLCNSLNPFTCSNSSAYIFWDSYHPSERAYQVIVDNLLDKYLSKVY

SEQ ID NO: 90256 - DNA, 676 bp, Arabidopsis thaliana
  misc_feature (1)..(676): Ceres Seq. ID no. 12723283
  misc_feature: MA Experiment ID: 108462 Result: Down-regulated in Transcription
  misc_feature: MA Experiment 108462 PARAMETER Experiment Name: At_Germinating_Seeds_cDNA_P Parameter: Age (day) Value: 2 vs. 0
  misc_feature: MA Experiment 108462 PARAMETER Experiment Name: At_Germinating_Seeds_cDNA_P Parameter: Tissue Value: Germinating Seeds
  misc_feature: MA Experiment ID: 108463 Result: Down-regulated in Transcription
  misc_feature: MA Experiment 108463 PARAMETER Experiment Name: At_Germinating_Seeds_cDNA_P Parameter: Age (day) Value: 3 vs. 0
  misc_feature: MA Experiment 108463 PARAMETER Experiment Name: At_Germinating_Seeds_cDNA_P Parameter: Tissue Value: Germinating Seeds
  misc_feature: MA Experiment ID: 108561 Result: Up-regulated in Transcription
  misc_feature: MA Experiment 108561 PARAMETER Experiment Name: At_100uM_ABA_cDNA_P Parameter: Timepoint (hr) Value: 6
  misc_feature: MA Experiment 108561 PARAMETER Experiment Name: At_100uM_ABA_cDNA_P Parameter: Tissue Value: Aerial
  misc_feature: MA Experiment 108561 PARAMETER Experiment Name: At_100uM_ABA_cDNA_P Parameter: Treatment Value: 100uM ABA vs. No Treatment
  misc_feature: MA Experiment ID: 108576 Result: Up-regulated in Transcription
  misc_feature: MA Experiment 108576 PARAMETER Experiment Name: At_42deg_Heat_cDNA_P Parameter: Temperature (deg C) Value: 42 vs. 22
  misc_feature: MA Experiment 108576 PARAMETER Experiment Name: At_42deg_Heat_cDNA_P Parameter: Timepoint (hr) Value: 1
  misc_feature: MA Experiment 108576 PARAMETER Experiment Name: At_42deg_Heat_cDNA_P Parameter: Tissue Value: Aerial
  misc_feature: MA Experiment ID: 108577 Result: Up-regulated in Transcription
  misc_feature: MA Experiment 108577 PARAMETER Experiment Name: At_42deg_Heat_cDNA_P Parameter: Temperature (deg C) Value: 42 vs. 22
  misc_feature: MA Experiment 108577 PARAMETER Experiment Name: At_42deg_Heat_cDNA_P Parameter: Timepoint (hr) Value: 6
  misc_feature: MA Experiment 108577 PARAMETER Experiment Name: At_42deg_Heat_cDNA_P Parameter: Tissue Value: Aerial
  misc_feature: MA Experiment ID: 108594 Result: Down-regulated in Transcription
  misc_feature: MA Experiment 108594 PARAMETER Experiment Name: At_Ler-rhl_Root_cDNA_P Parameter: Plant Line Value: null
  misc_feature: MA Experiment ID: 108595 Result: Up-regulated in Transcription
  misc_feature: MA Experiment 108595 PARAMETER Experiment Name: At_Ler-pi_Ovule_cDNA_P Parameter: Plant Line Value: null
  misc_feature: MA Experiment ID: 20000069 Result: Up-regulated in Transcription
  misc_feature: MA Experiment 20000069 PARAMETER Experiment Name: At_100uM_ABA_Mutants_cDNA_P Parameter: Plant Line Value: CS23
  misc_feature: MA Experiment 20000069 PARAMETER Experiment Name: At_100uM_ABA_Mutants_cDNA_P Parameter: Timepoint (hr) Value: 6
  misc_feature: MA Experiment 20000069 PARAMETER Experiment Name: At_100uM_ABA_Mutants_cDNA_P Parameter: Tissue Value: Aerial
  misc_feature: MA Experiment 20000069 PARAMETER Experiment Name: At_100uM_ABA_Mutants_cDNA_P Parameter: Treatment Value: 100uM ABA vs. No Treatment
  misc_feature: MA Experiment ID: 20000093 Result: Up-regulated in Transcription
  misc_feature: MA Experiment 20000093 PARAMETER Experiment Name: At_42deg_Heat_cDNA_P Parameter: Temperature (deg C) Value: 42 vs. 22
  misc_feature: MA Experiment 20000093 PARAMETER Experiment Name: At_42deg_Heat_cDNA_P Parameter: Timepoint (hr) Value: 0.5
  misc_feature: MA Experiment 20000093 PARAMETER Experiment Name: At_42deg_Heat_cDNA_P Parameter: Tissue Value: Aerial
  misc_feature: MA Experiment ID: 20000112 Result: Up-regulated in Transcription
  misc_feature: MA Experiment 20000112 PARAMETER Experiment Name: At_42deg_Heat_cDNA_P Parameter: Temperature (deg C) Value: 42 vs. 22
  misc_feature: MA Experiment 20000112 PARAMETER Experiment Name: At_42deg_Heat_cDNA_P Parameter: Timepoint (hr) Value: 2
  misc_feature: MA Experiment 20000112 PARAMETER Experiment Name: At_42deg_Heat_cDNA_P Parameter: Tissue Value: Aerial
  misc_feature: MA Experiment ID: 20000113 Result: Up-regulated in Transcription
  misc_feature: MA Experiment 20000113 PARAMETER Experiment Name: At_42deg_Heat_cDNA_P Parameter: Temperature (deg C) Value: 42 vs. 22
  misc_feature: MA Experiment 20000113 PARAMETER Experiment Name: At_42deg_Heat_cDNA_P Parameter: Timepoint (hr) Value: 8
  misc_feature: MA Experiment 20000113 PARAMETER Experiment Name: At_42deg_Heat_cDNA_P Parameter: Tissue Value: Aerial
  misc_feature: MA Experiment ID: 20000117 Result: Up-regulated in Transcription
  misc_feature: MA Experiment 20000117 PARAMETER Experiment Name: At_100uM_ABA_Mutants_cDNA_P Parameter: Plant Line Value: Columbia
  misc_feature: MA Experiment 20000117 PARAMETER Experiment Name: At_100uM_ABA_Mutants_cDNA_P Parameter: Timepoint (hr) Value: 6
  misc_feature: MA Experiment 20000117 PARAMETER Experiment Name: At_100uM_ABA_Mutants_cDNA_P Parameter: Tissue Value: Aerial
  misc_feature: MA Experiment 20000117 PARAMETER Experiment Name: At_100uM_ABA_Mutants_cDNA_P Parameter: Treatment Value: 100uM ABA vs. No Treatment
  misc_feature: MA Experiment ID: 20000144 Result: Up-regulated in Transcription
  misc_feature: MA Experiment 20000144 PARAMETER Experiment Name: At_42deg_Heat_cDNA_P Parameter: Temperature (deg C) Value: 42 vs. 22
  misc_feature: MA Experiment 20000144 PARAMETER Experiment Name: At_42deg_Heat_cDNA_P Parameter: Timepoint (hr) Value: 1
  misc_feature: MA Experiment 20000144 PARAMETER Experiment Name: At_42deg_Heat_cDNA_P Parameter: Tissue Value: Aerial
  misc_feature: MA Experiment ID: 20000314 Result: Up-regulated in Transcription
  misc_feature: MA Experiment 20000314 PARAMETER Experiment Name: At_14day_Shoots-Roots_Sub_P Parameter: Age (day) Value: 14
  misc_feature: MA Experiment 20000314 PARAMETER Experiment Name: At_14day_Shoots-Roots_Sub_P Parameter: Organism Value: A. thaliana
  misc_feature: MA Experiment 20000314 PARAMETER Experiment Name: At_14day_Shoots-Roots_Sub_P Parameter: Plant Line Value: WS
  misc_feature: MA Experiment 20000314 PARAMETER Experiment Name: At_14day_Shoots-Roots_Sub_P Parameter: Tissue Value: Roots vs. Whole Plant
  misc_feature: MA Experiment ID: 20000327 Result: Up-regulated in Transcription
  misc_feature: MA Experiment 20000327 PARAMETER Experiment Name: At_42deg_Heat_Sub_P Parameter: Age (day) Value: 14
  misc_feature: MA Experiment 20000327 PARAMETER Experiment Name: At_42deg_Heat_Sub_P Parameter: Organism Value: A. thaliana
  misc_feature: MA Experiment 20000327 PARAMETER Experiment Name: At_42deg_Heat_Sub_P Parameter: Plant Line Value: WS
  misc_feature: MA Experiment 20000327 PARAMETER Experiment Name: At_42deg_Heat_Sub_P Parameter: Temperature (deg C) Value: 42 vs. 22
  misc_feature: MA Experiment 20000327 PARAMETER Experiment Name: At_42deg_Heat_Sub_P Parameter: Timepoint (hr) Value: 1
  misc_feature: MA Experiment 20000327 PARAMETER Experiment Name: At_42deg_Heat_Sub_P Parameter: Tissue Value: Aerial
  misc_feature: MA Experiment ID: 20000328 Result: Up-regulated in Transcription
  misc_feature: MA Experiment 20000328 PARAMETER Experiment Name: At_42deg_Heat_Sub_P Parameter: Age (day) Value: 14
  misc_feature: MA Experiment 20000328 PARAMETER Experiment Name: At_42deg_Heat_Sub_P Parameter: Organism Value: A. thaliana
  misc_feature: MA Experiment 20000328 PARAMETER Experiment Name: At_42deg_Heat_Sub_P Parameter: Plant Line Value: WS
  misc_feature: MA Experiment 20000328 PARAMETER Experiment Name: At_42deg_Heat_Sub_P Parameter: Temperature (deg C) Value: 42 vs. 22
  misc_feature: MA Experiment 20000328 PARAMETER Experiment Name: At_42deg_Heat_Sub_P Parameter: Timepoint (hr) Value: 6
  misc_feature: MA Experiment 20000328 PARAMETER Experiment Name: At_42deg_Heat_Sub_P Parameter: Tissue Value: Aerial
  misc_feature: MA Experiment ID: 20000329 Result: Down-regulated in Transcription
  misc_feature: MA Experiment 20000329 PARAMETER Experiment Name: At_4deg_Cold_Sub_P Parameter: Age (day) Value: 14
  misc_feature: MA Experiment 20000329 PARAMETER Experiment Name: At_4deg_Cold_Sub_P Parameter: Organism Value: A. thaliana
  misc_feature: MA Experiment 20000329 PARAMETER Experiment Name: At_4deg_Cold_Sub_P Parameter: Plant Line Value: WS
  misc_feature: MA Experiment 20000329 PARAMETER Experiment Name: At_4deg_Cold_Sub_P Parameter: Temperature (deg C) Value: 4 vs. 22
  misc_feature: MA Experiment 20000329 PARAMETER Experiment Name: At_4deg_Cold_Sub_P Parameter: Timepoint (hr) Value: 6
  misc_feature: MA Experiment 20000329 PARAMETER Experiment Name: At_4deg_Cold_Sub_P Parameter: Tissue Value: Aerial
  misc_feature: MA Experiment ID: 20000347 Result: Up-regulated in Transcription
  misc_feature: MA Experiment 20000347 PARAMETER Experiment Name: At_2mM_SA_Sub_P Parameter: Age (day) Value: 14
  misc_feature: MA Experiment 20000347 PARAMETER Experiment Name: At_2mM_SA_Sub_P Parameter: Organism Value: A. thaliana
  misc_feature: MA Experiment 20000347 PARAMETER Experiment Name: At_2mM_SA_Sub_P Parameter: Plant Line Value: WS
  misc_feature: MA Experiment 20000347 PARAMETER Experiment Name: At_2mM_SA_Sub_P Parameter: Timepoint (hr) Value: 6
  misc_feature: MA Experiment 20000347 PARAMETER Experiment Name: At_2mM_SA_Sub_P Parameter: Tissue Value: Aerial
  misc_feature: MA Experiment 20000347 PARAMETER Experiment Name: At_2mM_SA_Sub_P Parameter: Treatment Value: 2mM SA vs. No Treatment
  misc_feature: MA Experiment ID: 20000355 Result: Up-regulated in Transcription
  misc_feature: MA Experiment 20000355 PARAMETER Experiment Name: At_Siliques_Sub_P Parameter: Age (day) Value: 21
  misc_feature: MA Experiment 20000355 PARAMETER Experiment Name: At_Siliques_Sub_P Parameter: Organism Value: A. thaliana
  misc_feature: MA Experiment 20000355 PARAMETER Experiment Name: At_Siliques_Sub_P Parameter: Plant Line Value: WS
  misc_feature: MA Experiment 20000355 PARAMETER Experiment Name: At_Siliques_Sub_P Parameter: Tissue Value: Less Than 5mm Siliques vs. Whole Plant
  misc_feature: MA Experiment ID: 20001807 Result: Down-regulated in Transcription
  misc_feature: MA Experiment 20001807 PARAMETER Experiment Name: At_50mM_NH4NO3_L-to-H_Sub_P Parameter: Timepoint (hr) Value: 6
  misc_feature: MA Experiment 20001807 PARAMETER Experiment Name: At_50mM_NH4NO3_L-to-H_Sub_P Parameter: Tissue Value: Leaf
  misc_feature: MA Experiment 20001807 PARAMETER Experiment Name: At_50mM_NH4NO3_L-to-H_Sub_P Parameter: Treatment Value: 50mM NH4NO3 vs 100mM Mannitol
aagtcaaaactcttctattttcccctgtcttcatatccaacagagatctcttcatggctccaattactgtcggcgatgttgtaccagacggaactatctctttcttcgatgaaaatgatcagcttcagaccgtctctgttcactctatcgccgccggtaaaaaagtcattctctttggtgttcctggtgctttcactcccacatgcagcatgagccatgtgcctggattcattgggaaagcagaggagctgaagtcaaagggtatcgatgagatcatttgctttagtgtgaatgatccatttgtgatgaaggcatggggaaagacataccaagagaacaagcatgtgaagtttgtagcagatgggtctggagaatacacacatcttcttggacttgagcttgatctcaaggacaagggtcttggtattaggtcaaggagatttgctctgttgcttgataaccttaaggtaactgtagccaatgtcgaaaatggtggcgagttcacggtttccagcgcagaggatatccttaaggctctctaagaaacattatcattcgcttgttgtattgtgaatctaaaccgctgtatgtgaagaagagaattatatagcctgatttcaatcaacaagcaagtgtattgacttgcttggcataataaagtatttggttttaatgt

SEQ ID NO: 90257 - protein, 179 aa, Arabidopsis thaliana
  peptide (1)..(179): Ceres Seq. ID no. 12723284
  misc_feature (23)..(177): Pfam Name: AhpC/TSA family Pfam Description: AhpC/TSA family
  misc_feature (18)..(179): Homolog of NCBI NO: 18406870 NR Description: peroxiredoxin, putative; protein id: At1g60740.1,
  misc_feature (18)..(179): Homolog of NCBI NO: 15218876 NR Description: type 2 peroxiredoxin, putative; protein id: supported by cDNA: 10862., supported by cDNA: gi_12083333, by cDNA: gi_4704731 [Arabidopsis thaliana]
  misc_feature (18)..(179): Homolog of NCBI NO: 21553913 NR Description: peroxiredoxin, putative [Arabidopsis thaliana]
  misc_feature (18)..(179): Homolog of NCBI NO: 4704732 NR Description: peroxiredoxin TPx2 [Arabidopsis thaliana]
  misc_feature (18)..(179): Homolog of NCBI NO: 15218877 NR Description: type 2 peroxiredoxin, putative; protein id: supported by cDNA: 5476., supported by cDNA: gi_12083335,
  misc_feature (18)..(179): Homolog of NCBI NO: 4928472 NR Description: type 2 peroxiredoxin [Brassica rapa subsp.
  misc_feature (18)..(179): Homolog of NCBI NO: 21593881 NR Description: type 2 peroxiredoxin, putative [Arabidopsis
  misc_feature (18)..(179): Homolog of NCBI NO: 3913633 NR Description: Hypothetical protein At1g60740
  misc_feature (18)..(179): Homolog of NCBI NO: 30841938 NR Description: thioredoxin peroxidase 1 [Lycopersicon esculentum]
  misc_feature (18)..(179): Homolog of NCBI NO: 18654477 NR Description: thioredoxin peroxidase [Capsicum annuum]
VKTLLFSPVFISNRDLFMAPITVGDVVPDGTISFFDENDQLQTVSVHSIAAGKKVILFGVPGAFTPTCSMSHVPGFIGKAEELKSKGIDEIICFSVNDPFVMKAWGKTYQENKHVKFVADGSGEYTHLLGLELDLKDKGLGIRSRRFALLLDNLKVTVANVENGGEFTVSSAEDILKAL

SEQ ID NO: 90258 - protein, 162 aa, Arabidopsis thaliana
  peptide (1)..(162): Ceres Seq. ID no. 12723285
  misc_feature (6)..(160): Pfam Name: AhpC/TSA family Pfam Description: AhpC/TSA family
  misc_feature (1)..(162): Homolog of NCBI NO: 18406870 NR Description: peroxiredoxin, putative; protein id: At1g60740.1,
  misc_feature (1)..(162): Homolog of NCBI NO: 15218876 NR Description: type 2 peroxiredoxin, putative; protein id: supported by cDNA: 10862., supported by cDNA: gi_12083333, by cDNA: gi_4704731 [Arabidopsis thaliana]
  misc_feature (1)..(162): Homolog of NCBI NO: 21553913 NR Description: peroxiredoxin, putative [Arabidopsis thaliana]
  misc_feature (1)..(162): Homolog of NCBI NO: 4704732 NR Description: peroxiredoxin TPx2 [Arabidopsis thaliana]
  misc_feature (1)..(162): Homolog of NCBI NO: 15218877 NR Description: type 2 peroxiredoxin, putative; protein id: supported by cDNA: 5476., supported by cDNA: gi_12083335,
  misc_feature (1)..(162): Homolog of NCBI NO: 4928472 NR Description: type 2 peroxiredoxin [Brassica rapa subsp.
  misc_feature (1)..(162): Homolog of NCBI NO: 21593881 NR Description: type 2 peroxiredoxin, putative [Arabidopsis
  misc_feature (1)..(162): Homolog of NCBI NO: 3913633 NR Description: Hypothetical protein At1g60740
  misc_feature (1)..(162): Homolog of NCBI NO: 30841938 NR Description: thioredoxin peroxidase 1 [Lycopersicon esculentum]
  misc_feature (1)..(162): Homolog of NCBI NO: 18654477 NR Description: thioredoxin peroxidase [Capsicum annuum]
MAPITVGDVVPDGTISFFDENDQLQTVSVHSIAAGKKVILFGVPGAFTPTCSMSHVPGFIGKAEELKSKGIDEIICFSVNDPFVMKAWGKTYQENKHVKFVADGSGEYTHLLGLELDLKDKGLGIRSRRFALLLDNLKVTVANVENGGEFTVSSAEDILKAL

SEQ ID NO: 90259 - protein, 110 aa, Arabidopsis thaliana
  peptide (1)..(110): Ceres Seq. ID no. 12723286
  misc_feature (1)..(108): Pfam Name: AhpC/TSA family Pfam Description: AhpC/TSA family
  misc_feature (1)..(110): Homolog of NCBI NO: 18406870 NR Description: peroxiredoxin, putative; protein id: At1g60740.1,
  misc_feature (1)..(110): Homolog of NCBI NO: 15218876 NR Description: type 2 peroxiredoxin, putative; protein id: supported by cDNA: 10862., supported by cDNA: gi_12083333, by cDNA: gi_4704731 [Arabidopsis thaliana]
  misc_feature (1)..(110): Homolog of NCBI NO: 21553913 NR Description: peroxiredoxin, putative [Arabidopsis thaliana]
  misc_feature (1)..(110): Homolog of NCBI NO: 4704732 NR Description: peroxiredoxin TPx2 [Arabidopsis thaliana]
  misc_feature (1)..(110): Homolog of NCBI NO: 15218877 NR Description: type 2 peroxiredoxin, putative; protein id: supported by cDNA: 5476., supported by cDNA: gi_12083335,
  misc_feature (1)..(110): Homolog of NCBI NO: 4928472 NR Description: type 2 peroxiredoxin [Brassica rapa subsp.
  misc_feature (1)..(110): Homolog of NCBI NO: 21593881 NR Description: type 2 peroxiredoxin, putative [Arabidopsis
  misc_feature (1)..(110): Homolog of NCBI NO: 3913633 NR Description: Hypothetical protein At1g60740
  misc_feature (1)..(110): Homolog of NCBI NO: 30841938 NR Description: thioredoxin peroxidase 1 [Lycopersicon esculentum]
  misc_feature (1)..(110): Homolog of NCBI NO: 18654477 NR Description: thioredoxin peroxidase [Capsicum annuum]
MSHVPGFIGKAEELKSKGIDEIICFSVNDPFVMKAWGKTYQENKHVKFVADGSGEYTHLLGLELDLKDKGLGIRSRRFALLLDNLKVTVANVENGGEFTVSSAEDILKAL

SEQ ID NO: 90260 - DNA, 993 bp, Arabidopsis thaliana
  misc_feature (1)..(993): Ceres Seq. ID no. 12723287
  misc_feature: MA Experiment ID: 20000182 Result: Up-regulated in Transcription
  misc_feature: MA Experiment 20000182 PARAMETER Experiment Name: At_2mM_SA_P Parameter: Age (day) Value: 14
  misc_feature: MA Experiment 20000182 PARAMETER Experiment Name: At_2mM_SA_P Parameter: Organism Value: A. thaliana
  misc_feature: MA Experiment 20000182 PARAMETER Experiment Name: At_2mM_SA_P Parameter: Plant Line Value: WS
  misc_feature: MA Experiment 20000182 PARAMETER Experiment Name: At_2mM_SA_P Parameter: Timepoint (hr) Value: 6
  misc_feature: MA Experiment 20000182 PARAMETER Experiment Name: At_2mM_SA_P Parameter: Tissue Value: Aerial
  misc_feature: MA Experiment 20000182 PARAMETER Experiment Name: At_2mM_SA_P Parameter: Treatment Value: 2mM SA vs. No Treatment
  misc_feature: MA Experiment ID: 20000185 Result: Up-regulated in Transcription
  misc_feature: MA Experiment 20000185 PARAMETER Experiment Name: At_Roots__P Parameter: Age (day) Value: 7 vs. 21
  misc_feature: MA Experiment 20000185 PARAMETER Experiment Name: At_Roots__P Parameter: Organism Value: A. thaliana
  misc_feature: MA Experiment 20000185 PARAMETER Experiment Name: At_Roots__P Parameter: Tissue Value: Roots vs. Whole Plant
  misc_feature: MA Experiment ID: 20000451 Result: Down-regulated in Transcription
  misc_feature: MA Experiment 20000451 PARAMETER Experiment Name: At_CS6879_Shoots-Roots_P Parameter: Age (day) Value: 14
  misc_feature: MA Experiment 20000451 PARAMETER Experiment Name: At_CS6879_Shoots-Roots_P Parameter: Organism Value: A. thaliana
  misc_feature: MA Experiment 20000451 PARAMETER Experiment Name: At_CS6879_Shoots-Roots_P Parameter: Plant Line Value: CS6879 vs. WS
  misc_feature: MA Experiment 20000451 PARAMETER Experiment Name: At_CS6879_Shoots-Roots_P Parameter: Tissue Value: Roots
  misc_feature: MA Experiment ID: 20000460 Result: Down-regulated in Transcription
  misc_feature: MA Experiment 20000460 PARAMETER Experiment Name: At_10percent_PEG_P Parameter: Age (day) Value: 12
  misc_feature: MA Experiment 20000460 PARAMETER Experiment Name: At_10percent_PEG_P Parameter: Organism Value: A. thaliana
  misc_feature: MA Experiment 20000460 PARAMETER Experiment Name: At_10percent_PEG_P Parameter: Plant Line Value: WS
  misc_feature: MA Experiment 20000460 PARAMETER Experiment Name: At_10percent_PEG_P Parameter: Timepoint (day) Value: 12
  misc_feature: MA Experiment 20000460 PARAMETER Experiment Name: At_10percent_PEG_P Parameter: Tissue Value: Whole Plant
  misc_feature: MA Experiment 20000460 PARAMETER Experiment Name: At_10percent_PEG_P Parameter: Treatment Value: 10percent PEG vs. No Treatment
  misc_feature: MA Experiment ID: 20000709 Result: Up-regulated in Transcription
  misc_feature: MA Experiment 20000709 PARAMETER Experiment Name: At_15mM_NH4NO3_L-to-H_P Parameter: Age (hr) Value: 14
  misc_feature: MA Experiment 20000709 PARAMETER Experiment Name: At_15mM_NH4NO3_L-to-H_P Parameter: Organism Value: A. thaliana
  misc_feature: MA Experiment 20000709 PARAMETER Experiment Name: At_15mM_NH4NO3_L-to-H_P Parameter: Plant Line Value: WS
  misc_feature: MA Experiment 20000709 PARAMETER Experiment Name: At_15mM_NH4NO3_L-to-H_P Parameter: Timepoint (hr) Value: 4
  misc_feature: MA Experiment 20000709 PARAMETER Experiment Name: At_15mM_NH4NO3_L-to-H_P Parameter: Tissue Value: Aerial
  misc_feature: MA Experiment 20000709 PARAMETER Experiment Name: At_15mM_NH4NO3_L-to-H_P Parameter: Treatment Value: 15mM NH4NO3 vs. 30mM Mannitol
atggcagaggaagcttgtcaagtgcgtaggatgaagttagggagtcaaggtcttgaggtttcggctcagggacttggctgcatgggtctctccgacttttacggtgctccgacacctgagactaacgccgtcgctctcctccgtcacgccatcaacgctggggtcacatttctcgatacctccgacatctacggtcccgagacaaacgagctgcttcttggaaaggctttgaaagatggtttgagagataaagtggaattagcgacaaagtttgggatcactgcttctgaagatggaaaatttggtttcaggggagatccagagtatgtaaggattgcttgtgaagcaagcttaaagcgtcttggtgtaacctgcattgatctttattaccagcatcgaattgataccactctgcccatcgaaatcacgattggagagctgaagaagctagttgaagaaggcaaaataaagtacatcggtttgtcagaagcttcggcttcaactataagaagagcacatgctgttcacccgataaccgctgtgcaaatagaatggtccttatggtcgagagacgtggaagaagatatcattccaacctgcagggaacttgggattggaattgtagcttatagccctctaggaagaggcttcttaggtttaccaagattccaacaggagaatctagaaaacaacaagattctctacgagaaagtccaagcgatggcgacaaagaaaagttgcactcctgcacaactagctctagcgtgggttcaccatcaaggagatgatgtatgtccaattccaggaacctccaagatccaaaacctcaaccaaaacattggagctttatccgtgaagctcactcctgaagagatggttgagcttgaagccattgctcaaccggatttcgtgaaaggtgaacggtatgacaacaacatggttacttacaaagactcagagactccaccattgtcttcttggaaagcaagataa

SEQ ID NO: 90261 - protein, 330 aa, Arabidopsis thaliana
  peptide (1)..(330): Ceres Seq. ID no. 12723288
  misc_feature (1)..(330): Homolog of NCBI NO: 15219805 NR Description: auxin-induced protein, putative; protein id:
  misc_feature (1)..(201): Homolog of NCBI NO: 25316211 NR Description: hypothetical protein F8A5.26 [imported] -
  misc_feature (219)..(330): Homolog of NCBI NO: 25316211 NR Description: hypothetical protein F8A5.26 [imported] -
  misc_feature (4)..(233): Homolog of NCBI NO: 30696459 NR Description: aldo/keto reductase family [Arabidopsis thaliana] At1g60730/F8A5_24 [Arabidopsis thaliana]
  misc_feature (220)..(329): Homolog of NCBI NO: 30696459 NR Description: aldo/keto reductase family [Arabidopsis thaliana] At1g60730/F8A5_24 [Arabidopsis thaliana]
  misc_feature (4)..(231): Homolog of NCBI NO: 18406861 NR Description: auxin-induced protein, putative; protein id: supported by cDNA: gi_15912324, supported by cDNA: gi_20466377, by cDNA: gi_6562979 [Arabidopsis thaliana]
  misc_feature (220)..(329): Homolog of NCBI NO: 18406861 NR Description: auxin-induced protein, putative; protein id: supported by cDNA: gi_15912324, supported by cDNA: gi_20466377, by cDNA: gi_6562979 [Arabidopsis thaliana]
  misc_feature (4)..(231): Homolog of NCBI NO: 6562980 NR Description: auxin-induced atb2 [Arabidopsis thaliana]
  misc_feature (220)..(329): Homolog of NCBI NO: 6562980 NR Description: auxin-induced atb2 [Arabidopsis thaliana]
  misc_feature (4)..(329): Homolog of NCBI NO: 25316216 NR Description: hypothetical protein F8A5.24 [imported] -
MAEEACQVRRMKLGSQGLEVSAQGLGCMGLSDFYGAPTPETNAVALLRHAINAGVTFLDTSDIYGPETNELLLGKALKDGLRDKVELATKFGITASEDGKFGFRGDPEYVRIACEASLKRLGVTCIDLYYQHRIDTTLPIEITIGELKKLVEEGKIKYIGLSEASASTIRRAHAVHPITAVQIEWSLWSRDVEEDIIPTCRELGIGIVAYSPLGRGFLGLPRFQQENLENNKILYEKVQAMATKKSCTPAQLALAWVHHQGDDVCPIPGTSKIQNLNQNIGALSVKLTPEEMVELEAIAQPDFVKGERYDNNMVTYKDSETPPLSSWKAR

SEQ ID NO: 90262 - protein, 320 aa, Arabidopsis thaliana
  peptide (1)..(320): Ceres Seq. ID no. 12723289
  misc_feature (1)..(320): Homolog of NCBI NO: 15219805 NR Description: auxin-induced protein, putative; protein id:
  misc_feature (1)..(191): Homolog of NCBI NO: 25316211 NR Description: hypothetical protein F8A5.26 [imported] -
  misc_feature (209)..(320): Homolog of NCBI NO: 25316211 NR Description: hypothetical protein F8A5.26 [imported] -
  misc_feature (1)..(223): Homolog of NCBI NO: 30696459 NR Description: aldo/keto reductase family [Arabidopsis thaliana] At1g60730/F8A5_24 [Arabidopsis thaliana]
  misc_feature (210)..(319): Homolog of NCBI NO: 30696459 NR Description: aldo/keto reductase family [Arabidopsis thaliana] At1g60730/F8A5_24 [Arabidopsis thaliana]
  misc_feature (1)..(221): Homolog of NCBI NO: 18406861 NR Description: auxin-induced protein, putative; protein id: supported by cDNA: gi_15912324, supported by cDNA: gi_20466377, by cDNA: gi_6562979 [Arabidopsis thaliana]
  misc_feature (210)..(319): Homolog of NCBI NO: 18406861 NR Description: auxin-induced protein, putative; protein id: supported by cDNA: gi_15912324, supported by cDNA: gi_20466377, by cDNA: gi_6562979 [Arabidopsis thaliana]
  misc_feature (1)..(221): Homolog of NCBI NO: 6562980 NR Description: auxin-induced atb2 [Arabidopsis thaliana]
  misc_feature (210)..(319): Homolog of NCBI NO: 6562980 NR Description: auxin-induced atb2 [Arabidopsis thaliana]
  misc_feature (1)..(319): Homolog of NCBI NO: 25316216 NR Description: hypothetical protein F8A5.24 [imported] -
MKLGSQGLEVSAQGLGCMGLSDFYGAPTPETNAVALLRHAINAGVTFLDTSDIYGPETNELLLGKALKDGLRDKVELATKFGITASEDGKFGFRGDPEYVRIACEASLKRLGVTCIDLYYQHRIDTTLPIEITIGELKKLVEEGKIKYIGLSEASASTIRRAHAVHPITAVQIEWSLWSRDVEEDIIPTCRELGIGIVAYSPLGRGFLGLPRFQQENLENNKILYEKVQAMATKKSCTPAQLALAWVHHQGDDVCPIPGTSKIQNLNQNIGALSVKLTPEEMVELEAIAQPDFVKGERYDNNMVTYKDSETPPLSSWKAR

SEQ ID NO: 90263 - protein, 303 aa, Arabidopsis thaliana
  peptide (1)..(303): Ceres Seq. ID no. 12723290
  misc_feature (1)..(303): Homolog of NCBI NO: 15219805 NR Description: auxin-induced protein, putative; protein id:
  misc_feature (1)..(174): Homolog of NCBI NO: 25316211 NR Description: hypothetical protein F8A5.26 [imported] -
  misc_feature (192)..(303): Homolog of NCBI NO: 25316211 NR Description: hypothetical protein F8A5.26 [imported] -
  misc_feature (1)..(206): Homolog of NCBI NO: 30696459 NR Description: aldo/keto reductase family [Arabidopsis thaliana] At1g60730/F8A5_24 [Arabidopsis thaliana]
  misc_feature (193)..(302): Homolog of NCBI NO: 30696459 NR Description: aldo/keto reductase family [Arabidopsis thaliana] At1g60730/F8A5_24 [Arabidopsis thaliana]
  misc_feature (1)..(204): Homolog of NCBI NO: 18406861 NR Description: auxin-induced protein, putative; protein id: supported by cDNA: gi_15912324, supported by cDNA: gi_20466377, by cDNA: gi_6562979 [Arabidopsis thaliana]
  misc_feature (193)..(302): Homolog of NCBI NO: 18406861 NR Description: auxin-induced protein, putative; protein id: supported by cDNA: gi_15912324, supported by cDNA: gi_20466377, by cDNA: gi_6562979 [Arabidopsis thaliana]
  misc_feature (1)..(204): Homolog of NCBI NO: 6562980 NR Description: auxin-induced atb2 [Arabidopsis thaliana]
  misc_feature (193)..(302): Homolog of NCBI NO: 6562980 NR Description: auxin-induced atb2 [Arabidopsis thaliana]
  misc_feature (1)..(302): Homolog of NCBI NO: 25316216 NR Description: hypothetical protein F8A5.24 [imported] -
MGLSDFYGAPTPETNAVALLRHAINAGVTFLDTSDIYGPETNELLLGKALKDGLRDKVELATKFGITASEDGKFGFRGDPEYVRIACEASLKRLGVTCIDLYYQHRIDTTLPIEITIGELKKLVEEGKIKYIGLSEASASTIRRAHAVHPITAVQIEWSLWSRDVEEDIIPTCRELGIGIVAYSPLGRGFLGLPRFQQENLENNKILYEKVQAMATKKSCTPAQLALAWVHHQGDDVCPIPGTSKIQNLNQNIGALSVKLTPEEMVELEAIAQPDFVKGERYDNNMVTYKDSETPPLSSWKAR

SEQ ID NO: 90264 - DNA, 1689 bp, Arabidopsis thaliana
  misc_feature (1)..(1689): Ceres Seq. ID no. 12723294
  misc_feature: MA Experiment ID: 20000306 Result: Up-regulated in Transcription
  misc_feature: MA Experiment 20000306 PARAMETER Experiment Name: At_Germinating_Seeds_Sub_P Parameter: Age (hr) Value: 6 vs. 0
  misc_feature: MA Experiment 20000306 PARAMETER Experiment Name: At_Germinating_Seeds_Sub_P Parameter: Organism Value: A. thaliana
  misc_feature: MA Experiment 20000306 PARAMETER Experiment Name: At_Germinating_Seeds_Sub_P Parameter: Plant Line Value: WS
  misc_feature: MA Experiment 20000306 PARAMETER Experiment Name: At_Germinating_Seeds_Sub_P Parameter: Tissue Value: Germinating Seeds
  misc_feature: MA Experiment ID: 20000315 Result: Down-regulated in Transcription
  misc_feature: MA Experiment 20000315 PARAMETER Experiment Name: At_14day_Shoots-Roots_Sub_P Parameter: Age (day) Value: 14
  misc_feature: MA Experiment 20000315 PARAMETER Experiment Name: At_14day_Shoots-Roots_Sub_P Parameter: Organism Value: A. thaliana
  misc_feature: MA Experiment 20000315 PARAMETER Experiment Name: At_14day_Shoots-Roots_Sub_P Parameter: Plant Line Value: WS
  misc_feature: MA Experiment 20000315 PARAMETER Experiment Name: At_14day_Shoots-Roots_Sub_P Parameter: Tissue Value: Shoots vs. Whole Plant
  misc_feature: MA Experiment ID: 20000328 Result: Down-regulated in Transcription
  misc_feature: MA Experiment 20000328 PARAMETER Experiment Name: At_42deg_Heat_Sub_P Parameter: Age (day) Value: 14
  misc_feature: MA Experiment 20000328 PARAMETER Experiment Name: At_42deg_Heat_Sub_P Parameter: Organism Value: A. thaliana
  misc_feature: MA Experiment 20000328 PARAMETER Experiment Name: At_42deg_Heat_Sub_P Parameter: Plant Line Value: WS
  misc_feature: MA Experiment 20000328 PARAMETER Experiment Name: At_42deg_Heat_Sub_P Parameter: Temperature (deg C) Value: 42 vs. 22
  misc_feature: MA Experiment 20000328 PARAMETER Experiment Name: At_42deg_Heat_Sub_P Parameter: Timepoint (hr) Value: 6
  misc_feature: MA Experiment 20000328 PARAMETER Experiment Name: At_42deg_Heat_Sub_P Parameter: Tissue Value: Aerial
aaggatcgataacgaaatcatcagatcgccagaaaaaaaaaaaaaattgcgaaatggagaatctgagctgcagatctgcgtcaatctccatctagatgttgttgctacttcttcctctatagaaccataatttcatcagatctcgctgattaatcatccccatttggatctgatcgaaactcttagggaagaacatggcaggagctgcctccgcgctgtttctgcttgatatcaagggacgcgttctcgtctggcgtgattatcgtggcgatgtctccgctgctcaagccgagcgattcttcactaagctcatcgagaaagagggtgattcacagtcaaatgatccagttgcttacgataatggggtgacttatatgtttgtacaacatagtaatgtatacttgatgatagcatccaggcagaattgtaatgctgccagtcttctcttctttcttcaccgcgttgtcgatgttttcaagcattacttcgaggagttagaagaggaatcattgagggataactttgtggtagtgtatgagctacttgacgagatgatggactttggttaccctcagtataccgaagcaagaattctcagtgaattcatcaagactgatgcatatagaatggaagttacacagagacctccaatggctgtgacgaatgctgtctcctggaggagtgagggaatacagtacaagaagaatgaagttttcttggatgttattgagaatgtaaatattcttgtcaacagtaatgggcaaattgtcaggtctgatgttgttggagcgctgaagatgcgaacttacttgactggaatgccagagtgtaagttaggactgaatgatagagtattgctggaagcgcagggacgagcaactaagggaaaagccattgatttggaggacatcaaatttcatcagtgtgttcgattggcccgttttgaaaacgataggacgatatctttcataccacctgatggggcttttgatctgatgacatatagactcagcactcaggtaaagccacttatatgggtggaagcacaaatagaaagtcattcaagaagtcgtgttgagatgctcataaaagctagaagtcagttcaaggaacgaagcaccgcaacgaacgttgagattgagttgcctgtaccaaccgatgcatctaaccccaccgttaggacatctctagggtctgcctcttatgctcctgaaaaagatgcgttagtctggaaaatcaaatctttcccggggaacaaggagtacatgttaagggcagagttccatcttccaagtatcactgcagaggaagcaactcctgagcgaaaggctcctatccgtgtcaaatttgagatcccttatttcactgtttcagggattcaggttcggtacctaaagattattgagaagagtgggtaccaagcacttccatgggtgagatacataaccatggctggtgagtacgaactaagactcgtgtaatgcacatttagtttcatcgtctatgtcaattgtgattcccacatccctcaaggaattgcctgaatcaaagaagcaaaacgaaacaggacaaaagtagagggaaaagaaaacgttttgaaacattttagctgatcaaattttcctttaatttgttttagaagccatattcttgtgaatttgtctttatggtgattctattttattttac

SEQ ID NO: 90265 - protein, 428 aa, Arabidopsis thaliana
  peptide (1)..(428): Ceres Seq. ID no. 12723295
  misc_feature (8)..(427): Pfam Name: Adaptor complexes medium subunit family Pfam Description: Adaptor complexes medium subunit family
  misc_feature (1)..(428): Homolog of NCBI NO: 15219810 NR Description: clathrin adaptor medium chain protein MU1B, protein id: At1g60780.1, supported by cDNA: gi_20466371 thaliana] >gi|25320049|pir||C96633 probable Serine/Threonine
  misc_feature (1)..(428): Homolog of NCBI NO: 15220202 NR Description: putative clathrin-coat assembly protein; protein At1g10730.1 [Arabidopsis thaliana] >gi|25320047|pir||G86240
  misc_feature (1)..(428): Homolog of NCBI NO: 34910334 NR Description: putative clathrin-associated protein [Oryza
  misc_feature (111)..(428): Homolog of NCBI NO: 6573741 NR Description: F20B24.16 [Arabidopsis thaliana]
  misc_feature (1)..(92): Homolog of NCBI NO: 6573741 NR Description: F20B24.16 [Arabidopsis thaliana]
  misc_feature (5)..(427): Homolog of NCBI NO: 28949965 NR Description: probable clathrin assembly protein AP47
  misc_feature (4)..(426): Homolog of NCBI NO: 14210504 NR Description: adaptor-related protein complex 1, mu 1 subunit; assembly protein complex 1, medium chain; clathrin coat assembly
  misc_feature (4)..(427): Homolog of NCBI NO: 17508211 NR Description: UNCoordinated locomotion UNC-101,
  misc_feature (4)..(426): Homolog of NCBI NO: 6671557 NR Description: adaptor-related protein complex AP-1, mu subunit
  misc_feature (4)..(427): Homolog of NCBI NO: 1078840 NR Description: clathrin-associated protein unc-101 -
MAGAASALFLLDIKGRVLVWRDYRGDVSAAQAERFFTKLIEKEGDSQSNDPVAYDNGVTYMFVQHSNVYLMIASRQNCNAASLLFFLHRVVDVFKHYFEELEEESLRDNFVVVYELLDEMMDFGYPQYTEARILSEFIKTDAYRMEVTQRPPMAVTNAVSWRSEGIQYKKNEVFLDVIENVNILVNSNGQIVRSDVVGALKMRTYLTGMPECKLGLNDRVLLEAQGRATKGKAIDLEDIKFHQCVRLARFENDRTISFIPPDGAFDLMTYRLSTQVKPLIWVEAQIESHSRSRVEMLIKARSQFKERSTATNVEIELPVPTDASNPTVRTSLGSASYAPEKDALVWKIKSFPGNKEYMLRAEFHLPSITAEEATPERKAPIRVKFEIPYFTVSGIQVRYLKIIEKSGYQALPWVRYITMAGEYELRLV

SEQ ID NO: 90266 - protein, 368 aa, Arabidopsis thaliana
  peptide (1)..(368): Ceres Seq. ID no. 12723296
  misc_feature (1)..(367): Pfam Name: Adaptor complexes medium subunit family Pfam Description: Adaptor complexes medium subunit family
  misc_feature (1)..(368): Homolog of NCBI NO: 15219810 NR Description: clathrin adaptor medium chain protein MU1B, protein id: At1g60780.1, supported by cDNA: gi_20466371 thaliana] >gi|25320049|pir||C96633 probable Serine/Threonine
  misc_feature (1)..(368): Homolog of NCBI NO: 15220202 NR Description: putative clathrin-coat assembly protein; protein At1g10730.1 [Arabidopsis thaliana] >gi|25320047|pir||G86240
  misc_feature (1)..(368): Homolog of NCBI NO: 34910334 NR Description: putative clathrin-associated protein [Oryza
  misc_feature (51)..(368): Homolog of NCBI NO: 6573741 NR Description: F20B24.16 [Arabidopsis thaliana]
  misc_feature (1)..(32): Homolog of NCBI NO: 6573741 NR Description: F20B24.16 [Arabidopsis thaliana]
  misc_feature (1)..(367): Homolog of NCBI NO: 28949965 NR Description: probable clathrin assembly protein AP47
  misc_feature (1)..(366): Homolog of NCBI NO: 14210504 NR Description: adaptor-related protein complex 1, mu 1 subunit; assembly protein complex 1, medium chain; clathrin coat assembly
  misc_feature (1)..(367): Homolog of NCBI NO: 17508211 NR Description: UNCoordinated locomotion UNC-101,
  misc_feature (1)..(366): Homolog of NCBI NO: 6671557 NR Description: adaptor-related protein complex AP-1, mu subunit
  misc_feature (1)..(367): Homolog of NCBI NO: 1078840 NR Description: clathrin-associated protein unc-101 -
MFVQHSNVYLMIASRQNCNAASLLFFLHRVVDVFKHYFEELEEESLRDNFVVVYELLDEMMDFGYPQYTEARILSEFIKTDAYRMEVTQRPPMAVTNAVSWRSEGIQYKKNEVFLDVIENVNILVNSNGQIVRSDVVGALKMRTYLTGMPECKLGLNDRVLLEAQGRATKGKAIDLEDIKFHQCVRLARFENDRTISFIPPDGAFDLMTYRLSTQVKPLIWVEAQIESHSRSRVEMLIKARSQFKERSTATNVEIELPVPTDASNPTVRTSLGSASYAPEKDALVWKIKSFPGNKEYMLRAEFHLPSITAEEATPERKAPIRVKFEIPYFTVSGIQVRYLKIIEKSGYQALPWVRYITMAGEYELRLV

SEQ ID NO: 90267 - protein, 358 aa, Arabidopsis thaliana
  peptide (1)..(358): Ceres Seq. ID no. 12723297
  misc_feature (1)..(357): Pfam Name: Adaptor complexes medium subunit family Pfam Description: Adaptor complexes medium subunit family
  misc_feature (1)..(358): Homolog of NCBI NO: 15219810 NR Description: clathrin adaptor medium chain protein MU1B, protein id: At1g60780.1, supported by cDNA: gi_20466371 thaliana] >gi|25320049|pir||C96633 probable Serine/Threonine
  misc_feature (1)..(358): Homolog of NCBI NO: 15220202 NR Description: putative clathrin-coat assembly protein; protein At1g10730.1 [Arabidopsis thaliana] >gi|25320047|pir||G86240
  misc_feature (1)..(358): Homolog of NCBI NO: 34910334 NR Description: putative clathrin-associated protein [Oryza
  misc_feature (41)..(358): Homolog of NCBI NO: 6573741 NR Description: F20B24.16 [Arabidopsis thaliana]
  misc_feature (1)..(22): Homolog of NCBI NO: 6573741 NR Description: F20B24.16 [Arabidopsis thaliana]
  misc_feature (1)..(357): Homolog of NCBI NO: 28949965 NR Description: probable clathrin assembly protein AP47
  misc_feature (1)..(356): Homolog of NCBI NO: 14210504 NR Description: adaptor-related protein complex 1, mu 1 subunit; assembly protein complex 1, medium chain; clathrin coat assembly
  misc_feature (1)..(357): Homolog of NCBI NO: 17508211 NR Description: UNCoordinated locomotion UNC-101,
  misc_feature (1)..(356): Homolog of NCBI NO: 6671557 NR Description: adaptor-related protein complex AP-1, mu subunit
  misc_feature (1)..(357): Homolog of NCBI NO: 1078840 NR Description: clathrin-associated protein unc-101 -
MIASRQNCNAASLLFFLHRVVDVFKHYFEELEEESLRDNFVVVYELLDEMMDFGYPQYTEARILSEFIKTDAYRMEVTQRPPMAVTNAVSWRSEGIQYKKNEVFLDVIENVNILVNSNGQIVRSDVVGALKMRTYLTGMPECKLGLNDRVLLEAQGRATKGKAIDLEDIKFHQCVRLARFENDRTISFIPPDGAFDLMTYRLSTQVKPLIWVEAQIESHSRSRVEMLIKARSQFKERSTATNVEIELPVPTDASNPTVRTSLGSASYAPEKDALVWKIKSFPGNKEYMLRAEFHLPSITAEEATPERKAPIRVKFEIPYFTVSGIQVRYLKIIEKSGYQALPWVRYITMAGEYELRLV

SEQ ID NO: 90268 - DNA, 2566 bp, Arabidopsis thaliana
  misc_feature (1)..(2566): Ceres Seq. ID no. 12723302
  misc_feature: MA Experiment ID: 20000180 Result: Up-regulated in Transcription
  misc_feature: MA Experiment 20000180 PARAMETER Experiment Name: At_Germinating_Seeds_P Parameter: Age (hr) Value: 24 vs. 0
  misc_feature: MA Experiment 20000180 PARAMETER Experiment Name: At_Germinating_Seeds_P Parameter: Tissue Value: Germinating Seeds
  misc_feature: MA Experiment ID: 20000437 Result: Down-regulated in Transcription
  misc_feature: MA Experiment 20000437 PARAMETER Experiment Name: At_Drought_P Parameter: Age (day) Value: 8
  misc_feature: MA Experiment 20000437 PARAMETER Experiment Name: At_Drought_P Parameter: Organism Value: A. thaliana
  misc_feature: MA Experiment 20000437 PARAMETER Experiment Name: At_Drought_P Parameter: Plant Line Value: WS
  misc_feature: MA Experiment 20000437 PARAMETER Experiment Name: At_Drought_P Parameter: Timepoint (hr) Value: 24
  misc_feature: MA Experiment 20000437 PARAMETER Experiment Name: At_Drought_P Parameter: Tissue Value: Whole Plant
  misc_feature: MA Experiment 20000437 PARAMETER Experiment Name: At_Drought_P Parameter: Treatment Value: Drought vs. No Drought
  misc_feature: MA Experiment ID: 20000438 Result: Up-regulated in Transcription
  misc_feature: MA Experiment 20000438 PARAMETER Experiment Name: At_Shoots__P Parameter: Age (day) Value: 14
  misc_feature: MA Experiment 20000438 PARAMETER Experiment Name: At_Shoots__P Parameter: Tissue Value: Shoots vs. Whole Plant
  misc_feature: MA Experiment ID: 20001248 Result: Down-regulated in Transcription
  misc_feature: MA Experiment 20001248 PARAMETER Experiment Name: At_Far-red-induction_P Parameter: Age (day) Value: 7
  misc_feature: MA Experiment 20001248 PARAMETER Experiment Name: At_Far-red-induction_P Parameter: Light Value: Far-red vs. White
  misc_feature: MA Experiment 20001248 PARAMETER Experiment Name: At_Far-red-induction_P Parameter: Organism Value: A. thaliana
  misc_feature: MA Experiment 20001248 PARAMETER Experiment Name: At_Far-red-induction_P Parameter: Plant Line Value: Columbia
  misc_feature: MA Experiment 20001248 PARAMETER Experiment Name: At_Far-red-induction_P Parameter: Timepoint (hr) Value: 4
  misc_feature: MA Experiment 20001248 PARAMETER Experiment Name: At_Far-red-induction_P Parameter: Tissue Value: Whole Plant
  misc_feature: MA Experiment ID: 20001757 Result: Up-regulated in Transcription
  misc_feature: MA Experiment 20001757 PARAMETER Experiment Name: At_50mM_NH4NO3_L-to-H_P Parameter: Timepoint (hr) Value: 6
  misc_feature: MA Experiment 20001757 PARAMETER Experiment Name: At_50mM_NH4NO3_L-to-H_P Parameter: Tissue Value: Leaf
  misc_feature: MA Experiment 20001757 PARAMETER Experiment Name: At_50mM_NH4NO3_L-to-H_P Parameter: Treatment Value: 50mM NH4NO3 vs 100mM Mannitol
  misc_feature: MA Experiment ID: 20001904 Result: Down-regulated in Transcription
  misc_feature: MA Experiment 20001904 PARAMETER Experiment Name: At_Drought_Reproduction_P Parameter: Age (day) Value: 37
  misc_feature: MA Experiment 20001904 PARAMETER Experiment Name: At_Drought_Reproduction_P Parameter: Organism Value: A. thaliana
  misc_feature: MA Experiment 20001904 PARAMETER Experiment Name: At_Drought_Reproduction_P Parameter: Plant Line Value: WS
  misc_feature: MA Experiment 20001904 PARAMETER Experiment Name: At_Drought_Reproduction_P Parameter: Timepoint (day) Value: 7
  misc_feature: MA Experiment 20001904 PARAMETER Experiment Name: At_Drought_Reproduction_P Parameter: Tissue Value: Rosettes
  misc_feature: MA Experiment 20001904 PARAMETER Experiment Name: At_Drought_Reproduction_P Parameter: Treatment Value: Drought vs. No Drought
  misc_feature: MA Experiment ID: 20001905 Result: Down-regulated in Transcription
  misc_feature: MA Experiment 20001905 PARAMETER Experiment Name: At_Drought_Reproduction_P Parameter: Age (day) Value: 40
  misc_feature: MA Experiment 20001905 PARAMETER Experiment Name: At_Drought_Reproduction_P Parameter: Organism Value: A. thaliana
  misc_feature: MA Experiment 20001905 PARAMETER Experiment Name: At_Drought_Reproduction_P Parameter: Plant Line Value: WS
  misc_feature: MA Experiment 20001905 PARAMETER Experiment Name: At_Drought_Reproduction_P Parameter: Timepoint (day) Value: 10
  misc_feature: MA Experiment 20001905 PARAMETER Experiment Name: At_Drought_Reproduction_P Parameter: Tissue Value: Rosettes
  misc_feature: MA Experiment 20001905 PARAMETER Experiment Name: At_Drought_Reproduction_P Parameter: Treatment Value: Drought vs. No Drought
  misc_feature: MA Experiment ID: 20001906 Result: Down-regulated in Transcription
  misc_feature: MA Experiment 20001906 PARAMETER Experiment Name: At_Drought_Reproduction_P Parameter: Age (day) Value: 35
  misc_feature: MA Experiment 20001906 PARAMETER Experiment Name: At_Drought_Reproduction_P Parameter: Organism Value: A. thaliana
  misc_feature: MA Experiment 20001906 PARAMETER Experiment Name: At_Drought_Reproduction_P Parameter: Plant Line Value: WS
  misc_feature: MA Experiment 20001906 PARAMETER Experiment Name: At_Drought_Reproduction_P Parameter: Timepoint (day) Value: 5
  misc_feature: MA Experiment 20001906 PARAMETER Experiment Name: At_Drought_Reproduction_P Parameter: Tissue Value: Siliques
  misc_feature: MA Experiment 20001906 PARAMETER Experiment Name: At_Drought_Reproduction_P Parameter: Treatment Value: Drought vs. No Drought
  misc_feature: MA Experiment ID: 20001908 Result: Down-regulated in Transcription
  misc_feature: MA Experiment 20001908 PARAMETER Experiment Name: At_Drought_Reproduction_P Parameter: Age (day) Value: 40
  misc_feature: MA Experiment 20001908 PARAMETER Experiment Name: At_Drought_Reproduction_P Parameter: Organism Value: A. thaliana
  misc_feature: MA Experiment 20001908 PARAMETER Experiment Name: At_Drought_Reproduction_P Parameter: Plant Line Value: WS
  misc_feature: MA Experiment 20001908 PARAMETER Experiment Name: At_Drought_Reproduction_P Parameter: Timepoint (day) Value: 10
  misc_feature: MA Experiment 20001908 PARAMETER Experiment Name: At_Drought_Reproduction_P Parameter: Tissue Value: Siliques
  misc_feature: MA Experiment 20001908 PARAMETER Experiment Name: At_Drought_Reproduction_P Parameter: Treatment Value: Drought vs. No Drought
accaaagtcataaaaatgatataaaatataaaccaagaagcactattagtatcactcatcactcaatagctttttttttttcagatctctaggaaaatttctcagactttcagagcattttggtgcttttgttttgcttggtttctcgggaaaattctcttcacacttttagagttttctctctcttctctatctcttgtcacagctcgtttagcattcattctcttaatcgtttcttcattcaaaaattctctctttctaagctgagtaacttgcaagtcgtcatttttcaattggggtcttctcctttttacttcctttgaattgaaatcacagagaaagagaggttccattgctggaaaatggattgctcaaattagtttctgtgtctaaataaagacagagaagaagaaaagtagacaaaagctaagtttttttttcagatatgggagagagaaaaatgagttggtgggttctttgaaacttgtttttgttcagaccaaagttgattgctttaagaagggatatggaaggtgtgagatttgtggtgtggagattaggatttctggtttttgtatggttctttgatatctcttctgctacactttctcctactggtgtaaactatgaagtgacagctttggttgctgtgaagaatgaattgaatgatccgtacaaagttcttgagaattgggatgtgaattcagttgatccttgtagctggagaatggtttcttgcactgatggctatgtctcttcactggatcttcctagccaaagcttgtctggtacattgtctcctagaatcggaaacctcacctatttacaatcagtggtgttgcaaaacaatgcaatcactggtccaattccggaaacgattgggaggttggagaagcttcagtcacttgatctttcgaacaattcattcaccggggagataccggcctcacttggagaactcaagaacttgaattacttgcggttaaacaataacagtcttataggaacttgccctgagtctctatccaagattgagggactcactctagtcgacatttcgtataacaatcttagtggttcgctgccaaaagtttctgccagaactttcaaggtaattggtaatgcgttaatctgtggcccaaaagctgtttcaaactgttctgctgttcccgagcctctcacgcttccacaagatggtccagatgaatcaggaactcgtaccaatggccatcacgttgctcttgcatttgccgcaagcttcagtgcagcattttttgttttctttacaagcggaatgtttctttggtggagatatcgccgtaacaagcaaatattttttgacgttaatgaacaatatgatccagaagtgagtttagggcacttgaagaggtatacattcaaagagcttagatctgccaccaatcatttcaactcgaagaacattctcggaagaggcggatacgggattgtgtacaaaggacacttaaacgatggaactttggtggctgtcaaacgtctcaaggactgtaacattgcgggtggagaagtccagtttcagacagaagtagagactataagtttggctcttcatcgcaatctcctccggctccgcggtttctgtagtagcaaccaggagagaattttagtctacccttacatgccaaatgggagtgtcgcatcacgcttaaaagataatatccgtggagagccagcattagactggtcgagaaggaagaagatagcggttgggacagcgagaggactagtttacctacacgagcaatgtgacccgaagattatacaccgcgatgtgaaagcagctaacattctgttagatgaggacttcgaagcagttgttggtgattttgggttagctaagcttctagaccatagagactctcatgtcacaactgcagtccgtggaactgttggccacattgcacctgagtacttatccacgggtcagtcctcagagaagactgatgtctttggctttggcatacttctccttgagctcattactggtcagaaagctcttgattttggcagatccgcacaccagaaaggtgtaatgcttgactgggtgaagaagctgcaccaagaagggaaactaaagcagttaatagacaaagatctaaatgacaagttcgatagagtagaactcgaagaaatcgttcaagttgcgctactctgcactcaattcaatccatctcatcgaccgaaaatgtcagaagttatgaagatgcttgaaggtgacggtttggctgagagatgggaagcgacgcagaacggtactggtgagcatcagccaccgccattgccaccggggatggtgagttcttcgccgcgtgtgaggtattactcggattatattcaggaatcgtctcttgtagtagaagccattgagctctcgggtcctcgatgattatgactcactgtttttaaaaaatttcttttcttgggtttgttttttatttgtcgttttataatgttgatatagatgtgaagttgagtgtgtaatttttatgtaaagaaaaaatatgaaatgcaaaagaaaatgttgatt

SEQ ID NO: 90269 - protein, 632 aa, Arabidopsis thaliana
  peptide (1)..(632): Ceres Seq. ID no. 12723303
  misc_feature (124)..(632): Homolog of NCBI NO: 25404291 NR Description: probable Serine/Threonine protein kinase F8A5.31
  misc_feature (13)..(632): Homolog of NCBI NO: 22331326 NR Description: somatic embryogenesis receptor-like kinase, protein id: At3g25560.1, supported by cDNA: gi_19715614 thaliana] >gi|19715615|gb|AAL91629.1| AT3g25560/MWL2_18
  misc_feature (13)..(632): Homolog of NCBI NO: 9279736 NR Description: receptor-like kinase [Arabidopsis thaliana]
  misc_feature (11)..(632): Homolog of NCBI NO: 21593619 NR Description: receptor protein kinase-like protein [Arabidopsis
  misc_feature (11)..(632): Homolog of NCBI NO: 15237242 NR Description: receptor protein kinase-like protein; protein id:
  misc_feature (23)..(632): Homolog of NCBI NO: 11862956 NR Description: putative protein kinase [Oryza sativa (japonica
  misc_feature (19)..(588): Homolog of NCBI NO: 22329033 NR Description: receptor-like kinase homolog; protein id: supported by cDNA: gi_17979064, supported by cDNA: gi_20465456 thaliana] >gi|17979065|gb|AAL49800.1| putative receptor kinase
  misc_feature (200)..(569): Homolog of NCBI NO: 15528710 NR Description: putative receptor-like kinase [Oryza sativa
  misc_feature (23)..(81): Homolog of NCBI NO: 15528710 NR Description: putative receptor-like kinase [Oryza sativa
  misc_feature (75)..(588): Homolog of NCBI NO: 15224077 NR Description: putative LRR receptor protein kinase; protein id:
MEGVRFVVWRLGFLVFVWFFDISSATLSPTGVNYEVTALVAVKNELNDPYKVLENWDVNSVDPCSWRMVSCTDGYVSSLDLPSQSLSGTLSPRIGNLTYLQSVVLQNNAITGPIPETIGRLEKLQSLDLSNNSFTGEIPASLGELKNLNYLRLNNNSLIGTCPESLSKIEGLTLVDISYNNLSGSLPKVSARTFKVIGNALICGPKAVSNCSAVPEPLTLPQDGPDESGTRTNGHHVALAFAASFSAAFFVFFTSGMFLWWRYRRNKQIFFDVNEQYDPEVSLGHLKRYTFKELRSATNHFNSKNILGRGGYGIVYKGHLNDGTLVAVKRLKDCNIAGGEVQFQTEVETISLALHRNLLRLRGFCSSNQERILVYPYMPNGSVASRLKDNIRGEPALDWSRRKKIAVGTARGLVYLHEQCDPKIIHRDVKAANILLDEDFEAVVGDFGLAKLLDHRDSHVTTAVRGTVGHIAPEYLSTGQSSEKTDVFGFGILLLELITGQKALDFGRSAHQKGVMLDWVKKLHQEGKLKQLIDKDLNDKFDRVELEEIVQVALLCTQFNPSHRPKMSEVMKMLEGDGLAERWEATQNGTGEHQPPPLPPGMVSSSPRVRYYSDYIQESSLVVEAIELSGPR

SEQ ID NO: 90270 - protein, 565 aa, Arabidopsis thaliana
  peptide (1)..(565): Ceres Seq. ID no. 12723304
  misc_feature (57)..(565): Homolog of NCBI NO: 25404291 NR Description: probable Serine/Threonine protein kinase F8A5.31
  misc_feature (1)..(565): Homolog of NCBI NO: 22331326 NR Description: somatic embryogenesis receptor-like kinase, protein id: At3g25560.1, supported by cDNA: gi_19715614 thaliana] >gi|19715615|gb|AAL91629.1| AT3g25560/MWL2_18
  misc_feature (1)..(565): Homolog of NCBI NO: 9279736 NR Description: receptor-like kinase [Arabidopsis thaliana]
  misc_feature (1)..(565): Homolog of NCBI NO: 21593619 NR Description: receptor protein kinase-like protein [Arabidopsis
  misc_feature (1)..(565): Homolog of NCBI NO: 15237242 NR Description: receptor protein kinase-like protein; protein id:
  misc_feature (1)..(565): Homolog of NCBI NO: 11862956 NR Description: putative protein kinase [Oryza sativa (japonica
  misc_feature (1)..(521): Homolog of NCBI NO: 22329033 NR Description: receptor-like kinase homolog; protein id: supported by cDNA: gi_17979064, supported by cDNA: gi_20465456 thaliana] >gi|17979065|gb|AAL49800.1| putative receptor kinase
  misc_feature (133)..(502): Homolog of NCBI NO: 15528710 NR Description: putative receptor-like kinase [Oryza sativa
  misc_feature (1)..(14): Homolog of NCBI NO: 15528710 NR Description: putative receptor-like kinase [Oryza sativa
  misc_feature (8)..(521): Homolog of NCBI NO: 15224077 NR Description: putative LRR receptor protein kinase; protein id:
MVSCTDGYVSSLDLPSQSLSGTLSPRIGNLTYLQSVVLQNNAITGPIPETIGRLEKLQSLDLSNNSFTGEIPASLGELKNLNYLRLNNNSLIGTCPESLSKIEGLTLVDISYNNLSGSLPKVSARTFKVIGNALICGPKAVSNCSAVPEPLTLPQDGPDESGTRTNGHHVALAFAASFSAAFFVFFTSGMFLWWRYRRNKQIFFDVNEQYDPEVSLGHLKRYTFKELRSATNHFNSKNILGRGGYGIVYKGHLNDGTLVAVKRLKDCNIAGGEVQFQTEVETISLALHRNLLRLRGFCSSNQERILVYPYMPNGSVASRLKDNIRGEPALDWSRRKKIAVGTARGLVYLHEQCDPKIIHRDVKAANILLDEDFEAVVGDFGLAKLLDHRDSHVTTAVRGTVGHIAPEYLSTGQSSEKTDVFGFGILLLELITGQKALDFGRSAHQKGVMLDWVKKLHQEGKLKQLIDKDLNDKFDRVELEEIVQVALLCTQFNPSHRPKMSEVMKMLEGDGLAERWEATQNGTGEHQPPPLPPGMVSSSPRVRYYSDYIQESSLVVEAIELSGPR

SEQ ID NO: 90271 - protein, 376 aa, Arabidopsis thaliana
  peptide (1)..(376): Ceres Seq. ID no. 12723305
  misc_feature (1)..(376): Homolog of NCBI NO: 25404291 NR Description: probable Serine/Threonine protein kinase F8A5.31
  misc_feature (1)..(376): Homolog of NCBI NO: 22331326 NR Description: somatic embryogenesis receptor-like kinase, protein id: At3g25560.1, supported by cDNA: gi_19715614 thaliana] >gi|19715615|gb|AAL91629.1| AT3g25560/MWL2_18
  misc_feature (1)..(376): Homolog of NCBI NO: 9279736 NR Description: receptor-like kinase [Arabidopsis thaliana]
  misc_feature (1)..(376): Homolog of NCBI NO: 21593619 NR Description: receptor protein kinase-like protein [Arabidopsis
  misc_feature (1)..(376): Homolog of NCBI NO: 15237242 NR Description: receptor protein kinase-like protein; protein id:
  misc_feature (1)..(376): Homolog of NCBI NO: 11862956 NR Description: putative protein kinase [Oryza sativa (japonica
  misc_feature (1)..(332): Homolog of NCBI NO: 22329033 NR Description: receptor-like kinase homolog; protein id: supported by cDNA: gi_17979064, supported by cDNA: gi_20465456 thaliana] >gi|17979065|gb|AAL49800.1| putative receptor kinase
  misc_feature (1)..(313): Homolog of NCBI NO: 15528710 NR Description: putative receptor-like kinase [Oryza sativa
  misc_feature (1)..(332): Homolog of NCBI NO: 15224077 NR Description: putative LRR receptor protein kinase; protein id:
  misc_feature (27)..(332): Homolog of NCBI NO: 25407653 NR Description: receptor-like kinase homolog [imported] -
MFLWWRYRRNKQIFFDVNEQYDPEVSLGHLKRYTFKELRSATNHFNSKNILGRGGYGIVYKGHLNDGTLVAVKRLKDCNIAGGEVQFQTEVETISLALHRNLLRLRGFCSSNQERILVYPYMPNGSVASRLKDNIRGEPALDWSRRKKIAVGTARGLVYLHEQCDPKIIHRDVKAANILLDEDFEAVVGDFGLAKLLDHRDSHVTTAVRGTVGHIAPEYLSTGQSSEKTDVFGFGILLLELITGQKALDFGRSAHQKGVMLDWVKKLHQEGKLKQLIDKDLNDKFDRVELEEIVQVALLCTQFNPSHRPKMSEVMKMLEGDGLAERWEATQNGTGEHQPPPLPPGMVSSSPRVRYYSDYIQESSLVVEAIELSGPR

SEQ ID NO: 90272 - DNA, 1457 bp, Arabidopsis thaliana
  misc_feature (1)..(1457): Ceres Seq. ID no. 12723306
  misc_feature: MA Experiment ID: 108461 Result: Up-regulated in Transcription
  misc_feature: MA Experiment 108461 PARAMETER Experiment Name: At_Germinating_Seeds_cDNA_P Parameter: Age (day) Value: 1 vs. 0
  misc_feature: MA Experiment 108461 PARAMETER Experiment Name: At_Germinating_Seeds_cDNA_P Parameter: Tissue Value: Germinating Seeds
  misc_feature: MA Experiment ID: 108462 Result: Up-regulated in Transcription
  misc_feature: MA Experiment 108462 PARAMETER Experiment Name: At_Germinating_Seeds_cDNA_P Parameter: Age (day) Value: 2 vs. 0
  misc_feature: MA Experiment 108462 PARAMETER Experiment Name: At_Germinating_Seeds_cDNA_P Parameter: Tissue Value: Germinating Seeds
  misc_feature: MA Experiment ID: 108463 Result: Up-regulated in Transcription
  misc_feature: MA Experiment 108463 PARAMETER Experiment Name: At_Germinating_Seeds_cDNA_P Parameter: Age (day) Value: 3 vs. 0
  misc_feature: MA Experiment 108463 PARAMETER Experiment Name: At_Germinating_Seeds_cDNA_P Parameter: Tissue Value: Germinating Seeds
  misc_feature: MA Experiment ID: 108464 Result: Up-regulated in Transcription
  misc_feature: MA Experiment 108464 PARAMETER Experiment Name: At_Germinating_Seeds_cDNA_P Parameter: Age (day) Value: 4 vs. 0
  misc_feature: MA Experiment 108464 PARAMETER Experiment Name: At_Germinating_Seeds_cDNA_P Parameter: Tissue Value: Germinating Seeds
  misc_feature: MA Experiment ID: 108573 Result: Down-regulated in Transcription
  misc_feature: MA Experiment 108573 PARAMETER Experiment Name: At_Drought_cDNA_P Parameter: Timepoint (hr) Value: 6
  misc_feature: MA Experiment 108573 PARAMETER Experiment Name: At_Drought_cDNA_P Parameter: Tissue Value: Aerial
  misc_feature: MA Experiment 108573 PARAMETER Experiment Name: At_Drought_cDNA_P Parameter: Treatment Value: Drought vs. No Drought
  misc_feature: MA Experiment ID: 108595 Result: Down-regulated in Transcription
  misc_feature: MA Experiment 108595 PARAMETER Experiment Name: At_Ler-pi_Ovule_cDNA_P Parameter: Plant Line Value: null
  misc_feature: MA Experiment ID: 20000113 Result: Down-regulated in Transcription
  misc_feature: MA Experiment 20000113 PARAMETER Experiment Name: At_42deg_Heat_cDNA_P Parameter: Temperature (deg C) Value: 42 vs. 22
  misc_feature: MA Experiment 20000113 PARAMETER Experiment Name: At_42deg_Heat_cDNA_P Parameter: Timepoint (hr) Value: 8
  misc_feature: MA Experiment 20000113 PARAMETER Experiment Name: At_42deg_Heat_cDNA_P Parameter: Tissue Value: Aerial
  misc_feature: MA Experiment ID: 20000224 Result: Down-regulated in Transcription
  misc_feature: MA Experiment ID: 20000315 Result: Down-regulated in Transcription
  misc_feature: MA Experiment 20000315 PARAMETER Experiment Name: At_14day_Shoots-Roots_Sub_P Parameter: Age (day) Value: 14
  misc_feature: MA Experiment 20000315 PARAMETER Experiment Name: At_14day_Shoots-Roots_Sub_P Parameter: Organism Value: A. thaliana
  misc_feature: MA Experiment 20000315 PARAMETER Experiment Name: At_14day_Shoots-Roots_Sub_P Parameter: Plant Line Value: WS
  misc_feature: MA Experiment 20000315 PARAMETER Experiment Name: At_14day_Shoots-Roots_Sub_P Parameter: Tissue Value: Shoots vs. Whole Plant
atcgaattagtttgctaactaacgaagctgtagctacctcctctctcaacgtatggctcggaagaagatcagagagtatgactcaaagagactggtgaaagaacacttcaaaagactctctggtcaagaattgcctatcagatccgttcagattaaccaagagactgatctaaatgagctagtagagagagagccttggctctcatctgagaagcttgtggtgaaacctgatatgttgttcggaaagcgtggcaaaagcggtttggttgcattgaacttagatttcgctgatgttgcaactttcgtgaaagaacgcttaggcaaagaggtagagatgagtggatgcaaaggacccataacaacattcattgttgaaccatttgtcccacacaatgaagagttctatcttaatattgtctctgatagacttggctgcagcattagcttttcggagtgtggaggaattgacatcgaggagaactgggacaaggtcaagaccataactataccaacaggtgcttccctgacatttgagatatgtgcacctcttgttgcaacccttcctctagagatcaaaggggaacttgaagattttattcaagtcatttttaccctattcgaagatcttgatttcactttcttggagatgaatcctttcacattggttgatggaaagccttatcctctggatatgaggggtgagcttgatgacaccgctgctttcaaaaactttaagaagtggggcgacattgaatttcccatgccatttggaagagtgatgagttcaacagagagcttcatccacggtctagatgagaagacaagtgcctctttgaagttcactgttctgaatcccaagggaagaatttggactatggtagctggaggaggtgcaagtgtcatctatgctgataccgttggagatctcgggtatgcatctgagcttggcaattatgctgaatacagtggagcacccaaagaagacgaggttttgcagtatgccagagttgtcattgattgtgctacagcgaatccggatggaaaaagcagggctctggtaattggaggtggaattgctaacttcaccgatgttgctgctaccttcaatggcataatccgagctctcaaggaaaaagaagcaaagctgaaagcagcaaggatgcatatatttgtgaggagaggaggaccaaactaccaaaagggacttgctaaaatgagatcacttggagacgaaatcggtgtccccatcgaggtgtatggtcctgaagcaacaatgacaggtatatgcaaggaggcaatccagtacatcacagcggctgcataagcctttacaatcttatcacttactttcaaaatactctttagcgtctcttgagtttgagacgtgtttggattatgtttcacttctaatgtatcttactattcataaataaagaacaagtatcttcttttttctt

SEQ ID NO: 90273 - protein, 423 aa, Arabidopsis thaliana
  peptide (1)..(423): Ceres Seq. ID no. 12723307
  misc_feature (1)..(423): Homolog of NCBI NO: 15219818 NR Description: ATP citrate-lyase, putative; protein id: supported by cDNA: gi_19698852 [Arabidopsis thaliana]
  misc_feature (1)..(423): Homolog of NCBI NO: 19698853 NR Description: similar to ATP-citrate-lyase [Arabidopsis
  misc_feature (1)..(423): Homolog of NCBI NO: 15220186 NR Description: ATP citrate-lyase, putative; protein id: supported by cDNA: 36439., supported by cDNA: gi_15810348, by cDNA: gi_16648641, supported by cDNA: gi_20453213, supported
  misc_feature (1)..(423): Homolog of NCBI NO: 21593129 NR Description: ATP citrate-lyase, putative [Arabidopsis thaliana]
  misc_feature (1)..(423): Homolog of NCBI NO: 15919089 NR Description: ATP citrate lyase b-subunit [Lupinus albus]
  misc_feature (1)..(419): Homolog of NCBI NO: 15217510 NR Description: unknown protein; protein id: At1g09430.1
  misc_feature (1)..(416): Homolog of NCBI NO: 9229902 NR Description: ATP citrate-lyase [Ciona intestinalis]
  misc_feature (1)..(411): Homolog of NCBI NO: 8392839 NR Description: ATP citrate lyase [Rattus norvegicus]
  misc_feature (1)..(416): Homolog of NCBI NO: 24653988 NR Description: ATP citrate lyase CG8322-PA
  misc_feature (1)..(416): Homolog of NCBI NO: 28372804 NR Description: LD21334p [Drosophila melanogaster]
MARKKIREYDSKRLVKEHFKRLSGQELPIRSVQINQETDLNELVEREPWLSSEKLVVKPDMLFGKRGKSGLVALNLDFADVATFVKERLGKEVEMSGCKGPITTFIVEPFVPHNEEFYLNIVSDRLGCSISFSECGGIDIEENWDKVKTITIPTGASLTFEICAPLVATLPLEIKGELEDFIQVIFTLFEDLDFTFLEMNPFTLVDGKPYPLDMRGELDDTAAFKNFKKWGDIEFPMPFGRVMSSTESFIHGLDEKTSASLKFTVLNPKGRIWTMVAGGGASVIYADTVGDLGYASELGNYAEYSGAPKEDEVLQYARVVIDCATANPDGKSRALVIGGGIANFTDVAATFNGIIRALKEKEAKLKAARMHIFVRRGGPNYQKGLAKMRSLGDEIGVPIEVYGPEATMTGICKEAIQYITAAA

SEQ ID NO: 90274 - protein, 363 aa, Arabidopsis thaliana
  peptide (1)..(363): Ceres Seq. ID no. 12723308
  misc_feature (1)..(363): Homolog of NCBI NO: 15219818 NR Description: ATP citrate-lyase, putative; protein id: supported by cDNA: gi_19698852 [Arabidopsis thaliana]
  misc_feature (1)..(363): Homolog of NCBI NO: 19698853 NR Description: similar to ATP-citrate-lyase [Arabidopsis
  misc_feature (1)..(363): Homolog of NCBI NO: 15220186 NR Description: ATP citrate-lyase, putative; protein id: supported by cDNA: 36439., supported by cDNA: gi_15810348, by cDNA: gi_16648641, supported by cDNA: gi_20453213, supported
  misc_feature (1)..(363): Homolog of NCBI NO: 21593129 NR Description: ATP citrate-lyase, putative [Arabidopsis thaliana]
  misc_feature (1)..(363): Homolog of NCBI NO: 15919089 NR Description: ATP citrate lyase b-subunit [Lupinus albus]
  misc_feature (1)..(359): Homolog of NCBI NO: 15217510 NR Description: unknown protein; protein id: At1g09430.1
  misc_feature (1)..(356): Homolog of NCBI NO: 9229902 NR Description: ATP citrate-lyase [Ciona intestinalis]
  misc_feature (1)..(351): Homolog of NCBI NO: 8392839 NR Description: ATP citrate lyase [Rattus norvegicus]
  misc_feature (1)..(356): Homolog of NCBI NO: 24653988 NR Description: ATP citrate lyase CG8322-PA
  misc_feature (1)..(356): Homolog of NCBI NO: 28372804 NR Description: LD21334p [Drosophila melanogaster]
MLFGKRGKSGLVALNLDFADVATFVKERLGKEVEMSGCKGPITTFIVEPFVPHNEEFYLNIVSDRLGCSISFSECGGIDIEENWDKVKTITIPTGASLTFEICAPLVATLPLEIKGELEDFIQVIFTLFEDLDFTFLEMNPFTLVDGKPYPLDMRGELDDTAAFKNFKKWGDIEFPMPFGRVMSSTESFIHGLDEKTSASLKFTVLNPKGRIWTMVAGGGASVIYADTVGDLGYASELGNYAEYSGAPKEDEVLQYARVVIDCATANPDGKSRALVIGGGIANFTDVAATFNGIIRALKEKEAKLKAARMHIFVRRGGPNYQKGLAKMRSLGDEIGVPIEVYGPEATMTGICKEAIQYITAAA

SEQ ID NO: 90275 - protein, 329 aa, Arabidopsis thaliana
  peptide (1)..(329): Ceres Seq. ID no. 12723309
  misc_feature (1)..(329): Homolog of NCBI NO: 15219818 NR Description: ATP citrate-lyase, putative; protein id: supported by cDNA: gi_19698852 [Arabidopsis thaliana]
  misc_feature (1)..(329): Homolog of NCBI NO: 19698853 NR Description: similar to ATP-citrate-lyase [Arabidopsis
  misc_feature (1)..(329): Homolog of NCBI NO: 15220186 NR Description: ATP citrate-lyase, putative; protein id: supported by cDNA: 36439., supported by cDNA: gi_15810348, by cDNA: gi_16648641, supported by cDNA: gi_20453213, supported
  misc_feature (1)..(329): Homolog of NCBI NO: 21593129 NR Description: ATP citrate-lyase, putative [Arabidopsis thaliana]
  misc_feature (1)..(329): Homolog of NCBI NO: 15919089 NR Description: ATP citrate lyase b-subunit [Lupinus albus]
  misc_feature (1)..(325): Homolog of NCBI NO: 15217510 NR Description: unknown protein; protein id: At1g09430.1
  misc_feature (1)..(322): Homolog of NCBI NO: 9229902 NR Description: ATP citrate-lyase [Ciona intestinalis]
  misc_feature (1)..(317): Homolog of NCBI NO: 8392839 NR Description: ATP citrate lyase [Rattus norvegicus]
  misc_feature (1)..(322): Homolog of NCBI NO: 24653988 NR Description: ATP citrate lyase CG8322-PA
  misc_feature (1)..(322): Homolog of NCBI NO: 28372804 NR Description: LD21334p [Drosophila melanogaster]
MSGCKGPITTFIVEPFVPHNEEFYLNIVSDRLGCSISFSECGGIDIEENWDKVKTITIPTGASLTFEICAPLVATLPLEIKGELEDFIQVIFTLFEDLDFTFLEMNPFTLVDGKPYPLDMRGELDDTAAFKNFKKWGDIEFPMPFGRVMSSTESFIHGLDEKTSASLKFTVLNPKGRIWTMVAGGGASVIYADTVGDLGYASELGNYAEYSGAPKEDEVLQYARVVIDCATANPDGKSRALVIGGGIANFTDVAATFNGIIRALKEKEAKLKAARMHIFVRRGGPNYQKGLAKMRSLGDEIGVPIEVYGPEATMTGICKEAIQYITAAA

SEQ ID NO: 90276 - DNA, 725 bp, Arabidopsis thaliana
  misc_feature (1)..(725): Ceres Seq. ID no. 12723324
  misc_feature: MA Experiment ID: 20000437 Result: Up-regulated in Transcription
  misc_feature: MA Experiment 20000437 PARAMETER Experiment Name: At_Drought_P Parameter: Age (day) Value: 8
  misc_feature: MA Experiment 20000437 PARAMETER Experiment Name: At_Drought_P Parameter: Organism Value: A. thaliana
  misc_feature: MA Experiment 20000437 PARAMETER Experiment Name: At_Drought_P Parameter: Plant Line Value: WS
  misc_feature: MA Experiment 20000437 PARAMETER Experiment Name: At_Drought_P Parameter: Timepoint (hr) Value: 24
  misc_feature: MA Experiment 20000437 PARAMETER Experiment Name: At_Drought_P Parameter: Tissue Value: Whole Plant
  misc_feature: MA Experiment 20000437 PARAMETER Experiment Name: At_Drought_P Parameter: Treatment Value: Drought vs. No Drought
  misc_feature: MA Experiment ID: 20001555 Result: Up-regulated in Transcription
  misc_feature: MA Experiment 20001555 PARAMETER Experiment Name: At_Drought_Soil_Dry_P Parameter: Age (day) Value: 24
  misc_feature: MA Experiment 20001555 PARAMETER Experiment Name: At_Drought_Soil_Dry_P Parameter: Organism Value: A. thaliana
  misc_feature: MA Experiment 20001555 PARAMETER Experiment Name: At_Drought_Soil_Dry_P Parameter: Plant Line Value: WS
  misc_feature: MA Experiment 20001555 PARAMETER Experiment Name: At_Drought_Soil_Dry_P Parameter: Post Timepoint (hr) Value: None
  misc_feature: MA Experiment 20001555 PARAMETER Experiment Name: At_Drought_Soil_Dry_P Parameter: Post-Treatment Value: None
  misc_feature: MA Experiment 20001555 PARAMETER Experiment Name: At_Drought_Soil_Dry_P Parameter: Timepoint (day) Value: 10
  misc_feature: MA Experiment 20001555 PARAMETER Experiment Name: At_Drought_Soil_Dry_P Parameter: Treatment Value: Drought vs. No Drought
  misc_feature: MA Experiment ID: 20001556 Result: Up-regulated in Transcription
  misc_feature: MA Experiment 20001556 PARAMETER Experiment Name: At_Drought_Soil_Dry_P Parameter: Age (day) Value: 26
  misc_feature: MA Experiment 20001556 PARAMETER Experiment Name: At_Drought_Soil_Dry_P Parameter: Organism Value: A. thaliana
  misc_feature: MA Experiment 20001556 PARAMETER Experiment Name: At_Drought_Soil_Dry_P Parameter: Plant Line Value: WS
  misc_feature: MA Experiment 20001556 PARAMETER Experiment Name: At_Drought_Soil_Dry_P Parameter: Post Timepoint (hr) Value: None
  misc_feature: MA Experiment 20001556 PARAMETER Experiment Name: At_Drought_Soil_Dry_P Parameter: Post-Treatment Value: None
  misc_feature: MA Experiment 20001556 PARAMETER Experiment Name: At_Drought_Soil_Dry_P Parameter: Timepoint (day) Value: 12
  misc_feature: MA Experiment 20001556 PARAMETER Experiment Name: At_Drought_Soil_Dry_P Parameter: Treatment Value: Drought vs. No Drought
  misc_feature: MA Experiment ID: 20001557 Result: Up-regulated in Transcription
  misc_feature: MA Experiment 20001557 PARAMETER Experiment Name: At_Drought_Soil_Dry_P Parameter: Age (day) Value: 27
  misc_feature: MA Experiment 20001557 PARAMETER Experiment Name: At_Drought_Soil_Dry_P Parameter: Organism Value: A. thaliana
  misc_feature: MA Experiment 20001557 PARAMETER Experiment Name: At_Drought_Soil_Dry_P Parameter: Plant Line Value: WS
  misc_feature: MA Experiment 20001557 PARAMETER Experiment Name: At_Drought_Soil_Dry_P Parameter: Post Timepoint (hr) Value: 3
  misc_feature: MA Experiment 20001557 PARAMETER Experiment Name: At_Drought_Soil_Dry_P Parameter: Post-Treatment Value: Re-Water vs. No Drought
  misc_feature: MA Experiment 20001557 PARAMETER Experiment Name: At_Drought_Soil_Dry_P Parameter: Timepoint (day) Value: 13
  misc_feature: MA Experiment 20001557 PARAMETER Experiment Name: At_Drought_Soil_Dry_P Parameter: Treatment Value: Drought vs. No Drought
  misc_feature: MA Experiment ID: 20001559 Result: Up-regulated in Transcription
  misc_feature: MA Experiment 20001559 PARAMETER Experiment Name: At_Drought_Soil_Dry_P Parameter: Age (day) Value: 28
  misc_feature: MA Experiment 20001559 PARAMETER Experiment Name: At_Drought_Soil_Dry_P Parameter: Organism Value: A. thaliana
  misc_feature: MA Experiment 20001559 PARAMETER Experiment Name: At_Drought_Soil_Dry_P Parameter: Plant Line Value: WS
  misc_feature: MA Experiment 20001559 PARAMETER Experiment Name: At_Drought_Soil_Dry_P Parameter: Post Timepoint (hr) Value: 29
  misc_feature: MA Experiment 20001559 PARAMETER Experiment Name: At_Drought_Soil_Dry_P Parameter: Post-Treatment Value: Re-Water vs. No Drought
  misc_feature: MA Experiment 20001559 PARAMETER Experiment Name: At_Drought_Soil_Dry_P Parameter: Timepoint (day) Value: 14
  misc_feature: MA Experiment 20001559 PARAMETER Experiment Name: At_Drought_Soil_Dry_P Parameter: Treatment Value: Drought vs. No Drought
  misc_feature: MA Experiment ID: 20001904 Result: Up-regulated in Transcription
  misc_feature: MA Experiment 20001904 PARAMETER Experiment Name: At_Drought_Reproduction_P Parameter: Age (day) Value: 37
  misc_feature: MA Experiment 20001904 PARAMETER Experiment Name: At_Drought_Reproduction_P Parameter: Organism Value: A. thaliana
  misc_feature: MA Experiment 20001904 PARAMETER Experiment Name: At_Drought_Reproduction_P Parameter: Plant Line Value: WS
  misc_feature: MA Experiment 20001904 PARAMETER Experiment Name: At_Drought_Reproduction_P Parameter: Timepoint (day) Value: 7
  misc_feature: MA Experiment 20001904 PARAMETER Experiment Name: At_Drought_Reproduction_P Parameter: Tissue Value: Rosettes
  misc_feature: MA Experiment 20001904 PARAMETER Experiment Name: At_Drought_Reproduction_P Parameter: Treatment Value: Drought vs. No Drought
  misc_feature: MA Experiment ID: 20001905 Result: Up-regulated in Transcription
  misc_feature: MA Experiment 20001905 PARAMETER Experiment Name: At_Drought_Reproduction_P Parameter: Age (day) Value: 40
  misc_feature: MA Experiment 20001905 PARAMETER Experiment Name: At_Drought_Reproduction_P Parameter: Organism Value: A. thaliana
  misc_feature: MA Experiment 20001905 PARAMETER Experiment Name: At_Drought_Reproduction_P Parameter: Plant Line Value: WS
  misc_feature: MA Experiment 20001905 PARAMETER Experiment Name: At_Drought_Reproduction_P Parameter: Timepoint (day) Value: 10
  misc_feature: MA Experiment 20001905 PARAMETER Experiment Name: At_Drought_Reproduction_P Parameter: Tissue Value: Rosettes
  misc_feature: MA Experiment 20001905 PARAMETER Experiment Name: At_Drought_Reproduction_P Parameter: Treatment Value: Drought vs. No Drought
  misc_feature: MA Experiment ID: 20001906 Result: Up-regulated in Transcription
  misc_feature: MA Experiment 20001906 PARAMETER Experiment Name: At_Drought_Reproduction_P Parameter: Age (day) Value: 35
  misc_feature: MA Experiment 20001906 PARAMETER Experiment Name: At_Drought_Reproduction_P Parameter: Organism Value: A. thaliana
  misc_feature: MA Experiment 20001906 PARAMETER Experiment Name: At_Drought_Reproduction_P Parameter: Plant Line Value: WS
  misc_feature: MA Experiment 20001906 PARAMETER Experiment Name: At_Drought_Reproduction_P Parameter: Timepoint (day) Value: 5
  misc_feature: MA Experiment 20001906 PARAMETER Experiment Name: At_Drought_Reproduction_P Parameter: Tissue Value: Siliques
  misc_feature: MA Experiment 20001906 PARAMETER Experiment Name: At_Drought_Reproduction_P Parameter: Treatment Value: Drought vs. No Drought
  misc_feature: MA Experiment ID: 20001911 Result: Up-regulated in Transcription
  misc_feature: MA Experiment 20001911 PARAMETER Experiment Name: At_Drought_Reproduction_P Parameter: Age (day) Value: 40
  misc_feature: MA Experiment 20001911 PARAMETER Experiment Name: At_Drought_Reproduction_P Parameter: Organism Value: A. thaliana
  misc_feature: MA Experiment 20001911 PARAMETER Experiment Name: At_Drought_Reproduction_P Parameter: Plant Line Value: WS
  misc_feature: MA Experiment 20001911 PARAMETER Experiment Name: At_Drought_Reproduction_P Parameter: Timepoint (day) Value: 10
  misc_feature: MA Experiment 20001911 PARAMETER Experiment Name: At_Drought_Reproduction_P Parameter: Tissue Value: Flowers
  misc_feature: MA Experiment 20001911 PARAMETER Experiment Name: At_Drought_Reproduction_P Parameter: Treatment Value: Drought vs. No Drought
ctctgccaaagtccaaaggagagtttttctttattactagggcattctctgcagatttcttctccttaagccatggaattgcccccaaaagtgaaaaacatcttgcttttggattctgaaggaaagcgtgtagcggttaagtattactcagatgactggccaacaaattcagctcaggaagcgttcgaaaaatccgtgtttacaaagactcagaaaacaaatgctaggaccgaagtggaagtgacagcactggagaacaacattgttgtgtacaaatttgtgcaagatctccatttctttgttacgggcggtgaagaggaaaacgagcttatcttagccagtgtgcttgagggactctttgatgcagtgacccttctccttagaagcaatgttgataagagagaggcactagacaaccttgatctcatctttctaagctttgatgaaattatcgatggcggtattgttctggagacggatgcaaatgtaatagcaggtaaagcagggatcaatagcactgaccctaacgctcctctatccgagcagacgataagtcaagcactcgcgactgcaagagaacatttgacaaggtcacttatgaaatgatgtgtgttttgctcttcggtaataatggttgtttttgtcatggtgaatgtgtgttttgtctcttgtagttgagtgactatactcttaaatataaaagttactttgcacttgggagatag

SEQ ID NO: 90277 - protein, 177 aa, Arabidopsis thaliana
  peptide (1)..(177): Ceres Seq. ID no. 12723325
  misc_feature (6)..(145): Pfam Name: Clathrin adaptor complex small chain Pfam Description: Clathrin adaptor complex small chain
  misc_feature (1)..(177): Homolog of NCBI NO: 18406956 NR Description: putative coatomer zeta subunit; protein id: supported by cDNA: gi_15450726 [Arabidopsis thaliana] At1g60970/T7P1_11 [Arabidopsis thaliana]
  misc_feature (1)..(158): Homolog of NCBI NO: 25347918 NR Description: probable coatomer zeta subunit T7P1.11 [imported] Arabidopsis thaliana >gi|12323342|gb|AAG51650.1|AC018908_16
  misc_feature (5)..(177): Homolog of NCBI NO: 7259352 NR Description: nonclathrin coat protein zeta1-COP [Lycopersicon
MELPPKVKNILLLDSEGKRVAVKYYSDDWPTNSAQEAFEKSVFTKTQKTNARTEVEVTALENNIVVYKFVQDLHFFVTGGEEENELILASVLEGLFDAVTLLLRSNVDKREALDNLDLIFLSFDEIIDGGIVLETDANVIAGKAGINSTDPNAPLSEQTISQALATAREHLTRSLMK

SEQ ID NO: 90278 - DNA, 2724 bp, Arabidopsis thaliana
  misc_feature (1)..(2724): Ceres Seq. ID no. 12723338
  misc_feature: MA Experiment ID: 20000307 Result: Up-regulated in Transcription
  misc_feature: MA Experiment 20000307 PARAMETER Experiment Name: At_Germinating_Seeds_Sub_P Parameter: Age (hr) Value: 24 vs. 0
  misc_feature: MA Experiment 20000307 PARAMETER Experiment Name: At_Germinating_Seeds_Sub_P Parameter: Organism Value: A. thaliana
  misc_feature: MA Experiment 20000307 PARAMETER Experiment Name: At_Germinating_Seeds_Sub_P Parameter: Plant Line Value: WS
  misc_feature: MA Experiment 20000307 PARAMETER Experiment Name: At_Germinating_Seeds_Sub_P Parameter: Tissue Value: Germinating Seeds
atgttgttcggtcgtaaatcatcaagcaagttacagcctgtaaaagggcaagcatcacctaaagttagcaagagtagcaagcaggatgttaaaacttcttcttcttcacctaaaccttcttcgtcacctataccgattagatcatctaagtcaatattatccgggagttacttaacatcatcaagacgtgtttcatcgcctataggcaacctcaagaatatttctgttaaagaagctaggagccccaagacgagcagctcgcctaaatggacaggaaattttattcttatggtcgagcttcgcaggaagatctttacctttagagacatcattgatctttctacccttgatggttctccttccataaccgatgtgcgtaaaccgcaaccttatatccttatggtgatgcatacaatgaaagatctccagaaaatttgtcctgagatcattcatagctcccatatcatggaaattagacgtgcaaatgtagataaggttcttgaccatttctttaatgctttgaaatccattggagattcatggattgataaccctgaatggatagctaaatccaagtattggagtagcagcgtcgggaagaatcagtctgatcgcttagtggaaaaagtgttagctgcattagatggactgattaagatgtccaaagagaggtttgatatgatggagattgatgaagaagaagagaagaaagagtccactagtccacagacaggtaaaacatcgagcagtcgagttttatcgccatccgaatcattctccgatagcaaatcatcctttggtagcagaaactcgttttgcgggtcaccgaccacgccaagatcagttctaccagaatcgatgatgggttcaccgggaagagttggagactttgcaaactctgcatctcatcttttatggaatatgagagttcaagcacttgaaaagcttagtcctatcgatgttaaacgactcgctatccacatcttgtcacagaaagaagctcaggaaccaaacgaaagcaatgatgaagatgtgattagtgttgttgaagagatcaagcagaagaaggatgaaatagagagcattgatgtgaaaatggagacagaagaatctgttaatcttgatgaagaatccgttgttcttaatggcgaacaagacactatcatgaagatctcttcattggagtcaacatctgaatccaaactcaatcattcagaaaaatatgaaaattcatcacaacttttcccgccaccgccgcctcctcctcctcctcctccactatcctttataaaaactgcttctttacctcttccatcaccacctcctactccgccaattgctgacatcgcaatatcaatgccacctcctccgccaccaccaccgcctcctccagcagttatgcctttgaaacactttgctccaccaccaccaccaccgcttccaccagcagttatgcctttgaaacactttgctccaccaccaccgactccaccagcatttaagcctttaaaaggctctgctccaccaccaccgccacctcctccacttccaacaactatagcggctccacctccaccgcctccacctccaagagctgcagtggccccaccaccacctcctccacctccaggaactgcagcggcaccaccaccgcctcctccacctccaggaactcaagcggcaccaccaccgcctcctcctccacctatgcaaaacagagcaccatctccacctccaatgcctatgggaaatagtggaagtggtggaccaccccctccaccacctcctatgcctctagctaatggagcaacaccgccaccgccgccacctcctatggctatggcaaacggagcagcaggaccgcctccgccaccacctcgaatgggtatggcgaatggagcagctggtccaccaccgccaccaggagctgcaagaagcttgcgtcccaagaaagctgccacaaagctgaaaaggtcaacacaactaggaaacctttatagaatccttaaagggaaagtagaagggcgtgatcctaacgcaaaaaccggcagcggaagcggaagaaaagctggagccggaagcgctccagctggtggaaagcaaggaatggctgatgctcttgctgagatcacaaagaaatctgcatattttttgcaaatacaagccgatattgcaaagtacatgacgtcaataaatgagctgaagattgagatcactaagttccagactaaagacatgactgagcttcttagcttccaccgtcgcgtcgaatcagttcttgaaaacctaacagacgagtcacaggttcttgcccgatgcgaagggtttccgcagaagaaactcgaagcaatgagaatggctgttgcattgtacacgaaactacacggtatgatcaccgagctacagaacatgaaaatagaacctcctttgaaccagcttcttgataaagtagaacgttacttcaccaagatcaaagaaacaatggttgatatctcatcaaattgcatggaacttgcattgaaggaaaagagagacgaaaagctcgtgtcccccgatgcaaagccgagtttgaagaagacagtaggatctgctaaaatgctttggcgggcatttcagtttgcattcaaagtctacacatttgcaggaggacacgacgatcgtgctgattctctaaccagagagttggctcatgagatccaaactgattctgatccgaacccatga

SEQ ID NO: 90279 - protein, 907 aa, Arabidopsis thaliana
  peptide (1)..(907): Ceres Seq. ID no. 12723339
  misc_feature (417)..(715): Pfam Name: Formin Homology 2 Domain Pfam Description: Formin Homology 2 Domain
  misc_feature (550)..(900): Homolog of NCBI NO: 15220280 NR Description: hypothetical protein; protein id: At1g11070.1
  misc_feature (134)..(205): Homolog of NCBI NO: 15220280 NR Description: hypothetical protein; protein id: At1g11070.1
  misc_feature (558)..(861): Homolog of NCBI NO: 18412766 NR Description: unknown protein; protein id: At4g04980.1
  misc_feature (210)..(409): Homolog of NCBI NO: 18412766 NR Description: unknown protein; protein id: At4g04980.1
  misc_feature (408)..(642): Homolog of NCBI NO: 15240851 NR Description: putative protein; protein id: At5g07750.1 thaliana] >gi|9759597|dbj|BAB11454.1|
  misc_feature (411)..(642): Homolog of NCBI NO: 15240851 NR Description: putative protein; protein id: At5g07750.1 thaliana] >gi|9759597|dbj|BAB11454.1|
  misc_feature (416)..(641): Homolog of NCBI NO: 21322711 NR Description: pherophorin-dz1 protein [Volvox carteri f.
  misc_feature (416)..(641): Homolog of NCBI NO: 21322711 NR Description: pherophorin-dz1 protein [Volvox carteri f.
  misc_feature (416)..(641): Homolog of NCBI NO: 21322711 NR Description: pherophorin-dz1 protein [Volvox carteri f.
  misc_feature (416)..(641): Homolog of NCBI NO: 21322711 NR Description: pherophorin-dz1 protein [Volvox carteri f.
MLFGRKSSSKLQPVKGQASPKVSKSSKQDVKTSSSSPKPSSSPIPIRSSKSILSGSYLTSSRRVSSPIGNLKNISVKEARSPKTSSSPKWTGNFILMVELRRKIFTFRDIIDLSTLDGSPSITDVRKPQPYILMVMHTMKDLQKICPEIIHSSHIMEIRRANVDKVLDHFFNALKSIGDSWIDNPEWIAKSKYWSSSVGKNQSDRLVEKVLAALDGLIKMSKERFDMMEIDEEEEKKESTSPQTGKTSSSRVLSPSESFSDSKSSFGSRNSFCGSPTTPRSVLPESMMGSPGRVGDFANSASHLLWNMRVQALEKLSPIDVKRLAIHILSQKEAQEPNESNDEDVISVVEEIKQKKDEIESIDVKMETEESVNLDEESVVLNGEQDTIMKISSLESTSESKLNHSEKYENSSQLFPPPPPPPPPPPLSFIKTASLPLPSPPPTPPIADIAISMPPPPPPPPPPPAVMPLKHFAPPPPPPLPPAVMPLKHFAPPPPTPPAFKPLKGSAPPPPPPPPLPTTIAAPPPPPPPPRAAVAPPPPPPPPGTAAAPPPPPPPPGTQAAPPPPPPPPMQNRAPSPPPMPMGNSGSGGPPPPPPPMPLANGATPPPPPPPMAMANGAAGPPPPPPRMGMANGAAGPPPPPGAARSLRPKKAATKLKRSTQLGNLYRILKGKVEGRDPNAKTGSGSGRKAGAGSAPAGGKQGMADALAEITKKSAYFLQIQADIAKYMTSINELKIEITKFQTKDMTELLSFHRRVESVLENLTDESQVLARCEGFPQKKLEAMRMAVALYTKLHGMITELQNMKIEPPLNQLLDKVERYFTKIKETMVDISSNCMELALKEKRDEKLVSPDAKPSLKKTVGSAKMLWRAFQFAFKVYTFAGGHDDRADSLTRELAHEIQTDSDPNP

SEQ ID NO: 90280 - protein, 811 aa, Arabidopsis thaliana
  peptide (1)..(811): Ceres Seq. ID no. 12723340
  misc_feature (321)..(619): Pfam Name: Formin Homology 2 Domain Pfam Description: Formin Homology 2 Domain
  misc_feature (454)..(804): Homolog of NCBI NO: 15220280 NR Description: hypothetical protein; protein id: At1g11070.1
  misc_feature (38)..(109): Homolog of NCBI NO: 15220280 NR Description: hypothetical protein; protein id: At1g11070.1
  misc_feature (462)..(765): Homolog of NCBI NO: 18412766 NR Description: unknown protein; protein id: At4g04980.1
  misc_feature (114)..(313): Homolog of NCBI NO: 18412766 NR Description: unknown protein; protein id: At4g04980.1
  misc_feature (312)..(546): Homolog of NCBI NO: 15240851 NR Description: putative protein; protein id: At5g07750.1 thaliana] >gi|9759597|dbj|BAB11454.1|
  misc_feature (315)..(546): Homolog of NCBI NO: 15240851 NR Description: putative protein; protein id: At5g07750.1 thaliana] >gi|9759597|dbj|BAB11454.1|
  misc_feature (320)..(545): Homolog of NCBI NO: 21322711 NR Description: pherophorin-dz1 protein [Volvox carteri f.
  misc_feature (320)..(545): Homolog of NCBI NO: 21322711 NR Description: pherophorin-dz1 protein [Volvox carteri f.
  misc_feature (320)..(545): Homolog of NCBI NO: 21322711 NR Description: pherophorin-dz1 protein [Volvox carteri f.
  misc_feature (320)..(545): Homolog of NCBI NO: 21322711 NR Description: pherophorin-dz1 protein [Volvox carteri f.
MVELRRKIFTFRDIIDLSTLDGSPSITDVRKPQPYILMVMHTMKDLQKICPEIIHSSHIMEIRRANVDKVLDHFFNALKSIGDSWIDNPEWIAKSKYWSSSVGKNQSDRLVEKVLAALDGLIKMSKERFDMMEIDEEEEKKESTSPQTGKTSSSRVLSPSESFSDSKSSFGSRNSFCGSPTTPRSVLPESMMGSPGRVGDFANSASHLLWNMRVQALEKLSPIDVKRLAIHILSQKEAQEPNESNDEDVISVVEEIKQKKDEIESIDVKMETEESVNLDEESVVLNGEQDTIMKISSLESTSESKLNHSEKYENSSQLFPPPPPPPPPPPLSFIKTASLPLPSPPPTPPIADIAISMPPPPPPPPPPPAVMPLKHFAPPPPPPLPPAVMPLKHFAPPPPTPPAFKPLKGSAPPPPPPPPLPTTIAAPPPPPPPPRAAVAPPPPPPPPGTAAAPPPPPPPPGTQAAPPPPPPPPMQNRAPSPPPMPMGNSGSGGPPPPPPPMPLANGATPPPPPPPMAMANGAAGPPPPPPRMGMANGAAGPPPPPGAARSLRPKKAATKLKRSTQLGNLYRILKGKVEGRDPNAKTGSGSGRKAGAGSAPAGGKQGMADALAEITKKSAYFLQIQADIAKYMTSINELKIEITKFQTKDMTELLSFHRRVESVLENLTDESQVLARCEGFPQKKLEAMRMAVALYTKLHGMITELQNMKIEPPLNQLLDKVERYFTKIKETMVDISSNCMELALKEKRDEKLVSPDAKPSLKKTVGSAKMLWRAFQFAFKVYTFAGGHDDRADSLTRELAHEIQTDSDPNP

SEQ ID NO: 90281 - protein, 774 aa, Arabidopsis thaliana
  peptide (1)..(774): Ceres Seq. ID no. 12723341
  misc_feature (284)..(582): Pfam Name: Formin Homology 2 Domain Pfam Description: Formin Homology 2 Domain
  misc_feature (417)..(767): Homolog of NCBI NO: 15220280 NR Description: hypothetical protein; protein id: At1g11070.1
  misc_feature (1)..(72): Homolog of NCBI NO: 15220280 NR Description: hypothetical protein; protein id: At1g11070.1
  misc_feature (425)..(728): Homolog of NCBI NO: 18412766 NR Description: unknown protein; protein id: At4g04980.1
  misc_feature (77)..(276): Homolog of NCBI NO: 18412766 NR Description: unknown protein; protein id: At4g04980.1
  misc_feature (275)..(509): Homolog of NCBI NO: 15240851 NR Description: putative protein; protein id: At5g07750.1 thaliana] >gi|9759597|dbj|BAB11454.1|
  misc_feature (278)..(509): Homolog of NCBI NO: 15240851 NR Description: putative protein; protein id: At5g07750.1 thaliana] >gi|9759597|dbj|BAB11454.1|
  misc_feature (283)..(508): Homolog of NCBI NO: 21322711 NR Description: pherophorin-dz1 protein [Volvox carteri f.
  misc_feature (283)..(508): Homolog of NCBI NO: 21322711 NR Description: pherophorin-dz1 protein [Volvox carteri f.
  misc_feature (283)..(508): Homolog of NCBI NO: 21322711 NR Description: pherophorin-dz1 protein [Volvox carteri f.
  misc_feature (283)..(508): Homolog of NCBI NO: 21322711 NR Description: pherophorin-dz1 protein [Volvox carteri f.
MVMHTMKDLQKICPEIIHSSHIMEIRRANVDKVLDHFFNALKSIGDSWIDNPEWIAKSKYWSSSVGKNQSDRLVEKVLAALDGLIKMSKERFDMMEIDEEEEKKESTSPQTGKTSSSRVLSPSESFSDSKSSFGSRNSFCGSPTTPRSVLPESMMGSPGRVGDFANSASHLLWNMRVQALEKLSPIDVKRLAIHILSQKEAQEPNESNDEDVISVVEEIKQKKDEIESIDVKMETEESVNLDEESVVLNGEQDTIMKISSLESTSESKLNHSEKYENSSQLFPPPPPPPPPPPLSFIKTASLPLPSPPPTPPIADIAISMPPPPPPPPPPPAVMPLKHFAPPPPPPLPPAVMPLKHFAPPPPTPPAFKPLKGSAPPPPPPPPLPTTIAAPPPPPPPPRAAVAPPPPPPPPGTAAAPPPPPPPPGTQAAPPPPPPPPMQNRAPSPPPMPMGNSGSGGPPPPPPPMPLANGATPPPPPPPMAMANGAAGPPPPPPRMGMANGAAGPPPPPGAARSLRPKKAATKLKRSTQLGNLYRILKGKVEGRDPNAKTGSGSGRKAGAGSAPAGGKQGMADALAEITKKSAYFLQIQADIAKYMTSINELKIEITKFQTKDMTELLSFHRRVESVLENLTDESQVLARCEGFPQKKLEAMRMAVALYTKLHGMITELQNMKIEPPLNQLLDKVERYFTKIKETMVDISSNCMELALKEKRDEKLVSPDAKPSLKKTVGSAKMLWRAFQFAFKVYTFAGGHDDRADSLTRELAHEIQTDSDPNP

SEQ ID NO: 90282 - DNA, 2013 bp, Arabidopsis thaliana
  misc_feature (1)..(2013): Ceres Seq. ID no. 12723362
accgagaaacgccagctccgtcaaatattaccaaactctcttcccctctctctctttcctcaaaacccattaaccattactgataacccaacgagattacctgtgaaagtcttcgtcttcccatcattttccctctaatatcctcactttctgaagatgagtttgctttaaaaccactttgataagaacaagaaagaagaagactttatcaaccaaaatgggtgaagaagcttgtgaggaatcatcaaaagcaagcatagagaaagcaatcgaagcaatatcttcattgatttcactctctcactcaatcaaatccttcaacatcaaatggcaactcataagaaccaaactccaagagctttactctggtctcgattctctccgaaatctcaattctggattcgacccatctctctcaagcttaatctccgccattctaatctctctcaaagacacttacgatctcgctactcgctgcgttaacgtctccttcagtggtaagcttctgatgcaaagcgatttagatgttatggcggggaaattcgatggacatacgaggaatctatctcggatttactcagctgggattctaagtcatggatttgcgatcgttgtgttgaagcctaatggtaatgcttgtaaagatgacatgaggttttacattagggatttgttaacgagaatgaagattggagatctggagatgaagaaacaagctttggttaagctgaatgaagctatggaggaagatgatagatatgttaagattctgattgagattagtgatatggttaatgttcttgttgggtttcttgattctgagattgggattcaagaagaatctgccaaagctgtgttttttatatctgggtttggttcttatagggatgttttgatcagatcaggtgtgattggtcctttggttagggttcttgagaatgggaatggtgttggtagagaagcgtctgcaaggtgtttgatgaaattaactgagaattctgagaatgcttggtctgtttctgctcatggaggtgtttcagctttgttgaagatttgttcttgtagtgattttggtggtgaattgattggtacttcgtgtggtgtgttgagaaatctcgttggtgttgaagagatcaagaggtttatgattgaagaagatcatactgttgctactttcatcaagcttattggatcaaaggaggagattgttcaggtaaattctattgatttactgttgagtatgtgttgtaaagacgaacaaacccgggacatcttggttagagaaggaggaattcaggagctagtgagtgtgttatcagatcccaattcgttgtcttcttcgaaatctaaggagatagcattaagggcgattgataacttatgtttcgggtctgcgggttgtttgaatgcattgatgggttgcaaattcttggatcatttgctgaatctgctaagaaatggggagatttctgttcaagaatcagccttgaaggtcacatctaggctatgtagtttacaagaagaggttaagaggataatgggagaggcgggttttatgcccgagctagttaaatttctcgacgccaaatcgatagatgtacgagaaatggcgagcgtggcactgtactgtttgatctcggttccaaggaacaggaagaagtttgcacaagacgactttaacattagctacattctccagttgctagaccatgaagatgggagcaatgtgagcagcgattcaggtaacacaaagtttttgatatcgatattgatgtctttaacgagctgcaatagcgcgagaagaaagattgcgagttcagggtatttgaaaagcatagagaagctagcagaaactgaaggttcagatgctaagaaacttgtgaagaagctatcaatgaacagattccgcagcatactcagtggtatttggcattcctaattttattttgtttccttatagttttttttttgtgaatttttcttgagtgtatatttttacaaaggtgtttttgt

SEQ ID NO: 90283 - protein, 573 aa, Arabidopsis thaliana
  peptide (1)..(573): Ceres Seq. ID no. 12723363
  misc_feature (346)..(390): Pfam Name: Armadillo/beta-catenin-like repeat Pfam Description: Armadillo/beta-catenin-like repeat
  misc_feature (1)..(573): Homolog of NCBI NO: 18407140 NR Description: expressed protein; protein id: At1g61350.1, by cDNA: gi_16209657, supported by cDNA: gi_18700124 [Arabidopsis
  misc_feature (1)..(573): Homolog of NCBI NO: 16209658 NR Description: At1g61350/T1F9_16 [Arabidopsis thaliana]
  misc_feature (1)..(571): Homolog of NCBI NO: 34394021 NR Description: arm repeat containing protein-like [Oryza sativa
  misc_feature (19)..(568): Homolog of NCBI NO: 15241309 NR Description: putative protein; protein id: At5g50900.1, by cDNA: gi_14532769 [Arabidopsis thaliana] gene_id:K3K7.4~pir||T02475~similar to unknown protein
  misc_feature (19)..(568): Homolog of NCBI NO: 14532770 NR Description: unknown protein [Arabidopsis thaliana]
  misc_feature (12)..(566): Homolog of NCBI NO: 15224987 NR Description: hypothetical protein; protein id: At2g05810.1, by cDNA: gi_20466607 [Arabidopsis thaliana]
  misc_feature (14)..(568): Homolog of NCBI NO: 37536190 NR Description: putative arm repeat containing protein [Oryza
  misc_feature (16)..(565): Homolog of NCBI NO: 15225552 NR Description: unknown protein; protein id: At2g45720.1
  misc_feature (11)..(565): Homolog of NCBI NO: 18378889 NR Description: expressed protein; protein id: At1g01830.1, by cDNA: gi_16604588, supported by cDNA: gi_20258992 [Arabidopsis >gi|16604589|gb|AAL24151.1| unknown protein [Arabidopsis
  misc_feature (11)..(565): Homolog of NCBI NO: 25518344 NR Description: hypothetical protein T1N6.25 [imported] - thaliana >gi|8671849|gb|AAF78412.1|AC009273_18 Contains to an unknown protein F17K2.25 gi|7485635 from Arabidopsis
MGEEACEESSKASIEKAIEAISSLISLSHSIKSFNIKWQLIRTKLQELYSGLDSLRNLNSGFDPSLSSLISAILISLKDTYDLATRCVNVSFSGKLLMQSDLDVMAGKFDGHTRNLSRIYSAGILSHGFAIVVLKPNGNACKDDMRFYIRDLLTRMKIGDLEMKKQALVKLNEAMEEDDRYVKILIEISDMVNVLVGFLDSEIGIQEESAKAVFFISGFGSYRDVLIRSGVIGPLVRVLENGNGVGREASARCLMKLTENSENAWSVSAHGGVSALLKICSCSDFGGELIGTSCGVLRNLVGVEEIKRFMIEEDHTVATFIKLIGSKEEIVQVNSIDLLLSMCCKDEQTRDILVREGGIQELVSVLSDPNSLSSSKSKEIALRAIDNLCFGSAGCLNALMGCKFLDHLLNLLRNGEISVQESALKVTSRLCSLQEEVKRIMGEAGFMPELVKFLDAKSIDVREMASVALYCLISVPRNRKKFAQDDFNISYILQLLDHEDGSNVSSDSGNTKFLISILMSLTSCNSARRKIASSGYLKSIEKLAETEGSDAKKLVKKLSMNRFRSILSGIWHS

SEQ ID NO: 90284 - protein, 476 aa, Arabidopsis thaliana
  peptide (1)..(476): Ceres Seq. ID no. 12723364
  misc_feature (249)..(293): Pfam Name: Armadillo/beta-catenin-like repeat Pfam Description: Armadillo/beta-catenin-like repeat
  misc_feature (1)..(476): Homolog of NCBI NO: 18407140 NR Description: expressed protein; protein id: At1g61350.1, by cDNA: gi_16209657, supported by cDNA: gi_18700124 [Arabidopsis
  misc_feature (1)..(476): Homolog of NCBI NO: 16209658 NR Description: At1g61350/T1F9_16 [Arabidopsis thaliana]
  misc_feature (1)..(474): Homolog of NCBI NO: 34394021 NR Description: arm repeat containing protein-like [Oryza sativa
  misc_feature (1)..(471): Homolog of NCBI NO: 15241309 NR Description: putative protein; protein id: At5g50900.1, by cDNA: gi_14532769 [Arabidopsis thaliana] gene_id:K3K7.4~pir||T02475~similar to unknown protein
  misc_feature (1)..(471): Homolog of NCBI NO: 14532770 NR Description: unknown protein [Arabidopsis thaliana]
  misc_feature (1)..(469): Homolog of NCBI NO: 15224987 NR Description: hypothetical protein; protein id: At2g05810.1, by cDNA: gi_20466607 [Arabidopsis thaliana]
  misc_feature (1)..(471): Homolog of NCBI NO: 37536190 NR Description: putative arm repeat containing protein [Oryza
  misc_feature (1)..(468): Homolog of NCBI NO: 15225552 NR Description: unknown protein; protein id: At2g45720.1
  misc_feature (1)..(468): Homolog of NCBI NO: 18378889 NR Description: expressed protein; protein id: At1g01830.1, by cDNA: gi_16604588, supported by cDNA: gi_20258992 [Arabidopsis >gi|16604589|gb|AAL24151.1| unknown protein [Arabidopsis
  misc_feature (1)..(468): Homolog of NCBI NO: 25518344 NR Description: hypothetical protein T1N6.25 [imported] - thaliana >gi|8671849|gb|AAF78412.1|AC009273_18 Contains to an unknown protein F17K2.25 gi|7485635 from Arabidopsis
MQSDLDVMAGKFDGHTRNLSRIYSAGILSHGFAIVVLKPNGNACKDDMRFYIRDLLTRMKIGDLEMKKQALVKLNEAMEEDDRYVKILIEISDMVNVLVGFLDSEIGIQEESAKAVFFISGFGSYRDVLIRSGVIGPLVRVLENGNGVGREASARCLMKLTENSENAWSVSAHGGVSALLKICSCSDFGGELIGTSCGVLRNLVGVEEIKRFMIEEDHTVATFIKLIGSKEEIVQVNSIDLLLSMCCKDEQTRDILVREGGIQELVSVLSDPNSLSSSKSKEIALRAIDNLCFGSAGCLNALMGCKFLDHLLNLLRNGEISVQESALKVTSRLCSLQEEVKRIMGEAGFMPELVKFLDAKSIDVREMASVALYCLISVPRNRKKFAQDDFNISYILQLLDHEDGSNVSSDSGNTKFLISILMSLTSCNSARRKIASSGYLKSIEKLAETEGSDAKKLVKKLSMNRFRSILSGIWHS

SEQ ID NO: 90285 - protein, 469 aa, Arabidopsis thaliana
  peptide (1)..(469): Ceres Seq. ID no. 12723365
  misc_feature (242)..(286): Pfam Name: Armadillo/beta-catenin-like repeat Pfam Description: Armadillo/beta-catenin-like repeat
  misc_feature (1)..(469): Homolog of NCBI NO: 18407140 NR Description: expressed protein; protein id: At1g61350.1, by cDNA: gi_16209657, supported by cDNA: gi_18700124 [Arabidopsis
  misc_feature (1)..(469): Homolog of NCBI NO: 16209658 NR Description: At1g61350/T1F9_16 [Arabidopsis thaliana]
  misc_feature (1)..(467): Homolog of NCBI NO: 34394021 NR Description: arm repeat containing protein-like [Oryza sativa
  misc_feature (1)..(464): Homolog of NCBI NO: 15241309 NR Description: putative protein; protein id: At5g50900.1, by cDNA: gi_14532769 [Arabidopsis thaliana] gene_id:K3K7.4~pir||T02475~similar to unknown protein
  misc_feature (1)..(464): Homolog of NCBI NO: 14532770 NR Description: unknown protein [Arabidopsis thaliana]
  misc_feature (1)..(462): Homolog of NCBI NO: 15224987 NR Description: hypothetical protein; protein id: At2g05810.1, by cDNA: gi_20466607 [Arabidopsis thaliana]
  misc_feature (1)..(464): Homolog of NCBI NO: 37536190 NR Description: putative arm repeat containing protein [Oryza
  misc_feature (1)..(461): Homolog of NCBI NO: 15225552 NR Description: unknown protein; protein id: At2g45720.1
  misc_feature (1)..(461): Homolog of NCBI NO: 18378889 NR Description: expressed protein; protein id: At1g01830.1, by cDNA: gi_16604588, supported by cDNA: gi_20258992 [Arabidopsis >gi|16604589|gb|AAL24151.1| unknown protein [Arabidopsis
  misc_feature (1)..(461): Homolog of NCBI NO: 25518344 NR Description: hypothetical protein T1N6.25 [imported] - thaliana >gi|8671849|gb|AAF78412.1|AC009273_18 Contains to an unknown protein F17K2.25 gi|7485635 from Arabidopsis
MAGKFDGHTRNLSRIYSAGILSHGFAIVVLKPNGNACKDDMRFYIRDLLTRMKIGDLEMKKQALVKLNEAMEEDDRYVKILIEISDMVNVLVGFLDSEIGIQEESAKAVFFISGFGSYRDVLIRSGVIGPLVRVLENGNGVGREASARCLMKLTENSENAWSVSAHGGVSALLKICSCSDFGGELIGTSCGVLRNLVGVEEIKRFMIEEDHTVATFIKLIGSKEEIVQVNSIDLLLSMCCKDEQTRDILVREGGIQELVSVLSDPNSLSSSKSKEIALRAIDNLCFGSAGCLNALMGCKFLDHLLNLLRNGEISVQESALKVTSRLCSLQEEVKRIMGEAGFMPELVKFLDAKSIDVREMASVALYCLISVPRNRKKFAQDDFNISYILQLLDHEDGSNVSSDSGNTKFLISILMSLTSCNSARRKIASSGYLKSIEKLAETEGSDAKKLVKKLSMNRFRSILSGIWHS

SEQ ID NO: 90286 - DNA, 2415 bp, Arabidopsis thaliana
  misc_feature (1)..(2415): Ceres Seq. ID no. 12723377
  misc_feature: MA Experiment ID: 20000315 Result: Down-regulated in Transcription
  misc_feature: MA Experiment 20000315 PARAMETER Experiment Name: At_14day_Shoots-Roots_Sub_P Parameter: Age (day) Value: 14
  misc_feature: MA Experiment 20000315 PARAMETER Experiment Name: At_14day_Shoots-Roots_Sub_P Parameter: Organism Value: A. thaliana
  misc_feature: MA Experiment 20000315 PARAMETER Experiment Name: At_14day_Shoots-Roots_Sub_P Parameter: Plant Line Value: WS
  misc_feature: MA Experiment 20000315 PARAMETER Experiment Name: At_14day_Shoots-Roots_Sub_P Parameter: Tissue Value: Shoots vs. Whole Plant
atgatgacgaggtttgcttgtttgcacctctttaccatgttcttgtttaccttgctctcaggttcaagttctgcagttataacgacagaaagtcctttgtcaatgggacaaactctcagctccgctaatgaggtttatgaattggggttcttcagtcctaataacacccaagatcagtatgttggaatctggttcaaggataccattccccgggttgttgtgtgggtggccaatagagagaagcctgttacagactctacggcatatctagctataagcagcagtggaagtcttctgttacttaatggcaaacatggcactgtgtggtctagtggagtaactttttcctctagcgggtgtcgtgcagagctttcagatagcggaaatcttaaggtcatagataatgtttcggaaagagctctgtggcaaagctttgatcatcttggggatacactgctacatacctcatccctgacgtataacctcgccaccgctgagaagcgggtgttgacttcttggaaaagttacaccgatccatcacctggcgactttttgggccagattacacctcaagtgccatcacaggggttcgttatgagagggtcaacgccttactggagaagcggtccatgggctaaaacaaggttcactgggataccgtttatggatgaatcatacacaggtccattcacccttcaccaggatgtaaacgggtcaggatacttgacttattttcaaagagactacaaactttcacgtataactttaacatcagagggatcaataaagatgtttcgggataatggaatgggctgggaattgtactatgaggctccaaaaaaattatgcgatttttatggtgcgtgtggaccatttgggttgtgtgttatgtcaccttctcccatgtgtaaatgcttcagaggttttgtaccaaaatctgttgaggagtggaaaaggggaaactggactggtggttgtgtgaggcataccgaactagattgtctaggaaactctactggcgaagatgcagatgacttccatcaaattgccaacataaagcctccagacttttatgaatttgcaagttctgtgaatgctgaagaatgccaccaacgttgcgtccacaattgttcttgcttggcatttgcttatattaagggaatagggtgcctagtgtggaaccaggacctaatggatgccgtacaattttctgcaacaggagaacttctttccattcgtcttgcacgatctgagctagatggaaataagcgcaagaagactattgttgctagtatagtgagcctgactctattcatgatcttgggcttcactgcgtttggtgtctggagatgcagagtggaacatatcgctcatatatcaaaggatgcatggaagaatgatctgaaaccacaagatgtcccaggtttagatttctttgatatgcataccattcaaaacgccaccaataattttagtctatcaaacaaactcggacaaggtggatttggttcagtttacaagggaaagctgcaagatgggaaagaaattgctgttaaacggctttctagcagctctggacagggaaaagaggagtttatgaatgaaatagtactcatctcaaaactccaacacagaaacttagtcagggttttgggatgttgcatcgaagaagaagagaagctattgatttatgagtttatggtgaacaaaagccttgatacctttctctttgattcaagaaaaaggctggagattgattggccaaaaagatttgatatcattcaaggtattgcacgtggacttctctatctccaccatgactcacgcctcagagttattcaccgagacctgaaggtcagcaacatccttctggatgagaaaatgaacccaaaaatatcagattttggattggctcggatgtatcaggggaccgaatatcaggataacactcgcagggttgtaggaactctaggatatatgtctccagagtatgcatggactgggatgttctctgagaaatctgacatctacagcttcggagttctaatgttagaaatcatcagtggagagaagatctcaagattcagctatggcgtagaaggaaaaacccttattgcatatgcgtgggaatcttggtctgaatacagaggaattgatcttttggaccaagatcttgctgattcatgtcacccattagaagttgggagatgtattcaaatcggcttgctctgtgtacaacaccaacctgcagacagacccaacacacttgagttgctggctatgctcaccacaacatcagatcttccatcaccaaaacaacccacatttgcatttcacacgagagatgacgaatcactgtctaacgatttgatcaccgtcaatgggatgacgcaatctgtgatccttgggcgttaa

SEQ ID NO: 90287 - protein, 804 aa, Arabidopsis thaliana
  peptide (1)..(804): Ceres Seq. ID no. 12723378
  misc_feature (70)..(180): Pfam Name: D-mannose binding lectin Pfam Description: D-mannose binding lectin
  misc_feature (10)..(804): Homolog of NCBI NO: 30682152 NR Description: S-locus protein kinase, putative [Arabidopsis
  misc_feature (10)..(804): Homolog of NCBI NO: 30682149 NR Description: S-locus protein kinase, putative [Arabidopsis
  misc_feature (247)..(680): Homolog of NCBI NO: 30696575 NR Description: S-locus protein kinase, putative [Arabidopsis
  misc_feature (683)..(804): Homolog of NCBI NO: 30696575 NR Description: S-locus protein kinase, putative [Arabidopsis
  misc_feature (152)..(220): Homolog of NCBI NO: 30696575 NR Description: S-locus protein kinase, putative [Arabidopsis
  misc_feature (5)..(452): Homolog of NCBI NO: 30314606 NR Description: S receptor kinase [Brassica rapa]
  misc_feature (476)..(804): Homolog of NCBI NO: 30314606 NR Description: S receptor kinase [Brassica rapa]
  misc_feature (10)..(418): Homolog of NCBI NO: 15220351 NR Description: receptor kinase, putative; protein id:
  misc_feature (476)..(804): Homolog of NCBI NO: 15220351 NR Description: receptor kinase, putative; protein id:
  misc_feature (33)..(776): Homolog of NCBI NO: 25956275 NR Description: unnamed protein product [Lotus japonicus]
MMTRFACLHLFTMFLFTLLSGSSSAVITTESPLSMGQTLSSANEVYELGFFSPNNTQDQYVGIWFKDTIPRVVVWVANREKPVTDSTAYLAISSSGSLLLLNGKHGTVWSSGVTFSSSGCRAELSDSGNLKVIDNVSERALWQSFDHLGDTLLHTSSLTYNLATAEKRVLTSWKSYTDPSPGDFLGQITPQVPSQGFVMRGSTPYWRSGPWAKTRFTGIPFMDESYTGPFTLHQDVNGSGYLTYFQRDYKLSRITLTSEGSIKMFRDNGMGWELYYEAPKKLCDFYGACGPFGLCVMSPSPMCKCFRGFVPKSVEEWKRGNWTGGCVRHTELDCLGNSTGEDADDFHQIANIKPPDFYEFASSVNAEECHQRCVHNCSCLAFAYIKGIGCLVWNQDLMDAVQFSATGELLSIRLARSELDGNKRKKTIVASIVSLTLFMILGFTAFGVWRCRVEHIAHISKDAWKNDLKPQDVPGLDFFDMHTIQNATNNFSLSNKLGQGGFGSVYKGKLQDGKEIAVKRLSSSSGQGKEEFMNEIVLISKLQHRNLVRVLGCCIEEEEKLLIYEFMVNKSLDTFLFDSRKRLEIDWPKRFDIIQGIARGLLYLHHDSRLRVIHRDLKVSNILLDEKMNPKISDFGLARMYQGTEYQDNTRRVVGTLGYMSPEYAWTGMFSEKSDIYSFGVLMLEIISGEKISRFSYGVEGKTLIAYAWESWSEYRGIDLLDQDLADSCHPLEVGRCIQIGLLCVQHQPADRPNTLELLAMLTTTSDLPSPKQPTFAFHTRDDESLSNDLITVNGMTQSVILGR

SEQ ID NO: 90288 - protein, 803 aa, Arabidopsis thaliana
  peptide (1)..(803): Ceres Seq. ID no. 12723379
  misc_feature (69)..(179): Pfam Name: D-mannose binding lectin Pfam Description: D-mannose binding lectin
  misc_feature (9)..(803): Homolog of NCBI NO: 30682152 NR Description: S-locus protein kinase, putative [Arabidopsis
  misc_feature (9)..(803): Homolog of NCBI NO: 30682149 NR Description: S-locus protein kinase, putative [Arabidopsis
  misc_feature (246)..(679): Homolog of NCBI NO: 30696575 NR Description: S-locus protein kinase, putative [Arabidopsis
  misc_feature (682)..(803): Homolog of NCBI NO: 30696575 NR Description: S-locus protein kinase, putative [Arabidopsis
  misc_feature (151)..(219): Homolog of NCBI NO: 30696575 NR Description: S-locus protein kinase, putative [Arabidopsis
  misc_feature (4)..(451): Homolog of NCBI NO: 30314606 NR Description: S receptor kinase [Brassica rapa]
  misc_feature (475)..(803): Homolog of NCBI NO: 30314606 NR Description: S receptor kinase [Brassica rapa]
  misc_feature (9)..(417): Homolog of NCBI NO: 15220351 NR Description: receptor kinase, putative; protein id:
  misc_feature (475)..(803): Homolog of NCBI NO: 15220351 NR Description: receptor kinase, putative; protein id:
  misc_feature (32)..(775): Homolog of NCBI NO: 25956275 NR Description: unnamed protein product [Lotus japonicus]
MTRFACLHLFTMFLFTLLSGSSSAVITTESPLSMGQTLSSANEVYELGFFSPNNTQDQYVGIWFKDTIPRVVVWVANREKPVTDSTAYLAISSSGSLLLLNGKHGTVWSSGVTFSSSGCRAELSDSGNLKVIDNVSERALWQSFDHLGDTLLHTSSLTYNLATAEKRVLTSWKSYTDPSPGDFLGQITPQVPSQGFVMRGSTPYWRSGPWAKTRFTGIPFMDESYTGPFTLHQDVNGSGYLTYFQRDYKLSRITLTSEGSIKMFRDNGMGWELYYEAPKKLCDFYGACGPFGLCVMSPSPMCKCFRGFVPKSVEEWKRGNWTGGCVRHTELDCLGNSTGEDADDFHQIANIKPPDFYEFASSVNAEECHQRCVHNCSCLAFAYIKGIGCLVWNQDLMDAVQFSATGELLSIRLARSELDGNKRKKTIVASIVSLTLFMILGFTAFGVWRCRVEHIAHISKDAWKNDLKPQDVPGLDFFDMHTIQNATNNFSLSNKLGQGGFGSVYKGKLQDGKEIAVKRLSSSSGQGKEEFMNEIVLISKLQHRNLVRVLGCCIEEEEKLLIYEFMVNKSLDTFLFDSRKRLEIDWPKRFDIIQGIARGLLYLHHDSRLRVIHRDLKVSNILLDEKMNPKISDFGLARMYQGTEYQDNTRRVVGTLGYMSPEYAWTGMFSEKSDIYSFGVLMLEIISGEKISRFSYGVEGKTLIAYAWESWSEYRGIDLLDQDLADSCHPLEVGRCIQIGLLCVQHQPADRPNTLELLAMLTTTSDLPSPKQPTFAFHTRDDESLSNDLITVNGMTQSVILGR

SEQ ID NO: 90289 - protein, 792 aa, Arabidopsis thaliana
  peptide (1)..(792): Ceres Seq. ID no. 12723380
  misc_feature (58)..(168): Pfam Name: D-mannose binding lectin Pfam Description: D-mannose binding lectin
  misc_feature (1)..(792): Homolog of NCBI NO: 30682152 NR Description: S-locus protein kinase, putative [Arabidopsis
  misc_feature (1)..(792): Homolog of NCBI NO: 30682149 NR Description: S-locus protein kinase, putative [Arabidopsis
  misc_feature (235)..(668): Homolog of NCBI NO: 30696575 NR Description: S-locus protein kinase, putative [Arabidopsis
  misc_feature (671)..(792): Homolog of NCBI NO: 30696575 NR Description: S-locus protein kinase, putative [Arabidopsis
  misc_feature (140)..(208): Homolog of NCBI NO: 30696575 NR Description: S-locus protein kinase, putative [Arabidopsis
  misc_feature (1)..(440): Homolog of NCBI NO: 30314606 NR Description: S receptor kinase [Brassica rapa]
  misc_feature (464)..(792): Homolog of NCBI NO: 30314606 NR Description: S receptor kinase [Brassica rapa]
  misc_feature (1)..(406): Homolog of NCBI NO: 15220351 NR Description: receptor kinase, putative; protein id:
  misc_feature (464)..(792): Homolog of NCBI NO: 15220351 NR Description: receptor kinase, putative; protein id:
  misc_feature (21)..(764): Homolog of NCBI NO: 25956275 NR Description: unnamed protein product [Lotus japonicus]
MFLFTLLSGSSSAVITTESPLSMGQTLSSANEVYELGFFSPNNTQDQYVGIWFKDTIPRVVVWVANREKPVTDSTAYLAISSSGSLLLLNGKHGTVWSSGVTFSSSGCRAELSDSGNLKVIDNVSERALWQSFDHLGDTLLHTSSLTYNLATAEKRVLTSWKSYTDPSPGDFLGQITPQVPSQGFVMRGSTPYWRSGPWAKTRFTGIPFMDESYTGPFTLHQDVNGSGYLTYFQRDYKLSRITLTSEGSIKMFRDNGMGWELYYEAPKKLCDFYGACGPFGLCVMSPSPMCKCFRGFVPKSVEEWKRGNWTGGCVRHTELDCLGNSTGEDADDFHQIANIKPPDFYEFASSVNAEECHQRCVHNCSCLAFAYIKGIGCLVWNQDLMDAVQFSATGELLSIRLARSELDGNKRKKTIVASIVSLTLFMILGFTAFGVWRCRVEHIAHISKDAWKNDLKPQDVPGLDFFDMHTIQNATNNFSLSNKLGQGGFGSVYKGKLQDGKEIAVKRLSSSSGQGKEEFMNEIVLISKLQHRNLVRVLGCCIEEEEKLLIYEFMVNKSLDTFLFDSRKRLEIDWPKRFDIIQGIARGLLYLHHDSRLRVIHRDLKVSNILLDEKMNPKISDFGLARMYQGTEYQDNTRRVVGTLGYMSPEYAWTGMFSEKSDIYSFGVLMLEIISGEKISRFSYGVEGKTLIAYAWESWSEYRGIDLLDQDLADSCHPLEVGRCIQIGLLCVQHQPADRPNTLELLAMLTTTSDLPSPKQPTFAFHTRDDESLSNDLITVNGMTQSVILGR

SEQ ID NO: 90290 - DNA, 1942 bp, Arabidopsis thaliana
  misc_feature (1)..(1942): Ceres Seq. ID no. 12723381
  misc_feature: MA Experiment ID: 20000185 Result: Up-regulated in Transcription
  misc_feature: MA Experiment 20000185 PARAMETER Experiment Name: At_Roots__P Parameter: Age (day) Value: 7 vs. 21
  misc_feature: MA Experiment 20000185 PARAMETER Experiment Name: At_Roots__P Parameter: Organism Value: A. thaliana
  misc_feature: MA Experiment 20000185 PARAMETER Experiment Name: At_Roots__P Parameter: Tissue Value: Roots vs. Whole Plant
  misc_feature: MA Experiment ID: 20000227 Result: Down-regulated in Transcription
  misc_feature: MA Experiment 20000227 PARAMETER Experiment Name: At_Root-Tips-vs-Tops_P Parameter: Tissue Value: Root Tips vs. Root Tops
  misc_feature: MA Experiment ID: 20000286 Result: Up-regulated in Transcription
  misc_feature: MA Experiment 20000286 PARAMETER Experiment Name: At_Open_Flower_P Parameter: Age (day) Value: 21
  misc_feature: MA Experiment 20000286 PARAMETER Experiment Name: At_Open_Flower_P Parameter: Plant Line Value: WS
  misc_feature: MA Experiment 20000286 PARAMETER Experiment Name: At_Open_Flower_P Parameter: Tissue Value: Half Open vs. Whole Plant
  misc_feature: MA Experiment ID: 20000439 Result: Up-regulated in Transcription
  misc_feature: MA Experiment 20000439 PARAMETER Experiment Name: At_Roots__P Parameter: Age (day) Value: 14 vs. 21
  misc_feature: MA Experiment 20000439 PARAMETER Experiment Name: At_Roots__P Parameter: Organism Value: A. thaliana
  misc_feature: MA Experiment 20000439 PARAMETER Experiment Name: At_Roots__P Parameter: Tissue Value: Roots vs. Whole Plant
  misc_feature: MA Experiment ID: 20000443 Result: Down-regulated in Transcription
  misc_feature: MA Experiment 20000443 PARAMETER Experiment Name: At_1uM_BR-BRZ__P Parameter: Tissue Value: Shoot Apices
  misc_feature: MA Experiment 20000443 PARAMETER Experiment Name: At_1uM_BR-BRZ__P Parameter: Treatment Value: 1uM BRZ vs. No Treatment
  misc_feature: MA Experiment ID: 20000527 Result: Down-regulated in Transcription
  misc_feature: MA Experiment 20000527 PARAMETER Experiment Name: At_10percent_PEG_P Parameter: Age (day) Value: 20
  misc_feature: MA Experiment 20000527 PARAMETER Experiment Name: At_10percent_PEG_P Parameter: Organism Value: A. thaliana
  misc_feature: MA Experiment 20000527 PARAMETER Experiment Name: At_10percent_PEG_P Parameter: Plant Line Value: WS
  misc_feature: MA Experiment 20000527 PARAMETER Experiment Name: At_10percent_PEG_P Parameter: Timepoint (day) Value: 20
  misc_feature: MA Experiment 20000527 PARAMETER Experiment Name: At_10percent_PEG_P Parameter: Tissue Value: Whole Plant
  misc_feature: MA Experiment 20000527 PARAMETER Experiment Name: At_10percent_PEG_P Parameter: Treatment Value: 10percent PEG vs. No Treatment
ctgtgagttctaatggcggatcaagttaaagaaaagacattggaggaaacttctacatgggccgtcgcggtggtttgcttcgtcttgcttctgatttcgatcgttattgaaaaacttattcataaaattggatcctggtttaaaaagaagaacaaaaaagctctatatgaagcacttgaaaaagtgaaagcagagcttatgctgatgggattcatatcactacttctaacaattggacaaggatatatctcaaatatttgcatccctaagaacatcgcagcatcgatgcacccttgtagtgcatccgaagaagcaagaaagtatggtaagaaagatgtcccaaaggaagatgaagaagaaaacttgcgtcgaaagcttctacagttagttgattctcttattcctcgaaggagtttggctactaaaggttatgataagtgtgcagagaagggaaaagtcgcttttgtatcggcttatggcatgcatcagctgcatatattcatctttgttcttgcggtttgtcatgtgatctactgcattgttacttatgctttgggaaagaccaaaatgagaaggtggaagaagtgggaagaggagactaagactatcgaatatcagtattcacacgatcccgagaggtttaggtttgcgcgggatacatctttcgggcgtagacatctgagtttctggagcaaatcaactattacgctgtggattgtatgtttcttcaggcagttctttagatctgtaaccaaagttgattacttaacactgagacatggtttcatcatggcccatttggctcctgggagcgacgcaaggttcgatttccgaaagtatattcagagatcactagaggaagacttcaaaaccattgtcgagatcaaccctgtgatctggttcatagctgtgctattcctcctgacaaacacaaacggattgaattcttacctctggctaccgttcattcccttcatcgtgattcttattgttggaacaaaacttcaagtgataataacaaaactaggacttagaatccaagagaaaggcgacgtagtgaaaggcacaccgctagttcaacccggtgatcatttcttctggttcggtcgtccacgtttcattctcttcctcattcacttagtcctcttcacgaacgcgtttcaactagctttctttgtctggagtacgtatgaattcggtctaaagaactgtttccatgaaagcagagttgacgtgatcatcagaatctcaatcggacttttagttcagattctttgcagctacgttactcttcctctatatgctcttgttactcaaatgggttcaaagatgaaaccaacagtgttcaacgagagagtagcaacagcgttaaagagttggcatcacacagctaagaaaaatatcaaacatggaagaacttcagaatcaacaacacctttctctagtagaccaacaacaccaactcatggttcttctccgattcatctccttcgtaatgctcctcacaaacgaagcagaagcgttgacgaaagctttgcgaattcgttttctccgagaaactctgatttcgattcgtgggatcctgagtctcaacatgaaactgctgagacttcgaattcgaatcatcgttctaggtttggagaagaagaatcggagaaaaagtttgtttcttcatcagtggaacttcctcctggacctggacaaatacgaacacagcatgagattagtactataagcttaagggatttttcgtttaagcgatgatttaatgttttcttaattcattatttagtgatttgttaatatgctaaatgaaaccagttcttgtaaattttctatactatgtttgttaaaaccagcccttgaagctttaatttctcaatgtaaaagtctgatgattttggattttaagactatggagattcatgggtagttggtgaag

SEQ ID NO: 90291 - protein, 583 aa, Arabidopsis thaliana
  peptide (1)..(583): Ceres Seq. ID no. 12723382
  misc_feature (1)..(583): Homolog of NCBI NO: 15220529 NR Description: Mlo protein, putative; protein id: At1g61560.1, by cDNA: gi_14091581 [Arabidopsis thaliana]
  misc_feature (1)..(583): Homolog of NCBI NO: 15220339 NR Description: Mlo protein, putative; protein id: At1g11310.1, by cDNA: 259664., supported by cDNA: gi_14091573, supported by gi_15809945 [Arabidopsis thaliana] >gi|25346298|pir||B86247
  misc_feature (5)..(583): Homolog of NCBI NO: 18404979 NR Description: similar to Mlo proteins from H. vulgare; protein At2g39200.1, supported by cDNA: gi_14091593 [Arabidopsis
  misc_feature (5)..(583): Homolog of NCBI NO: 7487052 NR Description: H. vulgare Mlo protein homolog [imported] -
  misc_feature (8)..(514): Homolog of NCBI NO: 6063540 NR Description: similar to OsMlo-h1. (Z95353) [Oryza sativa
  misc_feature (8)..(514): Homolog of NCBI NO: 15290605 NR Description: seven transmembrane protein MLO2 [Oryza sativa
  misc_feature (8)..(436): Homolog of NCBI NO: 23306124 NR Description: Putative OsMlo-h1 [Oryza sativa (japonica
  misc_feature (435)..(514): Homolog of NCBI NO: 23306124 NR Description: Putative OsMlo-h1 [Oryza sativa (japonica
  misc_feature (8)..(495): Homolog of NCBI NO: 14718604 NR Description: Mlo [Oryza sativa]
  misc_feature (132)..(505): Homolog of NCBI NO: 22261804 NR Description: MLO protein homolog 1
MADQVKEKTLEETSTWAVAVVCFVLLLISIVIEKLIHKIGSWFKKKNKKALYEALEKVKAELMLMGFISLLLTIGQGYISNICIPKNIAASMHPCSASEEARKYGKKDVPKEDEEENLRRKLLQLVDSLIPRRSLATKGYDKCAEKGKVAFVSAYGMHQLHIFIFVLAVCHVIYCIVTYALGKTKMRRWKKWEEETKTIEYQYSHDPERFRFARDTSFGRRHLSFWSKSTITLWIVCFFRQFFRSVTKVDYLTLRHGFIMAHLAPGSDARFDFRKYIQRSLEEDFKTIVEINPVIWFIAVLFLLTNTNGLNSYLWLPFIPFIVILIVGTKLQVIITKLGLRIQEKGDVVKGTPLVQPGDHFFWFGRPRFILFLIHLVLFTNAFQLAFFVWSTYEFGLKNCFHESRVDVIIRISIGLLVQILCSYVTLPLYALVTQMGSKMKPTVFNERVATALKSWHHTAKKNIKHGRTSESTTPFSSRPTTPTHGSSPIHLLRNAPHKRSRSVDESFANSFSPRNSDFDSWDPESQHETAETSNSNHRSRFGEEESEKKFVSSSVELPPGPGQIRTQHEISTISLRDFSFKR

SEQ ID NO: 90292 - protein, 521 aa, Arabidopsis thaliana
  peptide (1)..(521): Ceres Seq. ID no. 12723383
  misc_feature (1)..(521): Homolog of NCBI NO: 15220529 NR Description: Mlo protein, putative; protein id: At1g61560.1, by cDNA: gi_14091581 [Arabidopsis thaliana]
  misc_feature (1)..(521): Homolog of NCBI NO: 15220339 NR Description: Mlo protein, putative; protein id: At1g11310.1, by cDNA: 259664., supported by cDNA: gi_14091573, supported by gi_15809945 [Arabidopsis thaliana] >gi|25346298|pir||B86247
  misc_feature (1)..(521): Homolog of NCBI NO: 18404979 NR Description: similar to Mlo proteins from H. vulgare; protein At2g39200.1, supported by cDNA: gi_14091593 [Arabidopsis
  misc_feature (1)..(521): Homolog of NCBI NO: 7487052 NR Description: H. vulgare Mlo protein homolog [imported] -
  misc_feature (1)..(452): Homolog of NCBI NO: 6063540 NR Description: similar to OsMlo-h1. (Z95353) [Oryza sativa
  misc_feature (1)..(452): Homolog of NCBI NO: 15290605 NR Description: seven transmembrane protein MLO2 [Oryza sativa
  misc_feature (1)..(374): Homolog of NCBI NO: 23306124 NR Description: Putative OsMlo-h1 [Oryza sativa (japonica
  misc_feature (373)..(452): Homolog of NCBI NO: 23306124 NR Description: Putative OsMlo-h1 [Oryza sativa (japonica
  misc_feature (1)..(433): Homolog of NCBI NO: 14718604 NR Description: Mlo [Oryza sativa]
  misc_feature (70)..(443): Homolog of NCBI NO: 22261804 NR Description: MLO protein homolog 1
MLMGFISLLLTIGQGYISNICIPKNIAASMHPCSASEEARKYGKKDVPKEDEEENLRRKLLQLVDSLIPRRSLATKGYDKCAEKGKVAFVSAYGMHQLHIFIFVLAVCHVIYCIVTYALGKTKMRRWKKWEEETKTIEYQYSHDPERFRFARDTSFGRRHLSFWSKSTITLWIVCFFRQFFRSVTKVDYLTLRHGFIMAHLAPGSDARFDFRKYIQRSLEEDFKTIVEINPVIWFIAVLFLLTNTNGLNSYLWLPFIPFIVILIVGTKLQVIITKLGLRIQEKGDVVKGTPLVQPGDHFFWFGRPRFILFLIHLVLFTNAFQLAFFVWSTYEFGLKNCFHESRVDVIIRISIGLLVQILCSYVTLPLYALVTQMGSKMKPTVFNERVATALKSWHHTAKKNIKHGRTSESTTPFSSRPTTPTHGSSPIHLLRNAPHKRSRSVDESFANSFSPRNSDFDSWDPESQHETAETSNSNHRSRFGEEESEKKFVSSSVELPPGPGQIRTQHEISTISLRDFSFKR

SEQ ID NO: 90293 - protein, 519 aa, Arabidopsis thaliana
  peptide (1)..(519): Ceres Seq. ID no. 12723384
  misc_feature (1)..(519): Homolog of NCBI NO: 15220529 NR Description: Mlo protein, putative; protein id: At1g61560.1, by cDNA: gi_14091581 [Arabidopsis thaliana]
  misc_feature (1)..(519): Homolog of NCBI NO: 15220339 NR Description: Mlo protein, putative; protein id: At1g11310.1, by cDNA: 259664., supported by cDNA: gi_14091573, supported by gi_15809945 [Arabidopsis thaliana] >gi|25346298|pir||B86247
  misc_feature (1)..(519): Homolog of NCBI NO: 18404979 NR Description: similar to Mlo proteins from H. vulgare; protein At2g39200.1, supported by cDNA: gi_14091593 [Arabidopsis
  misc_feature (1)..(519): Homolog of NCBI NO: 7487052 NR Description: H. vulgare Mlo protein homolog [imported] -
  misc_feature (1)..(450): Homolog of NCBI NO: 6063540 NR Description: similar to OsMlo-h1. (Z95353) [Oryza sativa
  misc_feature (1)..(450): Homolog of NCBI NO: 15290605 NR Description: seven transmembrane protein MLO2 [Oryza sativa
  misc_feature (1)..(372): Homolog of NCBI NO: 23306124 NR Description: Putative OsMlo-h1 [Oryza sativa (japonica
  misc_feature (371)..(450): Homolog of NCBI NO: 23306124 NR Description: Putative OsMlo-h1 [Oryza sativa (japonica
  misc_feature (1)..(431): Homolog of NCBI NO: 14718604 NR Description: Mlo [Oryza sativa]
  misc_feature (68)..(441): Homolog of NCBI NO: 22261804 NR Description: MLO protein homolog 1
MGFISLLLTIGQGYISNICIPKNIAASMHPCSASEEARKYGKKDVPKEDEEENLRRKLLQLVDSLIPRRSLATKGYDKCAEKGKVAFVSAYGMHQLHIFIFVLAVCHVIYCIVTYALGKTKMRRWKKWEEETKTIEYQYSHDPERFRFARDTSFGRRHLSFWSKSTITLWIVCFFRQFFRSVTKVDYLTLRHGFIMAHLAPGSDARFDFRKYIQRSLEEDFKTIVEINPVIWFIAVLFLLTNTNGLNSYLWLPFIPFIVILIVGTKLQVIITKLGLRIQEKGDVVKGTPLVQPGDHFFWFGRPRFILFLIHLVLFTNAFQLAFFVWSTYEFGLKNCFHESRVDVIIRISIGLLVQILCSYVTLPLYALVTQMGSKMKPTVFNERVATALKSWHHTAKKNIKHGRTSESTTPFSSRPTTPTHGSSPIHLLRNAPHKRSRSVDESFANSFSPRNSDFDSWDPESQHETAETSNSNHRSRFGEEESEKKFVSSSVELPPGPGQIRTQHEISTISLRDFSFKR

SEQ ID NO: 90294 - DNA, 1863 bp, Arabidopsis thaliana
  misc_feature (1)..(1863): Ceres Seq. ID no. 12723420
  misc_feature: MA Experiment ID: 20000182 Result: Up-regulated in Transcription
  misc_feature: MA Experiment 20000182 PARAMETER Experiment Name: At_2mM_SA_P Parameter: Age (day) Value: 14
  misc_feature: MA Experiment 20000182 PARAMETER Experiment Name: At_2mM_SA_P Parameter: Organism Value: A. thaliana
  misc_feature: MA Experiment 20000182 PARAMETER Experiment Name: At_2mM_SA_P Parameter: Plant Line Value: WS
  misc_feature: MA Experiment 20000182 PARAMETER Experiment Name: At_2mM_SA_P Parameter: Timepoint (hr) Value: 6
  misc_feature: MA Experiment 20000182 PARAMETER Experiment Name: At_2mM_SA_P Parameter: Tissue Value: Aerial
  misc_feature: MA Experiment 20000182 PARAMETER Experiment Name: At_2mM_SA_P Parameter: Treatment Value: 2mM SA vs. No Treatment
  misc_feature: MA Experiment ID: 20000184 Result: Down-regulated in Transcription
  misc_feature: MA Experiment 20000184 PARAMETER Experiment Name: At_Shoots__P Parameter: Age (day) Value: 7
  misc_feature: MA Experiment 20000184 PARAMETER Experiment Name: At_Shoots__P Parameter: Tissue Value: Shoots vs. Whole Plant
  misc_feature: MA Experiment ID: 20000227 Result: Up-regulated in Transcription
  misc_feature: MA Experiment 20000227 PARAMETER Experiment Name: At_Root-Tips-vs-Tops_P Parameter: Tissue Value: Root Tips vs. Root Tops
  misc_feature: MA Experiment ID: 20000437 Result: Up-regulated in Transcription
  misc_feature: MA Experiment 20000437 PARAMETER Experiment Name: At_Drought_P Parameter: Age (day) Value: 8
  misc_feature: MA Experiment 20000437 PARAMETER Experiment Name: At_Drought_P Parameter: Organism Value: A. thaliana
  misc_feature: MA Experiment 20000437 PARAMETER Experiment Name: At_Drought_P Parameter: Plant Line Value: WS
  misc_feature: MA Experiment 20000437 PARAMETER Experiment Name: At_Drought_P Parameter: Timepoint (hr) Value: 24
  misc_feature: MA Experiment 20000437 PARAMETER Experiment Name: At_Drought_P Parameter: Tissue Value: Whole Plant
  misc_feature: MA Experiment 20000437 PARAMETER Experiment Name: At_Drought_P Parameter: Treatment Value: Drought vs. No Drought
  misc_feature: MA Experiment ID: 20000495 Result: Up-regulated in Transcription
  misc_feature: MA Experiment 20000495 PARAMETER Experiment Name: At_Guard_Cells_P Parameter: Harvest Date Value: 8/2/2002
  misc_feature: MA Experiment 20000495 PARAMETER Experiment Name: At_Guard_Cells_P Parameter: Organism Value: A. thaliana
  misc_feature: MA Experiment 20000495 PARAMETER Experiment Name: At_Guard_Cells_P Parameter: Tissue Value: Guard Cells vs. Leaves
  misc_feature: MA Experiment ID: 20000527 Result: Down-regulated in Transcription
  misc_feature: MA Experiment 20000527 PARAMETER Experiment Name: At_10percent_PEG_P Parameter: Age (day) Value: 20
  misc_feature: MA Experiment 20000527 PARAMETER Experiment Name: At_10percent_PEG_P Parameter: Organism Value: A. thaliana
  misc_feature: MA Experiment 20000527 PARAMETER Experiment Name: At_10percent_PEG_P Parameter: Plant Line Value: WS
  misc_feature: MA Experiment 20000527 PARAMETER Experiment Name: At_10percent_PEG_P Parameter: Timepoint (day) Value: 20
  misc_feature: MA Experiment 20000527 PARAMETER Experiment Name: At_10percent_PEG_P Parameter: Tissue Value: Whole Plant
  misc_feature: MA Experiment 20000527 PARAMETER Experiment Name: At_10percent_PEG_P Parameter: Treatment Value: 10percent PEG vs. No Treatment
  misc_feature: MA Experiment ID: 20001906 Result: Up-regulated in Transcription
  misc_feature: MA Experiment 20001906 PARAMETER Experiment Name: At_Drought_Reproduction_P Parameter: Age (day) Value: 35
  misc_feature: MA Experiment 20001906 PARAMETER Experiment Name: At_Drought_Reproduction_P Parameter: Organism Value: A. thaliana
  misc_feature: MA Experiment 20001906 PARAMETER Experiment Name: At_Drought_Reproduction_P Parameter: Plant Line Value: WS
  misc_feature: MA Experiment 20001906 PARAMETER Experiment Name: At_Drought_Reproduction_P Parameter: Timepoint (day) Value: 5
  misc_feature: MA Experiment 20001906 PARAMETER Experiment Name: At_Drought_Reproduction_P Parameter: Tissue Value: Siliques
  misc_feature: MA Experiment 20001906 PARAMETER Experiment Name: At_Drought_Reproduction_P Parameter: Treatment Value: Drought vs. No Drought
agcttagctttctggtttttcttcttctgcaccttaaatatacgcccagaaaattcctctggtcaccaaaccaaaccaaaaccgactctttctttgaatttctgaaaggaaacgataagggtttcgagaaaaatcattcctttttgacttaaaagacgcgtttccacatttttggcgtttcttctctgggtttgttttgtctctagacgaagacgatcacgggttttaacatattcgtgtgtacgcgtgtatctccaattttgcgaatagggtttgaagtaatcgttttgtttgtgaggataacgactcgcggggttacgcatagcaggttcctggcttctctactgtcaggaggggccttgagtctttggagttaccacagtagacagaaccccagtgggtgactttttgaaaagtcttcttgatttagtgctgcacattttcgctgtggagctacaatcagaatattagagaagatatgggaatcttttcacgcagttcaattagtaggaaatcaaaagatggaatgaagatcattgcaacggcattttttggagtaacatttggctttctgattggaatatcttttccatcattatcaatcactaaggtgagtctccctacaaactttcttccttcaaacgatctctcatatatcgaggaaaagggttcgaaaattgcaactccagaaagtcataaagcttggtcatcatcaaagggtaacgatagcagctcatctactccgattgacaaatcaaagatctgggtaccttctaatcctcgtggtgctgaaatgttgccaccgggtatggttgctgctgaatcagacttctatttgcgcagattatggggtttaccgcatgaggatttgaaaagtgaaccaagatacctcgcaacatttacagtgggtattaatcagaaagcaaatatcgatgcttgtgtcaagaagttttcagaaaacttcactattgtcctgtttcactatgacggccgggtaactgagtgggatgagtttgaatggtcaaagactgctatacacattagcgtacgaaagcagacaaaatggtggtatgcaaagaggtttttgcaccctgatattgtagcaagatatgattatatcttcgtctgggatgaagacctgggtgtcgagcattttaacgcagaagagtacgtaaagatggtgaagaagcacggcctggagatttcccaacctggcttggaaccaaaccagggactaacgtggcaaatgacaaagagacgaggagatatggaagttcacaagataacagaagaaagacctggatggtgctcagatcctcatctccctccatgtgctgcattcgtagagatcatggctcctgtattttcaagaaatgcctggcgatgcgtgtggcatgtgatccagaatgatttggtacacggttggggtcttgactttgcactcagaagatgtgttgagcctgcacatgagaagataggagtagttgattctcaatgggtcgttcatcaatcttttccttcccttggcaaccaaggtgaggcgacagacgggaaagcaccatggcaaggggtgagggatagatgcaaaaaggaatggacaatgttccagagtagaatggctaacgcagagaaggattatttcaaatccttacaagtagaaggctcctcaaattcaacagccacaaccatttaataggagagttcttaaagtagctagacgctgacagattcagttttactagtgcgttcttgcatttacatatagagtctgtatatgttaatgtagtagatattacccatcactacaaaatcatcaccaaccttccatcgaataaacaaaaaaagatgaatgttttgaaccgc

SEQ ID NO: 90295 - protein, 404 aa, Arabidopsis thaliana
  peptide (1)..(404): Ceres Seq. ID no. 12723421
  misc_feature (94)..(394): Pfam Name: Protein of unknown function (DUF707) Pfam Description: Protein of unknown function (DUF707)
  misc_feature (1)..(404): Homolog of NCBI NO: 18408876 NR Description: F12A21.2; protein id: At1g67850.1, supported by gi_14326581 [Arabidopsis thaliana] At1g67850/F12A21_2 [Arabidopsis thaliana]
  misc_feature (91)..(404): Homolog of NCBI NO: 11072034 NR Description: F12A21.2 [Arabidopsis thaliana]
  misc_feature (1)..(388): Homolog of NCBI NO: 34906848 NR Description: P0470A12.1 [Oryza sativa (japonica
  misc_feature (5)..(391): Homolog of NCBI NO: 22329525 NR Description: unknown protein; protein id: At1g13000.1, by cDNA: gi_18175818, supported by cDNA: gi_20465546 [Arabidopsis >gi|18175819|gb|AAL59933.1| unknown protein [Arabidopsis
  misc_feature (8)..(400): Homolog of NCBI NO: 14719314 NR Description: putative protein [Oryza sativa]
  misc_feature (11)..(398): Homolog of NCBI NO: 22331371 NR Description: unknown protein; protein id: At3g27470.1, by cDNA: gi_19698930 [Arabidopsis thaliana] unknown protein [Arabidopsis thaliana]
  misc_feature (94)..(387): Homolog of NCBI NO: 30683843 NR Description: expressed protein [Arabidopsis thaliana]
  misc_feature (1)..(63): Homolog of NCBI NO: 30683843 NR Description: expressed protein [Arabidopsis thaliana]
  misc_feature (1)..(394): Homolog of NCBI NO: 18390845 NR Description: storage protein, putative; protein id: supported by cDNA: gi_15810566, supported by cDNA: gi_20259568 thaliana] >gi|15810567|gb|AAL07171.1| putative storage protein
  misc_feature (6)..(402): Homolog of NCBI NO: 16612300 NR Description: AT3g26440/F20C19_16 [Arabidopsis thaliana]
MGIFSRSSISRKSKDGMKIIATAFFGVTFGFLIGISFPSLSITKVSLPTNFLPSNDLSYIEEKGSKIATPESHKAWSSSKGNDSSSSTPIDKSKIWVPSNPRGAEMLPPGMVAAESDFYLRRLWGLPHEDLKSEPRYLATFTVGINQKANIDACVKKFSENFTIVLFHYDGRVTEWDEFEWSKTAIHISVRKQTKWWYAKRFLHPDIVARYDYIFVWDEDLGVEHFNAEEYVKMVKKHGLEISQPGLEPNQGLTWQMTKRRGDMEVHKITEERPGWCSDPHLPPCAAFVEIMAPVFSRNAWRCVWHVIQNDLVHGWGLDFALRRCVEPAHEKIGVVDSQWVVHQSFPSLGNQGEATDGKAPWQGVRDRCKKEWTMFQSRMANAEKDYFKSLQVEGSSNSTATTI

SEQ ID NO: 90296 - protein, 388 aa, Arabidopsis thaliana
  peptide (1)..(388): Ceres Seq. ID no. 12723422
  misc_feature (78)..(378): Pfam Name: Protein of unknown function (DUF707) Pfam Description: Protein of unknown function (DUF707)
  misc_feature (1)..(388): Homolog of NCBI NO: 18408876 NR Description: F12A21.2; protein id: At1g67850.1, supported by gi_14326581 [Arabidopsis thaliana] At1g67850/F12A21_2 [Arabidopsis thaliana]
  misc_feature (75)..(388): Homolog of NCBI NO: 11072034 NR Description: F12A21.2 [Arabidopsis thaliana]
  misc_feature (1)..(372): Homolog of NCBI NO: 34906848 NR Description: P0470A12.1 [Oryza sativa (japonica
  misc_feature (1)..(375): Homolog of NCBI NO: 22329525 NR Description: unknown protein; protein id: At1g13000.1, by cDNA: gi_18175818, supported by cDNA: gi_20465546 [Arabidopsis >gi|18175819|gb|AAL59933.1| unknown protein [Arabidopsis
  misc_feature (1)..(384): Homolog of NCBI NO: 14719314 NR Description: putative protein [Oryza sativa]
  misc_feature (1)..(382): Homolog of NCBI NO: 22331371 NR Description: unknown protein; protein id: At3g27470.1, by cDNA: gi_19698930 [Arabidopsis thaliana] unknown protein [Arabidopsis thaliana]
  misc_feature (78)..(371): Homolog of NCBI NO: 30683843 NR Description: expressed protein [Arabidopsis thaliana]
  misc_feature (1)..(47): Homolog of NCBI NO: 30683843 NR Description: expressed protein [Arabidopsis thaliana]
  misc_feature (1)..(378): Homolog of NCBI NO: 18390845 NR Description: storage protein, putative; protein id: supported by cDNA: gi_15810566, supported by cDNA: gi_20259568 thaliana] >gi|15810567|gb|AAL07171.1| putative storage protein
  misc_feature (1)..(386): Homolog of NCBI NO: 16612300 NR Description: AT3g26440/F20C19_16 [Arabidopsis thaliana]
MKIIATAFFGVTFGFLIGISFPSLSITKVSLPTNFLPSNDLSYIEEKGSKIATPESHKAWSSSKGNDSSSSTPIDKSKIWVPSNPRGAEMLPPGMVAAESDFYLRRLWGLPHEDLKSEPRYLATFTVGINQKANIDACVKKFSENFTIVLFHYDGRVTEWDEFEWSKTAIHISVRKQTKWWYAKRFLHPDIVARYDYIFVWDEDLGVEHFNAEEYVKMVKKHGLEISQPGLEPNQGLTWQMTKRRGDMEVHKITEERPGWCSDPHLPPCAAFVEIMAPVFSRNAWRCVWHVIQNDLVHGWGLDFALRRCVEPAHEKIGVVDSQWVVHQSFPSLGNQGEATDGKAPWQGVRDRCKKEWTMFQSRMANAEKDYFKSLQVEGSSNSTATTI

SEQ ID NO: 90297 - protein, 299 aa, Arabidopsis thaliana
  peptide (1)..(299): Ceres Seq. ID no. 12723423
  misc_feature (1)..(289): Pfam Name: Protein of unknown function (DUF707) Pfam Description: Protein of unknown function (DUF707)
  misc_feature (1)..(299): Homolog of NCBI NO: 18408876 NR Description: F12A21.2; protein id: At1g67850.1, supported by gi_14326581 [Arabidopsis thaliana] At1g67850/F12A21_2 [Arabidopsis thaliana]
  misc_feature (1)..(299): Homolog of NCBI NO: 11072034 NR Description: F12A21.2 [Arabidopsis thaliana]
  misc_feature (1)..(283): Homolog of NCBI NO: 34906848 NR Description: P0470A12.1 [Oryza sativa (japonica
  misc_feature (1)..(286): Homolog of NCBI NO: 22329525 NR Description: unknown protein; protein id: At1g13000.1, by cDNA: gi_18175818, supported by cDNA: gi_20465546 [Arabidopsis >gi|18175819|gb|AAL59933.1| unknown protein [Arabidopsis
  misc_feature (1)..(295): Homolog of NCBI NO: 14719314 NR Description: putative protein [Oryza sativa]
  misc_feature (1)..(293): Homolog of NCBI NO: 22331371 NR Description: unknown protein; protein id: At3g27470.1, by cDNA: gi_19698930 [Arabidopsis thaliana] unknown protein [Arabidopsis thaliana]
  misc_feature (1)..(282): Homolog of NCBI NO: 30683843 NR Description: expressed protein [Arabidopsis thaliana]
  misc_feature (1)..(289): Homolog of NCBI NO: 18390845 NR Description: storage protein, putative; protein id: supported by cDNA: gi_15810566, supported by cDNA: gi_20259568 thaliana] >gi|15810567|gb|AAL07171.1| putative storage protein
  misc_feature (1)..(297): Homolog of NCBI NO: 16612300 NR Description: AT3g26440/F20C19_16 [Arabidopsis thaliana]
  misc_feature (1)..(297): Homolog of NCBI NO: 18404941 NR Description: expressed protein; protein id: At3g26440.1,
MLPPGMVAAESDFYLRRLWGLPHEDLKSEPRYLATFTVGINQKANIDACVKKFSENFTIVLFHYDGRVTEWDEFEWSKTAIHISVRKQTKWWYAKRFLHPDIVARYDYIFVWDEDLGVEHFNAEEYVKMVKKHGLEISQPGLEPNQGLTWQMTKRRGDMEVHKITEERPGWCSDPHLPPCAAFVEIMAPVFSRNAWRCVWHVIQNDLVHGWGLDFALRRCVEPAHEKIGVVDSQWVVHQSFPSLGNQGEATDGKAPWQGVRDRCKKEWTMFQSRMANAEKDYFKSLQVEGSSNSTATTI

SEQ ID NO: 90298 - DNA, 2202 bp, Arabidopsis thaliana
  misc_feature (1)..(2202): Ceres Seq. ID no. 12723428
  misc_feature: MA Experiment ID: 20000307 Result: Down-regulated in Transcription
  misc_feature: MA Experiment 20000307 PARAMETER Experiment Name: At_Germinating_Seeds_Sub_P Parameter: Age (hr) Value: 24 vs. 0
  misc_feature: MA Experiment 20000307 PARAMETER Experiment Name: At_Germinating_Seeds_Sub_P Parameter: Organism Value: A. thaliana
  misc_feature: MA Experiment 20000307 PARAMETER Experiment Name: At_Germinating_Seeds_Sub_P Parameter: Plant Line Value: WS
  misc_feature: MA Experiment 20000307 PARAMETER Experiment Name: At_Germinating_Seeds_Sub_P Parameter: Tissue Value: Germinating Seeds
  misc_feature: MA Experiment ID: 20000348 Result: Down-regulated in Transcription
  misc_feature: MA Experiment 20000348 PARAMETER Experiment Name: At_100uM_ABA_Sub_P Parameter: Age (day) Value: 14
  misc_feature: MA Experiment 20000348 PARAMETER Experiment Name: At_100uM_ABA_Sub_P Parameter: Organism Value: A. thaliana
  misc_feature: MA Experiment 20000348 PARAMETER Experiment Name: At_100uM_ABA_Sub_P Parameter: Plant Line Value: WS
  misc_feature: MA Experiment 20000348 PARAMETER Experiment Name: At_100uM_ABA_Sub_P Parameter: Timepoint (hr) Value: 1
  misc_feature: MA Experiment 20000348 PARAMETER Experiment Name: At_100uM_ABA_Sub_P Parameter: Tissue Value: Aerial
  misc_feature: MA Experiment 20000348 PARAMETER Experiment Name: At_100uM_ABA_Sub_P Parameter: Treatment Value: 100uM ABA vs. No Treatment
  misc_feature: MA Experiment ID: 20000355 Result: Up-regulated in Transcription
  misc_feature: MA Experiment 20000355 PARAMETER Experiment Name: At_Siliques_Sub_P Parameter: Age (day) Value: 21
  misc_feature: MA Experiment 20000355 PARAMETER Experiment Name: At_Siliques_Sub_P Parameter: Organism Value: A. thaliana
  misc_feature: MA Experiment 20000355 PARAMETER Experiment Name: At_Siliques_Sub_P Parameter: Plant Line Value: WS
  misc_feature: MA Experiment 20000355 PARAMETER Experiment Name: At_Siliques_Sub_P Parameter: Tissue Value: Less Than 5mm Siliques vs. Whole Plant
atgaaagactttacagatacaatatcggagtcggagtgcgacgatgagataagtatagttccacaagtggaactaacggtgcccaaaaccgacgatccaacttcaccgacggttacgtttaggatgtgggttcttggcataaccgcttgtgttctcttgtcatttcttaaccagtttttctggtacagaaccaatcctttgaccatctcctctgtttcggctcagattgctgttgttcccattggtcatctcatggctaaagttcttcccacaaggagattcttcgaagggacgaggtggtctttcacgatgaatcctggtccctttagcaccaaggaacatgttcttataactgtgtttgcaaactcaggctctggggctgtttacgctactcatattcttagtgctgttaagctttattacaagagaaggcttgatttcttacccgctttgctcgttatgatcaccactcaggtattgggatttggttgggctggtttgtataggaaacatttagttgagccaggtgaaatgtggtggccaagcaatctcgttcaagtgtctctcttcagagcattgcatgagaaagagaacaaatcgaaatggggaattagtcgaaatcagttctttgtcatcactctcatcactagcttctcctattatctcctacctggttatctcttcacggtcttaaccaccgtctcttggttatgttggattagccctaaatcgattctagtaaaccagcttggttcagggtcagcaggtcttggtatcggttcctttggtctggactggtcaaccatcgcgtcataccttggaagtccactcgctagcccattctttgcctctgcaaatattgcggccgggttctttcttgtgatgtacgtaatcacacctctctgttactatcttgatttgtacaacgccaaaaccttcccaatctactccggtaaactctttgtagccagtgggaaagaatacaaagtaacgagcatcatcgatgccaatttccgcctggatcgtcaggcttacgcagagaccggaccagtccacatgagcactttctttgccgtgacctatggactaggtttcgcgaccttgtctgctagtattttccatgtcctgattttcaacggcaaagatctctggactcaaaccagaggagcgtttggaaaaaacaagaaaatggatatacatacaaagatcatgaagaggaattataaagaagttcctctctggtggttcctttcgattttcgcggtgaatcttgcagttattgtcttcatatgtatttactataagacacagattcagcttccatggtggggagctttcttggcttgtttgatagctatcttcttcactcctctcgttggtgtgatcatggccactactaaccaggctccgggtctgaacattatcacggagtacataattggatatgcatatccagagagaccagttgctaacatatgcttcaagacttacggatacatcagcatgtctcaatctttgactttcctctctgatttaaagcttggaacttacatgaagatcccaccaagaaccatgttcatggcacaggttgtgggcactttagttgcagttatcgcttacgcaggcacggcttggtggctaatggctgaaatcccaaatctctgcgacactaatctgcttccaccgggaagtcaatggacttgtccatcggatcgagtcttcttcgacgcatcagtgatttggggactagtaggaccaagaagaatgtttggtgatcttggagaatactcgaacataaactggttcttcgtaggaggtgcaatagctccagcattggtatacttagcctcaagactcttcccaaacaagaaatggatctcagacattcacatccctgttctgattggagccacagctataatgccaccagcttctgcggtgaacttcacgagctggctcgttatggcgtttgtgtttggacatttcgtgtttaagtacagaagagaatggtggcagcgatataactatgttctgtctggaggaatggatgcaggaactggattcatgtcagtgcttttgtttcttgcgttgcaacgtagtgagattgcgattgattggtggggaaattctggagaaggttgtcctgttgctaaatgtccaactgctaaaggtgttgttgttcatggttgtcctgttttctaa

SEQ ID NO: 90299 - protein, 733 aa, Arabidopsis thaliana
  peptide (1)..(733): Ceres Seq. ID no. 12723429
  misc_feature (3)..(733): Homolog of NCBI NO: 15234254 NR Description: putative protein; protein id: At4g27730.1
  misc_feature (10)..(732): Homolog of NCBI NO: 15238761 NR Description: isp4 protein; protein id: At5g53510.1 thaliana] >gi|9759190|dbj|BAB09727.1| isp4 protein [Arabidopsis
  misc_feature (14)..(733): Homolog of NCBI NO: 34898010 NR Description: EST D25093(R3139) corresponds to a region of the
  misc_feature (9)..(733): Homolog of NCBI NO: 15236912 NR Description: putative oligopeptide transporter; protein id: supported by cDNA: gi_15010733 [Arabidopsis thaliana]
  misc_feature (15)..(732): Homolog of NCBI NO: 25553564 NR Description: putative isp4 protein [Oryza sativa (japonica
  misc_feature (14)..(733): Homolog of NCBI NO: 15218331 NR Description: unknown protein; protein id: At1g09930.1
  misc_feature (14)..(732): Homolog of NCBI NO: 21592665 NR Description: Isp4-like protein [Arabidopsis thaliana]
  misc_feature (75)..(733): Homolog of NCBI NO: 30722286 NR Description: glutathione transporter GT1 [Brassica juncea]
  misc_feature (75)..(610): Homolog of NCBI NO: 7485100 NR Description: hypothetical protein - Arabidopsis thaliana isp4 like protein [Arabidopsis thaliana]
  misc_feature (14)..(41): Homolog of NCBI NO: 7485100 NR Description: hypothetical protein - Arabidopsis thaliana isp4 like protein [Arabidopsis thaliana]
MKDFTDTISESECDDEISIVPQVELTVPKTDDPTSPTVTFRMWVLGITACVLLSFLNQFFWYRTNPLTISSVSAQIAVVPIGHLMAKVLPTRRFFEGTRWSFTMNPGPFSTKEHVLITVFANSGSGAVYATHILSAVKLYYKRRLDFLPALLVMITTQVLGFGWAGLYRKHLVEPGEMWWPSNLVQVSLFRALHEKENKSKWGISRNQFFVITLITSFSYYLLPGYLFTVLTTVSWLCWISPKSILVNQLGSGSAGLGIGSFGLDWSTIASYLGSPLASPFFASANIAAGFFLVMYVITPLCYYLDLYNAKTFPIYSGKLFVASGKEYKVTSIIDANFRLDRQAYAETGPVHMSTFFAVTYGLGFATLSASIFHVLIFNGKDLWTQTRGAFGKNKKMDIHTKIMKRNYKEVPLWWFLSIFAVNLAVIVFICIYYKTQIQLPWWGAFLACLIAIFFTPLVGVIMATTNQAPGLNIITEYIIGYAYPERPVANICFKTYGYISMSQSLTFLSDLKLGTYMKIPPRTMFMAQVVGTLVAVIAYAGTAWWLMAEIPNLCDTNLLPPGSQWTCPSDRVFFDASVIWGLVGPRRMFGDLGEYSNINWFFVGGAIAPALVYLASRLFPNKKWISDIHIPVLIGATAIMPPASAVNFTSWLVMAFVFGHFVFKYRREWWQRYNYVLSGGMDAGTGFMSVLLFLALQRSEIAIDWWGNSGEGCPVAKCPTAKGVVVHGCPVF

SEQ ID NO: 90300 - protein, 692 aa, Arabidopsis thaliana
  peptide (1)..(692): Ceres Seq. ID no. 12723430
  misc_feature (1)..(692): Homolog of NCBI NO: 15234254 NR Description: putative protein; protein id: At4g27730.1
  misc_feature (1)..(691): Homolog of NCBI NO: 15238761 NR Description: isp4 protein; protein id: At5g53510.1 thaliana] >gi|9759190|dbj|BAB09727.1| isp4 protein [Arabidopsis
  misc_feature (1)..(692): Homolog of NCBI NO: 34898010 NR Description: EST D25093(R3139) corresponds to a region of the
  misc_feature (1)..(692): Homolog of NCBI NO: 15236912 NR Description: putative oligopeptide transporter; protein id: supported by cDNA: gi_15010733 [Arabidopsis thaliana]
  misc_feature (1)..(691): Homolog of NCBI NO: 25553564 NR Description: putative isp4 protein [Oryza sativa (japonica
  misc_feature (1)..(692): Homolog of NCBI NO: 15218331 NR Description: unknown protein; protein id: At1g09930.1
  misc_feature (1)..(691): Homolog of NCBI NO: 21592665 NR Description: Isp4-like protein [Arabidopsis thaliana]
  misc_feature (34)..(692): Homolog of NCBI NO: 30722286 NR Description: glutathione transporter GT1 [Brassica juncea]
  misc_feature (34)..(569): Homolog of NCBI NO: 7485100 NR Description: hypothetical protein - Arabidopsis thaliana isp4 like protein [Arabidopsis thaliana]
  misc_feature (34)..(569): Homolog of NCBI NO: 18414644 NR Description: isp4 like protein; protein id: At4g16370.1,
MWVLGITACVLLSFLNQFFWYRTNPLTISSVSAQIAVVPIGHLMAKVLPTRRFFEGTRWSFTMNPGPFSTKEHVLITVFANSGSGAVYATHILSAVKLYYKRRLDFLPALLVMITTQVLGFGWAGLYRKHLVEPGEMWWPSNLVQVSLFRALHEKENKSKWGISRNQFFVITLITSFSYYLLPGYLFTVLTTVSWLCWISPKSILVNQLGSGSAGLGIGSFGLDWSTIASYLGSPLASPFFASANIAAGFFLVMYVITPLCYYLDLYNAKTFPIYSGKLFVASGKEYKVTSIIDANFRLDRQAYAETGPVHMSTFFAVTYGLGFATLSASIFHVLIFNGKDLWTQTRGAFGKNKKMDIHTKIMKRNYKEVPLWWFLSIFAVNLAVIVFICIYYKTQIQLPWWGAFLACLIAIFFTPLVGVIMATTNQAPGLNIITEYIIGYAYPERPVANICFKTYGYISMSQSLTFLSDLKLGTYMKIPPRTMFMAQVVGTLVAVIAYAGTAWWLMAEIPNLCDTNLLPPGSQWTCPSDRVFFDASVIWGLVGPRRMFGDLGEYSNINWFFVGGAIAPALVYLASRLFPNKKWISDIHIPVLIGATAIMPPASAVNFTSWLVMAFVFGHFVFKYRREWWQRYNYVLSGGMDAGTGFMSVLLFLALQRSEIAIDWWGNSGEGCPVAKCPTAKGVVVHGCPVF

SEQ ID NO: 90301 - protein, 649 aa, Arabidopsis thaliana
  peptide (1)..(649): Ceres Seq. ID no. 12723431
  misc_feature (1)..(649): Homolog of NCBI NO: 15234254 NR Description: putative protein; protein id: At4g27730.1
  misc_feature (1)..(648): Homolog of NCBI NO: 15238761 NR Description: isp4 protein; protein id: At5g53510.1 thaliana] >gi|9759190|dbj|BAB09727.1| isp4 protein [Arabidopsis
  misc_feature (1)..(649): Homolog of NCBI NO: 34898010 NR Description: EST D25093(R3139) corresponds to a region of the
  misc_feature (1)..(649): Homolog of NCBI NO: 15236912 NR Description: putative oligopeptide transporter; protein id: supported by cDNA: gi_15010733 [Arabidopsis thaliana]
  misc_feature (1)..(648): Homolog of NCBI NO: 25553564 NR Description: putative isp4 protein [Oryza sativa (japonica
  misc_feature (1)..(649): Homolog of NCBI NO: 15218331 NR Description: unknown protein; protein id: At1g09930.1
  misc_feature (1)..(648): Homolog of NCBI NO: 21592665 NR Description: Isp4-like protein [Arabidopsis thaliana]
  misc_feature (1)..(649): Homolog of NCBI NO: 30722286 NR Description: glutathione transporter GT1 [Brassica juncea]
  misc_feature (1)..(526): Homolog of NCBI NO: 7485100 NR Description: hypothetical protein - Arabidopsis thaliana isp4 like protein [Arabidopsis thaliana]
  misc_feature (1)..(526): Homolog of NCBI NO: 18414644 NR Description: isp4 like protein; protein id: At4g16370.1,
MAKVLPTRRFFEGTRWSFTMNPGPFSTKEHVLITVFANSGSGAVYATHILSAVKLYYKRRLDFLPALLVMITTQVLGFGWAGLYRKHLVEPGEMWWPSNLVQVSLFRALHEKENKSKWGISRNQFFVITLITSFSYYLLPGYLFTVLTTVSWLCWISPKSILVNQLGSGSAGLGIGSFGLDWSTIASYLGSPLASPFFASANIAAGFFLVMYVITPLCYYLDLYNAKTFPIYSGKLFVASGKEYKVTSIIDANFRLDRQAYAETGPVHMSTFFAVTYGLGFATLSASIFHVLIFNGKDLWTQTRGAFGKNKKMDIHTKIMKRNYKEVPLWWFLSIFAVNLAVIVFICIYYKTQIQLPWWGAFLACLIAIFFTPLVGVIMATTNQAPGLNIITEYIIGYAYPERPVANICFKTYGYISMSQSLTFLSDLKLGTYMKIPPRTMFMAQVVGTLVAVIAYAGTAWWLMAEIPNLCDTNLLPPGSQWTCPSDRVFFDASVIWGLVGPRRMFGDLGEYSNINWFFVGGAIAPALVYLASRLFPNKKWISDIHIPVLIGATAIMPPASAVNFTSWLVMAFVFGHFVFKYRREWWQRYNYVLSGGMDAGTGFMSVLLFLALQRSEIAIDWWGNSGEGCPVAKCPTAKGVVVHGCPVF

SEQ ID NO: 90302 - DNA, 642 bp, Arabidopsis thaliana
  misc_feature (1)..(642): Ceres Seq. ID no. 12723445
  misc_feature: MA Experiment ID: 20000185 Result: Down-regulated in Transcription
  misc_feature: MA Experiment 20000185 PARAMETER Experiment Name: At_Roots__P Parameter: Age (day) Value: 7 vs. 21
  misc_feature: MA Experiment 20000185 PARAMETER Experiment Name: At_Roots__P Parameter: Organism Value: A. thaliana
  misc_feature: MA Experiment 20000185 PARAMETER Experiment Name: At_Roots__P Parameter: Tissue Value: Roots vs. Whole Plant
  misc_feature: MA Experiment ID: 20000265 Result: Down-regulated in Transcription
  misc_feature: MA Experiment 20000265 PARAMETER Experiment Name: At_Open_Flower_P Parameter: Age (day) Value: 21
  misc_feature: MA Experiment 20000265 PARAMETER Experiment Name: At_Open_Flower_P Parameter: Plant Line Value: WS
  misc_feature: MA Experiment 20000265 PARAMETER Experiment Name: At_Open_Flower_P Parameter: Tissue Value: Closed Flower vs. Whole Plant
  misc_feature: MA Experiment ID: 20000286 Result: Down-regulated in Transcription
  misc_feature: MA Experiment 20000286 PARAMETER Experiment Name: At_Open_Flower_P Parameter: Age (day) Value: 21
  misc_feature: MA Experiment 20000286 PARAMETER Experiment Name: At_Open_Flower_P Parameter: Plant Line Value: WS
  misc_feature: MA Experiment 20000286 PARAMETER Experiment Name: At_Open_Flower_P Parameter: Tissue Value: Half Open vs. Whole Plant
  misc_feature: MA Experiment ID: 20000437 Result: Up-regulated in Transcription
  misc_feature: MA Experiment 20000437 PARAMETER Experiment Name: At_Drought_P Parameter: Age (day) Value: 8
  misc_feature: MA Experiment 20000437 PARAMETER Experiment Name: At_Drought_P Parameter: Organism Value: A. thaliana
  misc_feature: MA Experiment 20000437 PARAMETER Experiment Name: At_Drought_P Parameter: Plant Line Value: WS
  misc_feature: MA Experiment 20000437 PARAMETER Experiment Name: At_Drought_P Parameter: Timepoint (hr) Value: 24
  misc_feature: MA Experiment 20000437 PARAMETER Experiment Name: At_Drought_P Parameter: Tissue Value: Whole Plant
  misc_feature: MA Experiment 20000437 PARAMETER Experiment Name: At_Drought_P Parameter: Treatment Value: Drought vs. No Drought
  misc_feature: MA Experiment ID: 20000438 Result: Down-regulated in Transcription
  misc_feature: MA Experiment 20000438 PARAMETER Experiment Name: At_Shoots__P Parameter: Age (day) Value: 14
  misc_feature: MA Experiment 20000438 PARAMETER Experiment Name: At_Shoots__P Parameter: Tissue Value: Shoots vs. Whole Plant
  misc_feature: MA Experiment ID: 20000439 Result: Down-regulated in Transcription
  misc_feature: MA Experiment 20000439 PARAMETER Experiment Name: At_Roots__P Parameter: Age (day) Value: 14 vs. 21
  misc_feature: MA Experiment 20000439 PARAMETER Experiment Name: At_Roots__P Parameter: Organism Value: A. thaliana
  misc_feature: MA Experiment 20000439 PARAMETER Experiment Name: At_Roots__P Parameter: Tissue Value: Roots vs. Whole Plant
  misc_feature: MA Experiment ID: 20000495 Result: Up-regulated in Transcription
  misc_feature: MA Experiment 20000495 PARAMETER Experiment Name: At_Guard_Cells_P Parameter: Harvest Date Value: 8/2/2002
  misc_feature: MA Experiment 20000495 PARAMETER Experiment Name: At_Guard_Cells_P Parameter: Organism Value: A. thaliana
  misc_feature: MA Experiment 20000495 PARAMETER Experiment Name: At_Guard_Cells_P Parameter: Tissue Value: Guard Cells vs. Leaves
  misc_feature: MA Experiment ID: 20001554 Result: Up-regulated in Transcription
  misc_feature: MA Experiment 20001554 PARAMETER Experiment Name: At_Drought_Soil_Dry_P Parameter: Age (day) Value: 21
  misc_feature: MA Experiment 20001554 PARAMETER Experiment Name: At_Drought_Soil_Dry_P Parameter: Organism Value: A. thaliana
  misc_feature: MA Experiment 20001554 PARAMETER Experiment Name: At_Drought_Soil_Dry_P Parameter: Plant Line Value: WS
  misc_feature: MA Experiment 20001554 PARAMETER Experiment Name: At_Drought_Soil_Dry_P Parameter: Post Timepoint (hr) Value: None
  misc_feature: MA Experiment 20001554 PARAMETER Experiment Name: At_Drought_Soil_Dry_P Parameter: Post-Treatment Value: None
  misc_feature: MA Experiment 20001554 PARAMETER Experiment Name: At_Drought_Soil_Dry_P Parameter: Timepoint (day) Value: 7
  misc_feature: MA Experiment 20001554 PARAMETER Experiment Name: At_Drought_Soil_Dry_P Parameter: Treatment Value: Drought vs. No Drought
  misc_feature: MA Experiment ID: 20001555 Result: Up-regulated in Transcription
  misc_feature: MA Experiment 20001555 PARAMETER Experiment Name: At_Drought_Soil_Dry_P Parameter: Age (day) Value: 24
  misc_feature: MA Experiment 20001555 PARAMETER Experiment Name: At_Drought_Soil_Dry_P Parameter: Organism Value: A. thaliana
  misc_feature: MA Experiment 20001555 PARAMETER Experiment Name: At_Drought_Soil_Dry_P Parameter: Plant Line Value: WS
  misc_feature: MA Experiment 20001555 PARAMETER Experiment Name: At_Drought_Soil_Dry_P Parameter: Post Timepoint (hr) Value: None
  misc_feature: MA Experiment 20001555 PARAMETER Experiment Name: At_Drought_Soil_Dry_P Parameter: Post-Treatment Value: None
  misc_feature: MA Experiment 20001555 PARAMETER Experiment Name: At_Drought_Soil_Dry_P Parameter: Timepoint (day) Value: 10
  misc_feature: MA Experiment 20001555 PARAMETER Experiment Name: At_Drought_Soil_Dry_P Parameter: Treatment Value: Drought vs. No Drought
  misc_feature: MA Experiment ID: 20001904 Result: Up-regulated in Transcription
  misc_feature: MA Experiment 20001904 PARAMETER Experiment Name: At_Drought_Reproduction_P Parameter: Age (day) Value: 37
  misc_feature: MA Experiment 20001904 PARAMETER Experiment Name: At_Drought_Reproduction_P Parameter: Organism Value: A. thaliana
  misc_feature: MA Experiment 20001904 PARAMETER Experiment Name: At_Drought_Reproduction_P Parameter: Plant Line Value: WS
  misc_feature: MA Experiment 20001904 PARAMETER Experiment Name: At_Drought_Reproduction_P Parameter: Timepoint (day) Value: 7
  misc_feature: MA Experiment 20001904 PARAMETER Experiment Name: At_Drought_Reproduction_P Parameter: Tissue Value: Rosettes
  misc_feature: MA Experiment 20001904 PARAMETER Experiment Name: At_Drought_Reproduction_P Parameter: Treatment Value: Drought vs. No Drought
  misc_feature: MA Experiment ID: 20001910 Result: Up-regulated in Transcription
  misc_feature: MA Experiment 20001910 PARAMETER Experiment Name: At_Drought_Reproduction_P Parameter: Age (day) Value: 37
  misc_feature: MA Experiment 20001910 PARAMETER Experiment Name: At_Drought_Reproduction_P Parameter: Organism Value: A. thaliana
  misc_feature: MA Experiment 20001910 PARAMETER Experiment Name: At_Drought_Reproduction_P Parameter: Plant Line Value: WS
  misc_feature: MA Experiment 20001910 PARAMETER Experiment Name: At_Drought_Reproduction_P Parameter: Timepoint (day) Value: 7
  misc_feature: MA Experiment 20001910 PARAMETER Experiment Name: At_Drought_Reproduction_P Parameter: Tissue Value: Flowers
  misc_feature: MA Experiment 20001910 PARAMETER Experiment Name: At_Drought_Reproduction_P Parameter: Treatment Value: Drought vs. No Drought
  misc_feature: MA Experiment ID: 20001911 Result: Up-regulated in Transcription
  misc_feature: MA Experiment 20001911 PARAMETER Experiment Name: At_Drought_Reproduction_P Parameter: Age (day) Value: 40
  misc_feature: MA Experiment 20001911 PARAMETER Experiment Name: At_Drought_Reproduction_P Parameter: Organism Value: A. thaliana
  misc_feature: MA Experiment 20001911 PARAMETER Experiment Name: At_Drought_Reproduction_P Parameter: Plant Line Value: WS
  misc_feature: MA Experiment 20001911 PARAMETER Experiment Name: At_Drought_Reproduction_P Parameter: Timepoint (day) Value: 10
  misc_feature: MA Experiment 20001911 PARAMETER Experiment Name: At_Drought_Reproduction_P Parameter: Tissue Value: Flowers
  misc_feature: MA Experiment 20001911 PARAMETER Experiment Name: At_Drought_Reproduction_P Parameter: Treatment Value: Drought vs. No Drought
atgtctcaaatctccataacttctccaaaacattgcgccaagaaaggagggattaacatcaacaatcgccacaagaaactatttttcacattctcaactttcttctctggccttctcctcatcatcttcctcgtttggctcatcctccaccccgagagacccgagttctccctcacagaagccgatatatacagcctcaacctcaccacctcctccactcatctcctcaactcttcagtccaactaactctcttctccaaaaaccctaacaaaaaagtcgggatctactacgacaagctactcgtatatgcagcgtataggggacaacaaatcacatcagaggcctctctaccgcctttttatcaatcccatgaagaaatcaatctcttgacagcgtttcttcaagggactgagctacccgttgcccagtcctttggttatcaaatcagtcgtgaacggtcaactggtaaaataatcatcggtatgaagatggacgggaaactacggtggaagatcgggacatgggtctcgggtgcataccggtttaatgtgaattgtcttgcaattgtggcttttggaatgaacatgaccactcctcccttagcttcattacaagggactcgttgctctacaactatatga

SEQ ID NO: 90303 - protein, 213 aa, Arabidopsis thaliana
  peptide (1)..(213): Ceres Seq. ID no. 12723446
  misc_feature (1)..(213): Homolog of NCBI NO: 15238828 NR Description: hairpin-induced protein, putative (HIN1); protein At5g53730.1 [Arabidopsis thaliana] >gi|9759067|dbj|BAB09545.1|
  misc_feature (34)..(213): Homolog of NCBI NO: 15229906 NR Description: hairpin-induced protein, putative (HIN1); protein At3g44220.1 [Arabidopsis thaliana] >gi|11282595|pir||T49138
  misc_feature (25)..(193): Homolog of NCBI NO: 18399308 NR Description: VAMP protein SEC22; protein id: At3g11660.1, by cDNA: 8166., supported by cDNA: gi_9502171 [Arabidopsis
  misc_feature (25)..(193): Homolog of NCBI NO: 28392929 NR Description: putative VAMP protein SEC22 [Arabidopsis thaliana]
  misc_feature (6)..(213): Homolog of NCBI NO: 15240001 NR Description: hairpin-induced protein, putative (HIN1); protein
  misc_feature (10)..(193): Homolog of NCBI NO: 15231227 NR Description: hairpin-induced protein, putative (HIN1); protein At3g52470.1, supported by cDNA: 92178., supported by cDNA: supported by cDNA: gi_21281063 [Arabidopsis thaliana]
  misc_feature (10)..(190): Homolog of NCBI NO: 15227538 NR Description: hairpin-induced protein, putative (HIN1); protein
  misc_feature (41)..(213): Homolog of NCBI NO: 22326984 NR Description: similar to hairpin-induced protein, putative
  misc_feature (38)..(190): Homolog of NCBI NO: 15233951 NR Description: hairpin-induced protein, putative (HIN1); protein At4g09590.1 [Arabidopsis thaliana] >gi|25354574|pir||A85098
  misc_feature (38)..(190): Homolog of NCBI NO: 15227540 NR Description: hairpin-induced protein, putative (HIN1); protein
MSQISITSPKHCAKKGGININNRHKKLFFTFSTFFSGLLLIIFLVWLILHPERPEFSLTEADIYSLNLTTSSTHLLNSSVQLTLFSKNPNKKVGIYYDKLLVYAAYRGQQITSEASLPPFYQSHEEINLLTAFLQGTELPVAQSFGYQISRERSTGKIIIGMKMDGKLRWKIGTWVSGAYRFNVNCLAIVAFGMNMTTPPLASLQGTRCSTTI

SEQ ID NO: 90304 - DNA, 1113 bp, Arabidopsis thaliana
  misc_feature (1)..(1113): Ceres Seq. ID no. 12723453
  misc_feature: MA Experiment ID: 20000169 Result: Up-regulated in Transcription
  misc_feature: MA Experiment 20000169 PARAMETER Experiment Name: At_100uM_ABA_P Parameter: Age (day) Value: 14
  misc_feature: MA Experiment 20000169 PARAMETER Experiment Name: At_100uM_ABA_P Parameter: Organism Value: A. thaliana
  misc_feature: MA Experiment 20000169 PARAMETER Experiment Name: At_100uM_ABA_P Parameter: Plant Line Value: WS
  misc_feature: MA Experiment 20000169 PARAMETER Experiment Name: At_100uM_ABA_P Parameter: Timepoint (hr) Value: 6
  misc_feature: MA Experiment 20000169 PARAMETER Experiment Name: At_100uM_ABA_P Parameter: Tissue Value: Aerial
  misc_feature: MA Experiment 20000169 PARAMETER Experiment Name: At_100uM_ABA_P Parameter: Treatment Value: 100uM ABA vs. No Treatment
  misc_feature: MA Experiment ID: 20000184 Result: Down-regulated in Transcription
  misc_feature: MA Experiment 20000184 PARAMETER Experiment Name: At_Shoots__P Parameter: Age (day) Value: 7
  misc_feature: MA Experiment 20000184 PARAMETER Experiment Name: At_Shoots__P Parameter: Tissue Value: Shoots vs. Whole Plant
  misc_feature: MA Experiment ID: 20000185 Result: Down-regulated in Transcription
  misc_feature: MA Experiment 20000185 PARAMETER Experiment Name: At_Roots__P Parameter: Age (day) Value: 7 vs. 21
  misc_feature: MA Experiment 20000185 PARAMETER Experiment Name: At_Roots__P Parameter: Organism Value: A. thaliana
  misc_feature: MA Experiment 20000185 PARAMETER Experiment Name: At_Roots__P Parameter: Tissue Value: Roots vs. Whole Plant
  misc_feature: MA Experiment ID: 20000265 Result: Down-regulated in Transcription
  misc_feature: MA Experiment 20000265 PARAMETER Experiment Name: At_Open_Flower_P Parameter: Age (day) Value: 21
  misc_feature: MA Experiment 20000265 PARAMETER Experiment Name: At_Open_Flower_P Parameter: Plant Line Value: WS
  misc_feature: MA Experiment 20000265 PARAMETER Experiment Name: At_Open_Flower_P Parameter: Tissue Value: Closed Flower vs. Whole Plant
  misc_feature: MA Experiment ID: 20000267 Result: Up-regulated in Transcription
  misc_feature: MA Experiment 20000267 PARAMETER Experiment Name: At_Drought_P Parameter: Age (day) Value: 7
  misc_feature: MA Experiment 20000267 PARAMETER Experiment Name: At_Drought_P Parameter: Organism Value: A. thaliana
  misc_feature: MA Experiment 20000267 PARAMETER Experiment Name: At_Drought_P Parameter: Plant Line Value: WS
  misc_feature: MA Experiment 20000267 PARAMETER Experiment Name: At_Drought_P Parameter: Timepoint (hr) Value: 6
  misc_feature: MA Experiment 20000267 PARAMETER Experiment Name: At_Drought_P Parameter: Tissue Value: Whole Plant
  misc_feature: MA Experiment 20000267 PARAMETER Experiment Name: At_Drought_P Parameter: Treatment Value: Drought vs. No Drought
  misc_feature: MA Experiment ID: 20000436 Result: Up-regulated in Transcription
  misc_feature: MA Experiment 20000436 PARAMETER Experiment Name: At_Drought_P Parameter: Age (day) Value: 7
  misc_feature: MA Experiment 20000436 PARAMETER Experiment Name: At_Drought_P Parameter: Organism Value: A. thaliana
  misc_feature: MA Experiment 20000436 PARAMETER Experiment Name: At_Drought_P Parameter: Plant Line Value: WS
  misc_feature: MA Experiment 20000436 PARAMETER Experiment Name: At_Drought_P Parameter: Timepoint (hr) Value: 12
  misc_feature: MA Experiment 20000436 PARAMETER Experiment Name: At_Drought_P Parameter: Tissue Value: Whole Plant
  misc_feature: MA Experiment 20000436 PARAMETER Experiment Name: At_Drought_P Parameter: Treatment Value: Drought vs. No Drought
  misc_feature: MA Experiment ID: 20000437 Result: Up-regulated in Transcription
  misc_feature: MA Experiment 20000437 PARAMETER Experiment Name: At_Drought_P Parameter: Age (day) Value: 8
  misc_feature: MA Experiment 20000437 PARAMETER Experiment Name: At_Drought_P Parameter: Organism Value: A. thaliana
  misc_feature: MA Experiment 20000437 PARAMETER Experiment Name: At_Drought_P Parameter: Plant Line Value: WS
  misc_feature: MA Experiment 20000437 PARAMETER Experiment Name: At_Drought_P Parameter: Timepoint (hr) Value: 24
  misc_feature: MA Experiment 20000437 PARAMETER Experiment Name: At_Drought_P Parameter: Tissue Value: Whole Plant
  misc_feature: MA Experiment 20000437 PARAMETER Experiment Name: At_Drought_P Parameter: Treatment Value: Drought vs. No Drought
  misc_feature: MA Experiment ID: 20000439 Result: Down-regulated in Transcription
  misc_feature: MA Experiment 20000439 PARAMETER Experiment Name: At_Roots__P Parameter: Age (day) Value: 14 vs. 21
  misc_feature: MA Experiment 20000439 PARAMETER Experiment Name: At_Roots__P Parameter: Organism Value: A. thaliana
  misc_feature: MA Experiment 20000439 PARAMETER Experiment Name: At_Roots__P Parameter: Tissue Value: Roots vs. Whole Plant
  misc_feature: MA Experiment ID: 20000453 Result: Up-regulated in Transcription
  misc_feature: MA Experiment 20000453 PARAMETER Experiment Name: At_100uM_ABA_P Parameter: Age (day) Value: 15
  misc_feature: MA Experiment 20000453 PARAMETER Experiment Name: At_100uM_ABA_P Parameter: Organism Value: A. thaliana
  misc_feature: MA Experiment 20000453 PARAMETER Experiment Name: At_100uM_ABA_P Parameter: Plant Line Value: WS
  misc_feature: MA Experiment 20000453 PARAMETER Experiment Name: At_100uM_ABA_P Parameter: Timepoint (hr) Value: 24
  misc_feature: MA Experiment 20000453 PARAMETER Experiment Name: At_100uM_ABA_P Parameter: Tissue Value: Aerial
  misc_feature: MA Experiment 20000453 PARAMETER Experiment Name: At_100uM_ABA_P Parameter: Treatment Value: 100uM ABA vs. No Treatment
  misc_feature: MA Experiment ID: 20000455 Result: Up-regulated in Transcription
  misc_feature: MA Experiment 20000455 PARAMETER Experiment Name: At_100uM_ABA_P Parameter: Age (day) Value: 16
  misc_feature: MA Experiment 20000455 PARAMETER Experiment Name: At_100uM_ABA_P Parameter: Organism Value: A. thaliana
  misc_feature: MA Experiment 20000455 PARAMETER Experiment Name: At_100uM_ABA_P Parameter: Plant Line Value: WS
  misc_feature: MA Experiment 20000455 PARAMETER Experiment Name: At_100uM_ABA_P Parameter: Timepoint (hr) Value: 48
  misc_feature: MA Experiment 20000455 PARAMETER Experiment Name: At_100uM_ABA_P Parameter: Tissue Value: Aerial
  misc_feature: MA Experiment 20000455 PARAMETER Experiment Name: At_100uM_ABA_P Parameter: Treatment Value: 100uM ABA vs. No Treatment
  misc_feature: MA Experiment ID: 20000495 Result: Up-regulated in Transcription
  misc_feature: MA Experiment 20000495 PARAMETER Experiment Name: At_Guard_Cells_P Parameter: Harvest Date Value: 8/2/2002
  misc_feature: MA Experiment 20000495 PARAMETER Experiment Name: At_Guard_Cells_P Parameter: Organism Value: A. thaliana
  misc_feature: MA Experiment 20000495 PARAMETER Experiment Name: At_Guard_Cells_P Parameter: Tissue Value: Guard Cells vs. Leaves
  misc_feature: MA Experiment ID: 20000794 Result: Down-regulated in Transcription
  misc_feature: MA Experiment 20000794 PARAMETER Experiment Name: At_Petals_P Parameter: Age (day) Value: 23-25 days
  misc_feature: MA Experiment 20000794 PARAMETER Experiment Name: At_Petals_P Parameter: Plant Line Value: WS
  misc_feature: MA Experiment 20000794 PARAMETER Experiment Name: At_Petals_P Parameter: Tissue Value: Petals vs. Whole plant
  misc_feature: MA Experiment ID: 20001554 Result: Up-regulated in Transcription
  misc_feature: MA Experiment 20001554 PARAMETER Experiment Name: At_Drought_Soil_Dry_P Parameter: Age (day) Value: 21
  misc_feature: MA Experiment 20001554 PARAMETER Experiment Name: At_Drought_Soil_Dry_P Parameter: Organism Value: A. thaliana
  misc_feature: MA Experiment 20001554 PARAMETER Experiment Name: At_Drought_Soil_Dry_P Parameter: Plant Line Value: WS
  misc_feature: MA Experiment 20001554 PARAMETER Experiment Name: At_Drought_Soil_Dry_P Parameter: Post Timepoint (hr) Value: None
  misc_feature: MA Experiment 20001554 PARAMETER Experiment Name: At_Drought_Soil_Dry_P Parameter: Post-Treatment Value: None
  misc_feature: MA Experiment 20001554 PARAMETER Experiment Name: At_Drought_Soil_Dry_P Parameter: Timepoint (day) Value: 7
  misc_feature: MA Experiment 20001554 PARAMETER Experiment Name: At_Drought_Soil_Dry_P Parameter: Treatment Value: Drought vs. No Drought
  misc_feature: MA Experiment ID: 20001555 Result: Up-regulated in Transcription
  misc_feature: MA Experiment 20001555 PARAMETER Experiment Name: At_Drought_Soil_Dry_P Parameter: Age (day) Value: 24
  misc_feature: MA Experiment 20001555 PARAMETER Experiment Name: At_Drought_Soil_Dry_P Parameter: Organism Value: A. thaliana
  misc_feature: MA Experiment 20001555 PARAMETER Experiment Name: At_Drought_Soil_Dry_P Parameter: Plant Line Value: WS
  misc_feature: MA Experiment 20001555 PARAMETER Experiment Name: At_Drought_Soil_Dry_P Parameter: Post Timepoint (hr) Value: None
  misc_feature: MA Experiment 20001555 PARAMETER Experiment Name: At_Drought_Soil_Dry_P Parameter: Post-Treatment Value: None
  misc_feature: MA Experiment 20001555 PARAMETER Experiment Name: At_Drought_Soil_Dry_P Parameter: Timepoint (day) Value: 10
  misc_feature: MA Experiment 20001555 PARAMETER Experiment Name: At_Drought_Soil_Dry_P Parameter: Treatment Value: Drought vs. No Drought
  misc_feature: MA Experiment ID: 20001559 Result: Up-regulated in Transcription
  misc_feature: MA Experiment 20001559 PARAMETER Experiment Name: At_Drought_Soil_Dry_P Parameter: Age (day) Value: 28
  misc_feature: MA Experiment 20001559 PARAMETER Experiment Name: At_Drought_Soil_Dry_P Parameter: Organism Value: A. thaliana
  misc_feature: MA Experiment 20001559 PARAMETER Experiment Name: At_Drought_Soil_Dry_P Parameter: Plant Line Value: WS
  misc_feature: MA Experiment 20001559 PARAMETER Experiment Name: At_Drought_Soil_Dry_P Parameter: Post Timepoint (hr) Value: 29
  misc_feature: MA Experiment 20001559 PARAMETER Experiment Name: At_Drought_Soil_Dry_P Parameter: Post-Treatment Value: Re-Water vs. No Drought
  misc_feature: MA Experiment 20001559 PARAMETER Experiment Name: At_Drought_Soil_Dry_P Parameter: Timepoint (day) Value: 14
  misc_feature: MA Experiment 20001559 PARAMETER Experiment Name: At_Drought_Soil_Dry_P Parameter: Treatment Value: Drought vs. No Drought
  misc_feature: MA Experiment ID: 20001904 Result: Up-regulated in Transcription
  misc_feature: MA Experiment 20001904 PARAMETER Experiment Name: At_Drought_Reproduction_P Parameter: Age (day) Value: 37
  misc_feature: MA Experiment 20001904 PARAMETER Experiment Name: At_Drought_Reproduction_P Parameter: Organism Value: A. thaliana
  misc_feature: MA Experiment 20001904 PARAMETER Experiment Name: At_Drought_Reproduction_P Parameter: Plant Line Value: WS
  misc_feature: MA Experiment 20001904 PARAMETER Experiment Name: At_Drought_Reproduction_P Parameter: Timepoint (day) Value: 7
  misc_feature: MA Experiment 20001904 PARAMETER Experiment Name: At_Drought_Reproduction_P Parameter: Tissue Value: Rosettes
  misc_feature: MA Experiment 20001904 PARAMETER Experiment Name: At_Drought_Reproduction_P Parameter: Treatment Value: Drought vs. No Drought
  misc_feature: MA Experiment ID: 20001905 Result: Up-regulated in Transcription
  misc_feature: MA Experiment 20001905 PARAMETER Experiment Name: At_Drought_Reproduction_P Parameter: Age (day) Value: 40
  misc_feature: MA Experiment 20001905 PARAMETER Experiment Name: At_Drought_Reproduction_P Parameter: Organism Value: A. thaliana
  misc_feature: MA Experiment 20001905 PARAMETER Experiment Name: At_Drought_Reproduction_P Parameter: Plant Line Value: WS
  misc_feature: MA Experiment 20001905 PARAMETER Experiment Name: At_Drought_Reproduction_P Parameter: Timepoint (day) Value: 10
  misc_feature: MA Experiment 20001905 PARAMETER Experiment Name: At_Drought_Reproduction_P Parameter: Tissue Value: Rosettes
  misc_feature: MA Experiment 20001905 PARAMETER Experiment Name: At_Drought_Reproduction_P Parameter: Treatment Value: Drought vs. No Drought
  misc_feature: MA Experiment ID: 20001906 Result: Up-regulated in Transcription
  misc_feature: MA Experiment 20001906 PARAMETER Experiment Name: At_Drought_Reproduction_P Parameter: Age (day) Value: 35
  misc_feature: MA Experiment 20001906 PARAMETER Experiment Name: At_Drought_Reproduction_P Parameter: Organism Value: A. thaliana
  misc_feature: MA Experiment 20001906 PARAMETER Experiment Name: At_Drought_Reproduction_P Parameter: Plant Line Value: WS
  misc_feature: MA Experiment 20001906 PARAMETER Experiment Name: At_Drought_Reproduction_P Parameter: Timepoint (day) Value: 5
  misc_feature: MA Experiment 20001906 PARAMETER Experiment Name: At_Drought_Reproduction_P Parameter: Tissue Value: Siliques
  misc_feature: MA Experiment 20001906 PARAMETER Experiment Name: At_Drought_Reproduction_P Parameter: Treatment Value: Drought vs. No Drought
  misc_feature: MA Experiment ID: 20001907 Result: Up-regulated in Transcription
  misc_feature: MA Experiment 20001907 PARAMETER Experiment Name: At_Drought_Reproduction_P Parameter: Age (day) Value: 37
  misc_feature: MA Experiment 20001907 PARAMETER Experiment Name: At_Drought_Reproduction_P Parameter: Organism Value: A. thaliana
  misc_feature: MA Experiment 20001907 PARAMETER Experiment Name: At_Drought_Reproduction_P Parameter: Plant Line Value: WS
  misc_feature: MA Experiment 20001907 PARAMETER Experiment Name: At_Drought_Reproduction_P Parameter: Timepoint (day) Value: 7
  misc_feature: MA Experiment 20001907 PARAMETER Experiment Name: At_Drought_Reproduction_P Parameter: Tissue Value: Siliques
  misc_feature: MA Experiment 20001907 PARAMETER Experiment Name: At_Drought_Reproduction_P Parameter: Treatment Value: Drought vs. No Drought
  misc_feature: MA Experiment ID: 20001908 Result: Up-regulated in Transcription
  misc_feature: MA Experiment 20001908 PARAMETER Experiment Name: At_Drought_Reproduction_P Parameter: Age (day) Value: 40
  misc_feature: MA Experiment 20001908 PARAMETER Experiment Name: At_Drought_Reproduction_P Parameter: Organism Value: A. thaliana
  misc_feature: MA Experiment 20001908 PARAMETER Experiment Name: At_Drought_Reproduction_P Parameter: Plant Line Value: WS
  misc_feature: MA Experiment 20001908 PARAMETER Experiment Name: At_Drought_Reproduction_P Parameter: Timepoint (day) Value: 10
  misc_feature: MA Experiment 20001908 PARAMETER Experiment Name: At_Drought_Reproduction_P Parameter: Tissue Value: Siliques
  misc_feature: MA Experiment 20001908 PARAMETER Experiment Name: At_Drought_Reproduction_P Parameter: Treatment Value: Drought vs. No Drought
  misc_feature: MA Experiment ID: 20001910 Result: Up-regulated in Transcription
  misc_feature: MA Experiment 20001910 PARAMETER Experiment Name: At_Drought_Reproduction_P Parameter: Age (day) Value: 37
  misc_feature: MA Experiment 20001910 PARAMETER Experiment Name: At_Drought_Reproduction_P Parameter: Organism Value: A. thaliana
  misc_feature: MA Experiment 20001910 PARAMETER Experiment Name: At_Drought_Reproduction_P Parameter: Plant Line Value: WS
  misc_feature: MA Experiment 20001910 PARAMETER Experiment Name: At_Drought_Reproduction_P Parameter: Timepoint (day) Value: 7
  misc_feature: MA Experiment 20001910 PARAMETER Experiment Name: At_Drought_Reproduction_P Parameter: Tissue Value: Flowers
  misc_feature: MA Experiment 20001910 PARAMETER Experiment Name: At_Drought_Reproduction_P Parameter: Treatment Value: Drought vs. No Drought
  misc_feature: MA Experiment ID: 20001911 Result: Up-regulated in Transcription
  misc_feature: MA Experiment 20001911 PARAMETER Experiment Name: At_Drought_Reproduction_P Parameter: Age (day) Value: 40
  misc_feature: MA Experiment 20001911 PARAMETER Experiment Name: At_Drought_Reproduction_P Parameter: Organism Value: A. thaliana
  misc_feature: MA Experiment 20001911 PARAMETER Experiment Name: At_Drought_Reproduction_P Parameter: Plant Line Value: WS
  misc_feature: MA Experiment 20001911 PARAMETER Experiment Name: At_Drought_Reproduction_P Parameter: Timepoint (day) Value: 10
  misc_feature: MA Experiment 20001911 PARAMETER Experiment Name: At_Drought_Reproduction_P Parameter: Tissue Value: Flowers
  misc_feature: MA Experiment 20001911 PARAMETER Experiment Name: At_Drought_Reproduction_P Parameter: Treatment Value: Drought vs. No Drought
atgtcggcgatcatgaaaagtctctgtttctccttccttatcctcgcttcatttgcaactttcttctccgttgctgatgcatggaggtttaacgtcggaggtaacggcgcttgggttacaaatcctcaagaaaactacaatacttgggctgaaagaaaccgtttccaagtcaatgactctctctattttaagtacgcgaagggatcagactctgttcaacaagtgatgaaagcagattttgatggatgcaacgttagaaatccgatcaagaacttcgaaaatggtgaatctgtggttactcttgatcgatctggtgctttttatttcataagcggtaatcaagatcactgtcaaaagggacagaaattgatcgtcgttgtcctcgccgtcagaaatcaaccttcggctccggctcattcccctgttccttcagtttctcctactcaacctcctaaatctcattcccctgtttctcccgttgctccagcgtctgctccttcaaaatctcagccacctagatcctctgtttctccagcacaaccacctaaatcttcttcccctatttctcacacaccagctctctcaccgtcgcatgctacatctcactctccagctactccatctccgtcaccaaaatctccctcccctgtttctcactcaccatctcactctccggcacataccccatctcactctccggcacataccccatctcactctccggcacatgccccatctcactccccggcgcatgctccatctcactctccggcgcatgctccatctcactccccggcgcattctccatctcactcaccggcgactccaaaatccccatctccttcttcttctccagctcagtctccggccactccatctccgatgacaccacaatccccatcccctgtttcttccccatcacctgatcagtctgctgctccctctgaccagtctacacccttggcaccttctccttccgaaacaactccgaccgccgataacatcactgcgccggctcctagtcccaggacaaactcagcaagtggtttagccgttacttcggttatgtctacactatttagtgcgacttttacctttctgatgtttgcttaa

SEQ ID NO: 90305 - protein, 370 aa, Arabidopsis thaliana
  peptide (1)..(370): Ceres Seq. ID no. 12723454
  misc_feature (38)..(121): Pfam Name: Plastocyanin-like domain Pfam Description: Plastocyanin-like domain
  misc_feature (1)..(370): Homolog of NCBI NO: 15238868 NR Description: putative protein; protein id: At5g53870.1 thaliana] >gi|10177249|dbj|BAB10717.1| contains similarity to
  misc_feature (1)..(370): Homolog of NCBI NO: 28396618 NR Description: phytocyanin protein, PUP2 [Arabidopsis thaliana]
  misc_feature (5)..(336): Homolog of NCBI NO: 15234164 NR Description: putative protein; protein id: At4g27520.1, by cDNA: 33380., supported by cDNA: gi_13358224 [Arabidopsis
  misc_feature (5)..(336): Homolog of NCBI NO: 21592865 NR Description: unknown [Arabidopsis thaliana]
  misc_feature (95)..(344): Homolog of NCBI NO: 1076211 NR Description: hypothetical protein VSP-3 - Chlamydomonas >gi|530876|gb|AAB53953.1| amino acid feature: Rod protein domain,
  misc_feature (23)..(226): Homolog of NCBI NO: 34903678 NR Description: B1015E06.24 [Oryza sativa (japonica
  misc_feature (1)..(185): Homolog of NCBI NO: 7485901 NR Description: hypothetical protein F20O9.30 - Arabidopsis
  misc_feature (1)..(185): Homolog of NCBI NO: 18417181 NR Description: copper-binding protein-like; protein id:
  misc_feature (89)..(345): Homolog of NCBI NO: 1076211 NR Description: hypothetical protein VSP-3 - Chlamydomonas >gi|530876|gb|AAB53953.1| amino acid feature: Rod protein domain,
  misc_feature (134)..(342): Homolog of NCBI NO: 20138131 NR Description: Vegetative cell wall protein gp1 precursor rich glycoprotein 1) >gi|12018147|gb|AAG45420.1|AF309494_1
MSAIMKSLCFSFLILASFATFFSVADAWRFNVGGNGAWVTNPQENYNTWAERNRFQVNDSLYFKYAKGSDSVQQVMKADFDGCNVRNPIKNFENGESVVTLDRSGAFYFISGNQDHCQKGQKLIVVVLAVRNQPSAPAHSPVPSVSPTQPPKSHSPVSPVAPASAPSKSQPPRSSVSPAQPPKSSSPISHTPALSPSHATSHSPATPSPSPKSPSPVSHSPSHSPAHTPSHSPAHTPSHSPAHAPSHSPAHAPSHSPAHAPSHSPAHSPSHSPATPKSPSPSSSPAQSPATPSPMTPQSPSPVSSPSPDQSAAPSDQSTPLAPSPSETTPTADNITAPAPSPRTNSASGLAVTSVMSTLFSATFTFLMFA

SEQ ID NO: 90306 - protein, 366 aa, Arabidopsis thaliana
  peptide (1)..(366): Ceres Seq. ID no. 12723455
  misc_feature (34)..(117): Pfam Name: Plastocyanin-like domain Pfam Description: Plastocyanin-like domain
  misc_feature (1)..(366): Homolog of NCBI NO: 15238868 NR Description: putative protein; protein id: At5g53870.1 thaliana] >gi|10177249|dbj|BAB10717.1| contains similarity to
  misc_feature (1)..(366): Homolog of NCBI NO: 28396618 NR Description: phytocyanin protein, PUP2 [Arabidopsis thaliana]
  misc_feature (1)..(332): Homolog of NCBI NO: 15234164 NR Description: putative protein; protein id: At4g27520.1, by cDNA: 33380., supported by cDNA: gi_13358224 [Arabidopsis
  misc_feature (1)..(332): Homolog of NCBI NO: 21592865 NR Description: unknown [Arabidopsis thaliana]
  misc_feature (91)..(340): Homolog of NCBI NO: 1076211 NR Description: hypothetical protein VSP-3 - Chlamydomonas >gi|530876|gb|AAB53953.1| amino acid feature: Rod protein domain,
  misc_feature (19)..(222): Homolog of NCBI NO: 34903678 NR Description: B1015E06.24 [Oryza sativa (japonica
  misc_feature (1)..(181): Homolog of NCBI NO: 7485901 NR Description: hypothetical protein F20O9.30 - Arabidopsis
  misc_feature (1)..(181): Homolog of NCBI NO: 18417181 NR Description: copper-binding protein-like; protein id:
  misc_feature (85)..(341): Homolog of NCBI NO: 1076211 NR Description: hypothetical protein VSP-3 - Chlamydomonas >gi|530876|gb|AAB53953.1| amino acid feature: Rod protein domain,
  misc_feature (130)..(338): Homolog of NCBI NO: 20138131 NR Description: Vegetative cell wall protein gp1 precursor rich glycoprotein 1) >gi|12018147|gb|AAG45420.1|AF309494_1
MKSLCFSFLILASFATFFSVADAWRFNVGGNGAWVTNPQENYNTWAERNRFQVNDSLYFKYAKGSDSVQQVMKADFDGCNVRNPIKNFENGESVVTLDRSGAFYFISGNQDHCQKGQKLIVVVLAVRNQPSAPAHSPVPSVSPTQPPKSHSPVSPVAPASAPSKSQPPRSSVSPAQPPKSSSPISHTPALSPSHATSHSPATPSPSPKSPSPVSHSPSHSPAHTPSHSPAHTPSHSPAHAPSHSPAHAPSHSPAHAPSHSPAHSPSHSPATPKSPSPSSSPAQSPATPSPMTPQSPSPVSSPSPDQSAAPSDQSTPLAPSPSETTPTADNITAPAPSPRTNSASGLAVTSVMSTLFSATFTFLMFA

SEQ ID NO: 90307 - protein, 295 aa, Arabidopsis thaliana
  peptide (1)..(295): Ceres Seq. ID no. 12723456
  misc_feature (56)..(267): Pfam Name: Extensin-like region Pfam Description: Extensin-like region
  misc_feature (1)..(295): Homolog of NCBI NO: 15238868 NR Description: putative protein; protein id: At5g53870.1 thaliana] >gi|10177249|dbj|BAB10717.1| contains similarity to
  misc_feature (1)..(295): Homolog of NCBI NO: 28396618 NR Description: phytocyanin protein, PUP2 [Arabidopsis thaliana]
  misc_feature (1)..(261): Homolog of NCBI NO: 15234164 NR Description: putative protein; protein id: At4g27520.1, by cDNA: 33380., supported by cDNA: gi_13358224 [Arabidopsis
  misc_feature (1)..(261): Homolog of NCBI NO: 21592865 NR Description: unknown [Arabidopsis thaliana]
  misc_feature (20)..(269): Homolog of NCBI NO: 1076211 NR Description: hypothetical protein VSP-3 - Chlamydomonas >gi|530876|gb|AAB53953.1| amino acid feature: Rod protein domain,
  misc_feature (1)..(151): Homolog of NCBI NO: 34903678 NR Description: B1015E06.24 [Oryza sativa (japonica
  misc_feature (1)..(110): Homolog of NCBI NO: 7485901 NR Description: hypothetical protein F20O9.30 - Arabidopsis
  misc_feature (1)..(110): Homolog of NCBI NO: 18417181 NR Description: copper-binding protein-like; protein id:
  misc_feature (14)..(270): Homolog of NCBI NO: 1076211 NR Description: hypothetical protein VSP-3 - Chlamydomonas >gi|530876|gb|AAB53953.1| amino acid feature: Rod protein domain,
  misc_feature (59)..(267): Homolog of NCBI NO: 20138131 NR Description: Vegetative cell wall protein gp1 precursor rich glycoprotein 1) >gi|12018147|gb|AAG45420.1|AF309494_1
MKADFDGCNVRNPIKNFENGESVVTLDRSGAFYFISGNQDHCQKGQKLIVVVLAVRNQPSAPAHSPVPSVSPTQPPKSHSPVSPVAPASAPSKSQPPRSSVSPAQPPKSSSPISHTPALSPSHATSHSPATPSPSPKSPSPVSHSPSHSPAHTPSHSPAHTPSHSPAHAPSHSPAHAPSHSPAHAPSHSPAHSPSHSPATPKSPSPSSSPAQSPATPSPMTPQSPSPVSSPSPDQSAAPSDQSTPLAPSPSETTPTADNITAPAPSPRTNSASGLAVTSVMSTLFSATFTFLMFA

SEQ ID NO: 90308 - DNA, 1558 bp, Arabidopsis thaliana
  misc_feature (1)..(1558): Ceres Seq. ID no. 12723483
  misc_feature: MA Experiment ID: 20000169 Result: Up-regulated in Transcription
  misc_feature: MA Experiment 20000169 PARAMETER Experiment Name: At_100uM_ABA_P Parameter: Age (day) Value: 14
  misc_feature: MA Experiment 20000169 PARAMETER Experiment Name: At_100uM_ABA_P Parameter: Organism Value: A. thaliana
  misc_feature: MA Experiment 20000169 PARAMETER Experiment Name: At_100uM_ABA_P Parameter: Plant Line Value: WS
  misc_feature: MA Experiment 20000169 PARAMETER Experiment Name: At_100uM_ABA_P Parameter: Timepoint (hr) Value: 6
  misc_feature: MA Experiment 20000169 PARAMETER Experiment Name: At_100uM_ABA_P Parameter: Tissue Value: Aerial
  misc_feature: MA Experiment 20000169 PARAMETER Experiment Name: At_100uM_ABA_P Parameter: Treatment Value: 100uM ABA vs. No Treatment
  misc_feature: MA Experiment ID: 20000171 Result: Up-regulated in Transcription
  misc_feature: MA Experiment 20000171 PARAMETER Experiment Name: At_42deg_Heat_P Parameter: Age (day) Value: 14
  misc_feature: MA Experiment 20000171 PARAMETER Experiment Name: At_42deg_Heat_P Parameter: Organism Value: A. thaliana
  misc_feature: MA Experiment 20000171 PARAMETER Experiment Name: At_42deg_Heat_P Parameter: Plant Line Value: WS
  misc_feature: MA Experiment 20000171 PARAMETER Experiment Name: At_42deg_Heat_P Parameter: Temperature (deg C) Value: 42 vs. 22
  misc_feature: MA Experiment 20000171 PARAMETER Experiment Name: At_42deg_Heat_P Parameter: Timepoint (hr) Value: 1
  misc_feature: MA Experiment 20000171 PARAMETER Experiment Name: At_42deg_Heat_P Parameter: Tissue Value: Aerial
  misc_feature: MA Experiment ID: 20000173 Result: Up-regulated in Transcription
  misc_feature: MA Experiment 20000173 PARAMETER Experiment Name: At_42deg_Heat_P Parameter: Age (day) Value: 14
  misc_feature: MA Experiment 20000173 PARAMETER Experiment Name: At_42deg_Heat_P Parameter: Organism Value: A. thaliana
  misc_feature: MA Experiment 20000173 PARAMETER Experiment Name: At_42deg_Heat_P Parameter: Plant Line Value: WS
  misc_feature: MA Experiment 20000173 PARAMETER Experiment Name: At_42deg_Heat_P Parameter: Temperature (deg C) Value: 42 vs. 22
  misc_feature: MA Experiment 20000173 PARAMETER Experiment Name: At_42deg_Heat_P Parameter: Timepoint (hr) Value: 6
  misc_feature: MA Experiment 20000173 PARAMETER Experiment Name: At_42deg_Heat_P Parameter: Tissue Value: Aerial
  misc_feature: MA Experiment ID: 20000179 Result: Down-regulated in Transcription
  misc_feature: MA Experiment 20000179 PARAMETER Experiment Name: At_Germinating_Seeds_P Parameter: Age (hr) Value: 6 vs. 0
  misc_feature: MA Experiment 20000179 PARAMETER Experiment Name: At_Germinating_Seeds_P Parameter: Tissue Value: Germinating Seeds
  misc_feature: MA Experiment ID: 20000182 Result: Up-regulated in Transcription
  misc_feature: MA Experiment 20000182 PARAMETER Experiment Name: At_2mM_SA_P Parameter: Age (day) Value: 14
  misc_feature: MA Experiment 20000182 PARAMETER Experiment Name: At_2mM_SA_P Parameter: Organism Value: A. thaliana
  misc_feature: MA Experiment 20000182 PARAMETER Experiment Name: At_2mM_SA_P Parameter: Plant Line Value: WS
  misc_feature: MA Experiment 20000182 PARAMETER Experiment Name: At_2mM_SA_P Parameter: Timepoint (hr) Value: 6
  misc_feature: MA Experiment 20000182 PARAMETER Experiment Name: At_2mM_SA_P Parameter: Tissue Value: Aerial
  misc_feature: MA Experiment 20000182 PARAMETER Experiment Name: At_2mM_SA_P Parameter: Treatment Value: 2mM SA vs. No Treatment
  misc_feature: MA Experiment ID: 20000234 Result: Down-regulated in Transcription
  misc_feature: MA Experiment 20000234 PARAMETER Experiment Name: At_Siliques_P Parameter: Age (day) Value: 21
  misc_feature: MA Experiment 20000234 PARAMETER Experiment Name: At_Siliques_P Parameter: Organism Value: A. thaliana
  misc_feature: MA Experiment 20000234 PARAMETER Experiment Name: At_Siliques_P Parameter: Plant Line Value: WS
  misc_feature: MA Experiment 20000234 PARAMETER Experiment Name: At_Siliques_P Parameter: Tissue Value: Less Than 5mm Siliques vs. Whole Plant
  misc_feature: MA Experiment ID: 20000235 Result: Down-regulated in Transcription
  misc_feature: MA Experiment 20000235 PARAMETER Experiment Name: At_Siliques_P Parameter: Age (day) Value: 21
  misc_feature: MA Experiment 20000235 PARAMETER Experiment Name: At_Siliques_P Parameter: Organism Value: A. thaliana
  misc_feature: MA Experiment 20000235 PARAMETER Experiment Name: At_Siliques_P Parameter: Plant Line Value: WS
  misc_feature: MA Experiment 20000235 PARAMETER Experiment Name: At_Siliques_P Parameter: Tissue Value: 5-10mm Siliques vs. Whole Plant
  misc_feature: MA Experiment ID: 20000265 Result: Down-regulated in Transcription
  misc_feature: MA Experiment 20000265 PARAMETER Experiment Name: At_Open_Flower_P Parameter: Age (day) Value: 21
  misc_feature: MA Experiment 20000265 PARAMETER Experiment Name: At_Open_Flower_P Parameter: Plant Line Value: WS
  misc_feature: MA Experiment 20000265 PARAMETER Experiment Name: At_Open_Flower_P Parameter: Tissue Value: Closed Flower vs. Whole Plant
  misc_feature: MA Experiment ID: 20000267 Result: Up-regulated in Transcription
  misc_feature: MA Experiment 20000267 PARAMETER Experiment Name: At_Drought_P Parameter: Age (day) Value: 7
  misc_feature: MA Experiment 20000267 PARAMETER Experiment Name: At_Drought_P Parameter: Organism Value: A. thaliana
  misc_feature: MA Experiment 20000267 PARAMETER Experiment Name: At_Drought_P Parameter: Plant Line Value: WS
  misc_feature: MA Experiment 20000267 PARAMETER Experiment Name: At_Drought_P Parameter: Timepoint (hr) Value: 6
  misc_feature: MA Experiment 20000267 PARAMETER Experiment Name: At_Drought_P Parameter: Tissue Value: Whole Plant
  misc_feature: MA Experiment 20000267 PARAMETER Experiment Name: At_Drought_P Parameter: Treatment Value: Drought vs. No Drought
  misc_feature: MA Experiment ID: 20000268 Result: Up-regulated in Transcription
  misc_feature: MA Experiment 20000268 PARAMETER Experiment Name: At_100mM_NaCl__P Parameter: Age (day) Value: 14
  misc_feature: MA Experiment 20000268 PARAMETER Experiment Name: At_100mM_NaCl__P Parameter: Organism Value: A. thaliana
  misc_feature: MA Experiment 20000268 PARAMETER Experiment Name: At_100mM_NaCl__P Parameter: Plant Line Value: WS
  misc_feature: MA Experiment 20000268 PARAMETER Experiment Name: At_100mM_NaCl__P Parameter: Timepoint (hr) Value: 6
  misc_feature: MA Experiment 20000268 PARAMETER Experiment Name: At_100mM_NaCl__P Parameter: Tissue Value: Whole Plant
  misc_feature: MA Experiment 20000268 PARAMETER Experiment Name: At_100mM_NaCl__P Parameter: Treatment Value: 100mM NaCl vs. No Treatment
  misc_feature: MA Experiment ID: 20000286 Result: Down-regulated in Transcription
  misc_feature: MA Experiment 20000286 PARAMETER Experiment Name: At_Open_Flower_P Parameter: Age (day) Value: 21
  misc_feature: MA Experiment 20000286 PARAMETER Experiment Name: At_Open_Flower_P Parameter: Plant Line Value: WS
  misc_feature: MA Experiment 20000286 PARAMETER Experiment Name: At_Open_Flower_P Parameter: Tissue Value: Half Open vs. Whole Plant
  misc_feature: MA Experiment ID: 20000436 Result: Up-regulated in Transcription
  misc_feature: MA Experiment 20000436 PARAMETER Experiment Name: At_Drought_P Parameter: Age (day) Value: 7
  misc_feature: MA Experiment 20000436 PARAMETER Experiment Name: At_Drought_P Parameter: Organism Value: A. thaliana
  misc_feature: MA Experiment 20000436 PARAMETER Experiment Name: At_Drought_P Parameter: Plant Line Value: WS
  misc_feature: MA Experiment 20000436 PARAMETER Experiment Name: At_Drought_P Parameter: Timepoint (hr) Value: 12
  misc_feature: MA Experiment 20000436 PARAMETER Experiment Name: At_Drought_P Parameter: Tissue Value: Whole Plant
  misc_feature: MA Experiment 20000436 PARAMETER Experiment Name: At_Drought_P Parameter: Treatment Value: Drought vs. No Drought
  misc_feature: MA Experiment ID: 20000437 Result: Up-regulated in Transcription
  misc_feature: MA Experiment 20000437 PARAMETER Experiment Name: At_Drought_P Parameter: Age (day) Value: 8
  misc_feature: MA Experiment 20000437 PARAMETER Experiment Name: At_Drought_P Parameter: Organism Value: A. thaliana
  misc_feature: MA Experiment 20000437 PARAMETER Experiment Name: At_Drought_P Parameter: Plant Line Value: WS
  misc_feature: MA Experiment 20000437 PARAMETER Experiment Name: At_Drought_P Parameter: Timepoint (hr) Value: 24
  misc_feature: MA Experiment 20000437 PARAMETER Experiment Name: At_Drought_P Parameter: Tissue Value: Whole Plant
  misc_feature: MA Experiment 20000437 PARAMETER Experiment Name: At_Drought_P Parameter: Treatment Value: Drought vs. No Drought
  misc_feature: MA Experiment ID: 20000439 Result: Down-regulated in Transcription
  misc_feature: MA Experiment 20000439 PARAMETER Experiment Name: At_Roots__P Parameter: Age (day) Value: 14 vs. 21
  misc_feature: MA Experiment 20000439 PARAMETER Experiment Name: At_Roots__P Parameter: Organism Value: A. thaliana
  misc_feature: MA Experiment 20000439 PARAMETER Experiment Name: At_Roots__P Parameter: Tissue Value: Roots vs. Whole Plant
  misc_feature: MA Experiment ID: 20000495 Result: Down-regulated in Transcription
  misc_feature: MA Experiment 20000495 PARAMETER Experiment Name: At_Guard_Cells_P Parameter: Harvest Date Value: 8/2/2002
  misc_feature: MA Experiment 20000495 PARAMETER Experiment Name: At_Guard_Cells_P Parameter: Organism Value: A. thaliana
  misc_feature: MA Experiment 20000495 PARAMETER Experiment Name: At_Guard_Cells_P Parameter: Tissue Value: Guard Cells vs. Leaves
  misc_feature: MA Experiment ID: 20000573 Result: Down-regulated in Transcription
  misc_feature: MA Experiment 20000573 PARAMETER Experiment Name: At_100uM_ABA_Mutants__P Parameter: Organism Value: A. thaliana
  misc_feature: MA Experiment 20000573 PARAMETER Experiment Name: At_100uM_ABA_Mutants__P Parameter: Plant Line Value: CS22 vs. Ler wt
  misc_feature: MA Experiment 20000573 PARAMETER Experiment Name: At_100uM_ABA_Mutants__P Parameter: Timepoint (hr) Value: N/A
  misc_feature: MA Experiment 20000573 PARAMETER Experiment Name: At_100uM_ABA_Mutants__P Parameter: Tissue Value: Whole Plant
  misc_feature: MA Experiment 20000573 PARAMETER Experiment Name: At_100uM_ABA_Mutants__P Parameter: Treatment Value: None
  misc_feature: MA Experiment ID: 20000574 Result: Down-regulated in Transcription
  misc_feature: MA Experiment 20000574 PARAMETER Experiment Name: At_100uM_ABA_Mutants__P Parameter: Organism Value: A. thaliana
  misc_feature: MA Experiment 20000574 PARAMETER Experiment Name: At_100uM_ABA_Mutants__P Parameter: Plant Line Value: CS23 vs. Ler wt
  misc_feature: MA Experiment 20000574 PARAMETER Experiment Name: At_100uM_ABA_Mutants__P Parameter: Timepoint (hr) Value: N/A
  misc_feature: MA Experiment 20000574 PARAMETER Experiment Name: At_100uM_ABA_Mutants__P Parameter: Tissue Value: Whole Plant
  misc_feature: MA Experiment 20000574 PARAMETER Experiment Name: At_100uM_ABA_Mutants__P Parameter: Treatment Value: None
  misc_feature: MA Experiment ID: 20000709 Result: Up-regulated in Transcription
  misc_feature: MA Experiment 20000709 PARAMETER Experiment Name: At_15mM_NH4NO3_L-to-H_P Parameter: Age (hr) Value: 14
  misc_feature: MA Experiment 20000709 PARAMETER Experiment Name: At_15mM_NH4NO3_L-to-H_P Parameter: Organism Value: A. thaliana
  misc_feature: MA Experiment 20000709 PARAMETER Experiment Name: At_15mM_NH4NO3_L-to-H_P Parameter: Plant Line Value: WS
  misc_feature: MA Experiment 20000709 PARAMETER Experiment Name: At_15mM_NH4NO3_L-to-H_P Parameter: Timepoint (hr) Value: 4
  misc_feature: MA Experiment 20000709 PARAMETER Experiment Name: At_15mM_NH4NO3_L-to-H_P Parameter: Tissue Value: Aerial
  misc_feature: MA Experiment 20000709 PARAMETER Experiment Name: At_15mM_NH4NO3_L-to-H_P Parameter: Treatment Value: 15mM NH4NO3 vs. 30mM Mannitol
  misc_feature: MA Experiment ID: 20001247 Result: Up-regulated in Transcription
  misc_feature: MA Experiment 20001247 PARAMETER Experiment Name: At_Far-red-induction_P Parameter: Age (day) Value: 7
  misc_feature: MA Experiment 20001247 PARAMETER Experiment Name: At_Far-red-induction_P Parameter: Light Value: Far-red vs. White
  misc_feature: MA Experiment 20001247 PARAMETER Experiment Name: At_Far-red-induction_P Parameter: Organism Value: A. thaliana
  misc_feature: MA Experiment 20001247 PARAMETER Experiment Name: At_Far-red-induction_P Parameter: Plant Line Value: Columbia
  misc_feature: MA Experiment 20001247 PARAMETER Experiment Name: At_Far-red-induction_P Parameter: Timepoint (hr) Value: 1
  misc_feature: MA Experiment 20001247 PARAMETER Experiment Name: At_Far-red-induction_P Parameter: Tissue Value: Whole Plant
  misc_feature: MA Experiment ID: 20001450 Result: Up-regulated in Transcription
  misc_feature: MA Experiment 20001450 PARAMETER Experiment Name: At_Far-red-induction_P Parameter: Age (day) Value: 7
  misc_feature: MA Experiment 20001450 PARAMETER Experiment Name: At_Far-red-induction_P Parameter: Light Value: Far-red vs. White
  misc_feature: MA Experiment 20001450 PARAMETER Experiment Name: At_Far-red-induction_P Parameter: Organism Value: A. thaliana
  misc_feature: MA Experiment 20001450 PARAMETER Experiment Name: At_Far-red-induction_P Parameter: Plant Line Value: Columbia
  misc_feature: MA Experiment 20001450 PARAMETER Experiment Name: At_Far-red-induction_P Parameter: Timepoint (hr) Value: 8
  misc_feature: MA Experiment 20001450 PARAMETER Experiment Name: At_Far-red-induction_P Parameter: Tissue Value: Whole Plant
  misc_feature: MA Experiment ID: 20001451 Result: Up-regulated in Transcription
  misc_feature: MA Experiment 20001451 PARAMETER Experiment Name: At_Far-red-induction_P Parameter: Age (day) Value: 7
  misc_feature: MA Experiment 20001451 PARAMETER Experiment Name: At_Far-red-induction_P Parameter: Light Value: Far-red vs. White
  misc_feature: MA Experiment 20001451 PARAMETER Experiment Name: At_Far-red-induction_P Parameter: Organism Value: A. thaliana
  misc_feature: MA Experiment 20001451 PARAMETER Experiment Name: At_Far-red-induction_P Parameter: Plant Line Value: Columbia
  misc_feature: MA Experiment 20001451 PARAMETER Experiment Name: At_Far-red-induction_P Parameter: Timepoint (hr) Value: 24
  misc_feature: MA Experiment 20001451 PARAMETER Experiment Name: At_Far-red-induction_P Parameter: Tissue Value: Whole Plant
  misc_feature: MA Experiment ID: 20001554 Result: Up-regulated in Transcription
  misc_feature: MA Experiment 20001554 PARAMETER Experiment Name: At_Drought_Soil_Dry_P Parameter: Age (day) Value: 21
  misc_feature: MA Experiment 20001554 PARAMETER Experiment Name: At_Drought_Soil_Dry_P Parameter: Organism Value: A. thaliana
  misc_feature: MA Experiment 20001554 PARAMETER Experiment Name: At_Drought_Soil_Dry_P Parameter: Plant Line Value: WS
  misc_feature: MA Experiment 20001554 PARAMETER Experiment Name: At_Drought_Soil_Dry_P Parameter: Post Timepoint (hr) Value: None
  misc_feature: MA Experiment 20001554 PARAMETER Experiment Name: At_Drought_Soil_Dry_P Parameter: Post-Treatment Value: None
  misc_feature: MA Experiment 20001554 PARAMETER Experiment Name: At_Drought_Soil_Dry_P Parameter: Timepoint (day) Value: 7
  misc_feature: MA Experiment 20001554 PARAMETER Experiment Name: At_Drought_Soil_Dry_P Parameter: Treatment Value: Drought vs. No Drought
  misc_feature: MA Experiment ID: 20001904 Result: Up-regulated in Transcription
  misc_feature: MA Experiment 20001904 PARAMETER Experiment Name: At_Drought_Reproduction_P Parameter: Age (day) Value: 37
  misc_feature: MA Experiment 20001904 PARAMETER Experiment Name: At_Drought_Reproduction_P Parameter: Organism Value: A. thaliana
  misc_feature: MA Experiment 20001904 PARAMETER Experiment Name: At_Drought_Reproduction_P Parameter: Plant Line Value: WS
  misc_feature: MA Experiment 20001904 PARAMETER Experiment Name: At_Drought_Reproduction_P Parameter: Timepoint (day) Value: 7
  misc_feature: MA Experiment 20001904 PARAMETER Experiment Name: At_Drought_Reproduction_P Parameter: Tissue Value: Rosettes
  misc_feature: MA Experiment 20001904 PARAMETER Experiment Name: At_Drought_Reproduction_P Parameter: Treatment Value: Drought vs. No Drought
  misc_feature: MA Experiment ID: 20001906 Result: Up-regulated in Transcription
  misc_feature: MA Experiment 20001906 PARAMETER Experiment Name: At_Drought_Reproduction_P Parameter: Age (day) Value: 35
  misc_feature: MA Experiment 20001906 PARAMETER Experiment Name: At_Drought_Reproduction_P Parameter: Organism Value: A. thaliana
  misc_feature: MA Experiment 20001906 PARAMETER Experiment Name: At_Drought_Reproduction_P Parameter: Plant Line Value: WS
  misc_feature: MA Experiment 20001906 PARAMETER Experiment Name: At_Drought_Reproduction_P Parameter: Timepoint (day) Value: 5
  misc_feature: MA Experiment 20001906 PARAMETER Experiment Name: At_Drought_Reproduction_P Parameter: Tissue Value: Siliques
  misc_feature: MA Experiment 20001906 PARAMETER Experiment Name: At_Drought_Reproduction_P Parameter: Treatment Value: Drought vs. No Drought
acatcaaaatcaaaaccttctcttcttcttcttcttgcgagttgcaccgaaacactcaacaaaaccaaatcatccaaattgggtaaaacaaaagaaactaacaagaagaagatcgaattcaagaagaagagatggagaatggagcaacgacgacgagcacaattaccatcaaagggattctgagtttgctaatggaaagcatcacaacagaggaagatgaaggaggaaagagagtaatatctctgggaatgggagacccaacactctactcgtgttttcgtacaacacaagtctctcttcaagctgtttctgattctcttctctccaacaagttccatggttactctcctaccgtcggtcttccccaagctcgaagggcaatagcagagtatctatcgcgtgatcttccatacaaactttcacaggatgatgtgtttatcacatcgggttgcacgcaagcgatcgatgtagcattgtcgatgttagctcgtcccagggctaatatacttcttccaaggcctggtttcccaatctatgaactctgtgctaagtttagacaccttgaagttcgctacgtcgatcttcttccggaaaatggatgggagatcgatcttgatgctgtcgaggctcttgcagacgaaaacacggttgctttggttgttataaaccctggtaatccttgcgggaatgtctatagctaccagcatttgatgaagattgcggaatcggcgaaaaaactagggtttcttgtgattgctgatgaggtttacggtcatcttgcttttggtagcaaaccgtttgtgccaatgggtgtgtttggatctattgttcctgtgcttactcttggctctttatcaaagagatggatagttccaggttggcgactcgggtggtttgtcaccactgatccttctggttcctttaaggaccctaagatcattgagaggtttaagaaatactttgatattcttggtggaccagctacatttattcaggctgcagttcccactattttggaacagacggatgagtctttcttcaagaaaaccttgaactcgttgaagaactcttcggatatttgttgtgactggatcaaggagattccttgcattgattcctcgcatcgaccagaaggatccatggcaatgatggttaagctgaatctctcattacttgaagatgtaagtgacgatatcgacttctgtttcaagttagctagggaagaatcagtcatccttcttcctgggaccgcggtggggctgaagaactggctgaggataacgtttgcagcagatgcaacttcgattgaagaagcttttaaaaggatcaaatgtttctatcttagacatgccaagactcaatatccaaccatatagttgatttctgattttggtatggtcataaattgttcttaaattacatgtttaaaaacacagatacagtacagtgtctttttgttctccctatataagtgttgatataaaatttctttattgtaataagattaactcttaattaaaaacatcaactaaacgaataaacagaaaaatgttaactt

SEQ ID NO: 90309 - protein, 414 aa, Arabidopsis thaliana
  peptide (1)..(414): Ceres Seq. ID no. 12723484
  misc_feature (86)..(403): Pfam Name: Aminotransferase class I and II Pfam Description: Aminotransferase class I and II
  misc_feature (1)..(414): Homolog of NCBI NO: 15239521 NR Description: tyrosine aminotransferase; protein id: [Arabidopsis thaliana] >gi|10177259|dbj|BAB10727.1| tyrosine [Arabidopsis thaliana] >gi|25054842|gb|AAN71911.1| putative
  misc_feature (1)..(414): Homolog of NCBI NO: 23397279 NR Description: putatative tyrosine aminotransferase [Arabidopsis
  misc_feature (1)..(407): Homolog of NCBI NO: 27525396 NR Description: tyrosine aminotransferase [Solenostemon
  misc_feature (8)..(410): Homolog of NCBI NO: 8777301 NR Description: tyrosine aminotransferase-like protein
  misc_feature (5)..(408): Homolog of NCBI NO: 11527943 NR Description: ROOTY/SUPERROOT1 [Arabidopsis thaliana]
  misc_feature (5)..(408): Homolog of NCBI NO: 11527941 NR Description: ROOTY/SUPERROOT1 [Arabidopsis thaliana]
  misc_feature (5)..(408): Homolog of NCBI NO: 15225387 NR Description: putative tyrosine aminotransferase; protein id: supported by cDNA: gi_11527938, supported by cDNA: gi_11527940,
  misc_feature (5)..(408): Homolog of NCBI NO: 15809874 NR Description: At2g20610/F23N11.7 [Arabidopsis thaliana]
  misc_feature (5)..(408): Homolog of NCBI NO: 6469089 NR Description: nicotianamine aminotransferase [Hordeum vulgare
  misc_feature (5)..(408): Homolog of NCBI NO: 6498122 NR Description: nicotianamine aminotransferase A [Hordeum vulgare
MENGATTTSTITIKGILSLLMESITTEEDEGGKRVISLGMGDPTLYSCFRTTQVSLQAVSDSLLSNKFHGYSPTVGLPQARRAIAEYLSRDLPYKLSQDDVFITSGCTQAIDVALSMLARPRANILLPRPGFPIYELCAKFRHLEVRYVDLLPENGWEIDLDAVEALADENTVALVVINPGNPCGNVYSYQHLMKIAESAKKLGFLVIADEVYGHLAFGSKPFVPMGVFGSIVPVLTLGSLSKRWIVPGWRLGWFVTTDPSGSFKDPKIIERFKKYFDILGGPATFIQAAVPTILEQTDESFFKKTLNSLKNSSDICCDWIKEIPCIDSSHRPEGSMAMMVKLNLSLLEDVSDDIDFCFKLAREESVILLPGTAVGLKNWLRITFAADATSIEEAFKRIKCFYLRHAKTQYPTI

SEQ ID NO: 90310 - protein, 394 aa, Arabidopsis thaliana
  peptide (1)..(394): Ceres Seq. ID no. 12723485
  misc_feature (66)..(383): Pfam Name: Aminotransferase class I and II Pfam Description: Aminotransferase class I and II
  misc_feature (1)..(394): Homolog of NCBI NO: 15239521 NR Description: tyrosine aminotransferase; protein id: [Arabidopsis thaliana] >gi|10177259|dbj|BAB10727.1| tyrosine [Arabidopsis thaliana] >gi|25054842|gb|AAN71911.1| putative
  misc_feature (1)..(394): Homolog of NCBI NO: 23397279 NR Description: putatative tyrosine aminotransferase [Arabidopsis
  misc_feature (1)..(387): Homolog of NCBI NO: 27525396 NR Description: tyrosine aminotransferase [Solenostemon
  misc_feature (1)..(390): Homolog of NCBI NO: 8777301 NR Description: tyrosine aminotransferase-like protein
  misc_feature (1)..(388): Homolog of NCBI NO: 11527943 NR Description: ROOTY/SUPERROOT1 [Arabidopsis thaliana]
  misc_feature (1)..(388): Homolog of NCBI NO: 11527941 NR Description: ROOTY/SUPERROOT1 [Arabidopsis thaliana]
  misc_feature (1)..(388): Homolog of NCBI NO: 15225387 NR Description: putative tyrosine aminotransferase; protein id: supported by cDNA: gi_11527938, supported by cDNA: gi_11527940,
  misc_feature (1)..(388): Homolog of NCBI NO: 15809874 NR Description: At2g20610/F23N11.7 [Arabidopsis thaliana]
  misc_feature (1)..(388): Homolog of NCBI NO: 6469089 NR Description: nicotianamine aminotransferase [Hordeum vulgare
  misc_feature (1)..(388): Homolog of NCBI NO: 6498122 NR Description: nicotianamine aminotransferase A [Hordeum vulgare
MESITTEEDEGGKRVISLGMGDPTLYSCFRTTQVSLQAVSDSLLSNKFHGYSPTVGLPQARRAIAEYLSRDLPYKLSQDDVFITSGCTQAIDVALSMLARPRANILLPRPGFPIYELCAKFRHLEVRYVDLLPENGWEIDLDAVEALADENTVALVVINPGNPCGNVYSYQHLMKIAESAKKLGFLVIADEVYGHLAFGSKPFVPMGVFGSIVPVLTLGSLSKRWIVPGWRLGWFVTTDPSGSFKDPKIIERFKKYFDILGGPATFIQAAVPTILEQTDESFFKKTLNSLKNSSDICCDWIKEIPCIDSSHRPEGSMAMMVKLNLSLLEDVSDDIDFCFKLAREESVILLPGTAVGLKNWLRITFAADATSIEEAFKRIKCFYLRHAKTQYPTI

SEQ ID NO: 90311 - protein, 375 aa, Arabidopsis thaliana
  peptide (1)..(375): Ceres Seq. ID no. 12723486
  misc_feature (47)..(364): Pfam Name: Aminotransferase class I and II Pfam Description: Aminotransferase class I and II
  misc_feature (1)..(375): Homolog of NCBI NO: 15239521 NR Description: tyrosine aminotransferase; protein id: [Arabidopsis thaliana] >gi|10177259|dbj|BAB10727.1| tyrosine [Arabidopsis thaliana] >gi|25054842|gb|AAN71911.1| putative
  misc_feature (1)..(375): Homolog of NCBI NO: 23397279 NR Description: putatative tyrosine aminotransferase [Arabidopsis
  misc_feature (1)..(368): Homolog of NCBI NO: 27525396 NR Description: tyrosine aminotransferase [Solenostemon
  misc_feature (1)..(371): Homolog of NCBI NO: 8777301 NR Description: tyrosine aminotransferase-like protein
  misc_feature (1)..(369): Homolog of NCBI NO: 11527943 NR Description: ROOTY/SUPERROOT1 [Arabidopsis thaliana]
  misc_feature (1)..(369): Homolog of NCBI NO: 11527941 NR Description: ROOTY/SUPERROOT1 [Arabidopsis thaliana]
  misc_feature (1)..(369): Homolog of NCBI NO: 15225387 NR Description: putative tyrosine aminotransferase; protein id: supported by cDNA: gi_11527938, supported by cDNA: gi_11527940,
  misc_feature (1)..(369): Homolog of NCBI NO: 15809874 NR Description: At2g20610/F23N11.7 [Arabidopsis thaliana]
  misc_feature (1)..(369): Homolog of NCBI NO: 6469089 NR Description: nicotianamine aminotransferase [Hordeum vulgare
  misc_feature (1)..(369): Homolog of NCBI NO: 6498122 NR Description: nicotianamine aminotransferase A [Hordeum vulgare
MGDPTLYSCFRTTQVSLQAVSDSLLSNKFHGYSPTVGLPQARRAIAEYLSRDLPYKLSQDDVFITSGCTQAIDVALSMLARPRANILLPRPGFPIYELCAKFRHLEVRYVDLLPENGWEIDLDAVEALADENTVALVVINPGNPCGNVYSYQHLMKIAESAKKLGFLVIADEVYGHLAFGSKPFVPMGVFGSIVPVLTLGSLSKRWIVPGWRLGWFVTTDPSGSFKDPKIIERFKKYFDILGGPATFIQAAVPTILEQTDESFFKKTLNSLKNSSDICCDWIKEIPCIDSSHRPEGSMAMMVKLNLSLLEDVSDDIDFCFKLAREESVILLPGTAVGLKNWLRITFAADATSIEEAFKRIKCFYLRHAKTQYPTI

SEQ ID NO: 90312 - DNA, 1050 bp, Arabidopsis thaliana
  misc_feature (1)..(1050): Ceres Seq. ID no. 12723494
  misc_feature: MA Experiment ID: 20000180 Result: Up-regulated in Transcription
  misc_feature: MA Experiment 20000180 PARAMETER Experiment Name: At_Germinating_Seeds_P Parameter: Age (hr) Value: 24 vs. 0
  misc_feature: MA Experiment 20000180 PARAMETER Experiment Name: At_Germinating_Seeds_P Parameter: Tissue Value: Germinating Seeds
atggagaaaccaaagttgaagacagtccaagaggtggtcgcagctggcgaaaaactaccggaaagatacctctacacacccaccggcgacggcgaaggtgatcaacctttcaatggtttgttgccagagatgaaaatttcgatcatcgatcttaatctccttttctcttcttctgacgacggtcgagaagagttgagtaaacttcactcggcgatctctacatggggcgttgttcaggtgatgaatcatggaatttcagaagccttgctcgacaagattcacgagctaacgaagcagttctttgtacttccgaccaaagagaaacagaagtacgcaagagagataagtagttttcaaggatttggaaacgacatgattctgtctgatgatcaagttctcgattgggtcgaccgcttgtacctcattacgtaccctgaagatcaacgacagcttaaattctggcctgaaaatccaagcggatttagggaaactttacatgaatacacaatgaagcaacagttagtggttgagaaattcttcaaggcattagctagatcgttggagttggaagataattgctttctagagatgcatggtgaaaatgctacgttggagacaagattcaacatctaccctccatgtccgaggccggacaaggttcttgggctaaaaccgcattctgatggctcagcctttactcttatcctacccgacaaaaatgtagaaggacttcagttcctcaaagatgggaagtggtataaagcttcaattctccctcatacaattctgatcaatgtaggagatactatggaggtaatgagcaatggaatatacaagagtccggttcatagagtggtgcttaacggaaaaaaggaaaggatatatgtggcaacattttgtaatgctgatgaagacaaagagattcaacctttaaatgggcttgtgtctgaggctagaccaaggttgtacaaagcagttaagaagtctgagaaaaacttcttcgattactatcaacaaggtcgaagaccgatcgaagctgcaatgatctga

SEQ ID NO: 90313 - protein, 349 aa, Arabidopsis thaliana
  peptide (1)..(349): Ceres Seq. ID no. 12723495
  misc_feature (202)..(302): Pfam Name: 2OG-Fe(II) oxygenase superfamily Pfam Description: 2OG-Fe(II) oxygenase superfamily
  misc_feature (1)..(349): Homolog of NCBI NO: 15239524 NR Description: ethylene-forming-enzyme-like dioxygenase; protein
  misc_feature (1)..(349): Homolog of NCBI NO: 21593366 NR Description: ethylene-forming-enzyme-like dioxygenase-like
  misc_feature (1)..(349): Homolog of NCBI NO: 15241348 NR Description: ethylene-forming-enzyme-like dioxygenase-like protein id: At5g20400.1, supported by cDNA: 38372. [Arabidopsis
  misc_feature (1)..(349): Homolog of NCBI NO: 15222131 NR Description: flavonol synthase, putative; protein id: [Arabidopsis thaliana] >gi|25285686|pir||C96530 hypothetical
  misc_feature (1)..(349): Homolog of NCBI NO: 15241383 NR Description: ethylene-forming-enzyme-like dioxygenase - like;
  misc_feature (8)..(349): Homolog of NCBI NO: 2688828 NR Description: ethylene-forming-enzyme-like dioxygenase [Prunus
  misc_feature (9)..(349): Homolog of NCBI NO: 24413984 NR Description: ethylene-forming-enzyme-like dioxygenase-like
  misc_feature (9)..(330): Homolog of NCBI NO: 24413982 NR Description: ethylene-forming-enzyme-like dioxygenase-like
  misc_feature (9)..(336): Homolog of NCBI NO: 34898470 NR Description: ESTs D47168(S12332),D46350(S10967) correspond to
  misc_feature (5)..(345): Homolog of NCBI NO: 33115140 NR Description: iron/ascorbate-dependent oxidoreductase [Hordeum
MEKPKLKTVQEVVAAGEKLPERYLYTPTGDGEGDQPFNGLLPEMKISIIDLNLLFSSSDDGREELSKLHSAISTWGVVQVMNHGISEALLDKIHELTKQFFVLPTKEKQKYAREISSFQGFGNDMILSDDQVLDWVDRLYLITYPEDQRQLKFWPENPSGFRETLHEYTMKQQLVVEKFFKALARSLELEDNCFLEMHGENATLETRFNIYPPCPRPDKVLGLKPHSDGSAFTLILPDKNVEGLQFLKDGKWYKASILPHTILINVGDTMEVMSNGIYKSPVHRVVLNGKKERIYVATFCNADEDKEIQPLNGLVSEARPRLYKAVKKSEKNFFDYYQQGRRPIEAAMI

SEQ ID NO: 90314 - protein, 306 aa, Arabidopsis thaliana
  peptide (1)..(306): Ceres Seq. ID no. 12723496
  misc_feature (159)..(259): Pfam Name: 2OG-Fe(II) oxygenase superfamily Pfam Description: 2OG-Fe(II) oxygenase superfamily
  misc_feature (1)..(306): Homolog of NCBI NO: 15239524 NR Description: ethylene-forming-enzyme-like dioxygenase; protein
  misc_feature (1)..(306): Homolog of NCBI NO: 21593366 NR Description: ethylene-forming-enzyme-like dioxygenase-like
  misc_feature (1)..(306): Homolog of NCBI NO: 15241348 NR Description: ethylene-forming-enzyme-like dioxygenase-like protein id: At5g20400.1, supported by cDNA: 38372. [Arabidopsis
  misc_feature (1)..(306): Homolog of NCBI NO: 15222131 NR Description: flavonol synthase, putative; protein id: [Arabidopsis thaliana] >gi|25285686|pir||C96530 hypothetical
  misc_feature (1)..(306): Homolog of NCBI NO: 15241383 NR Description: ethylene-forming-enzyme-like dioxygenase - like;
  misc_feature (1)..(306): Homolog of NCBI NO: 2688828 NR Description: ethylene-forming-enzyme-like dioxygenase [Prunus
  misc_feature (1)..(306): Homolog of NCBI NO: 24413984 NR Description: ethylene-forming-enzyme-like dioxygenase-like
  misc_feature (1)..(287): Homolog of NCBI NO: 24413982 NR Description: ethylene-forming-enzyme-like dioxygenase-like
  misc_feature (1)..(293): Homolog of NCBI NO: 34898470 NR Description: ESTs D47168(S12332),D46350(S10967) correspond to
  misc_feature (1)..(302): Homolog of NCBI NO: 33115140 NR Description: iron/ascorbate-dependent oxidoreductase [Hordeum
MKISIIDLNLLFSSSDDGREELSKLHSAISTWGVVQVMNHGISEALLDKIHELTKQFFVLPTKEKQKYAREISSFQGFGNDMILSDDQVLDWVDRLYLITYPEDQRQLKFWPENPSGFRETLHEYTMKQQLVVEKFFKALARSLELEDNCFLEMHGENATLETRFNIYPPCPRPDKVLGLKPHSDGSAFTLILPDKNVEGLQFLKDGKWYKASILPHTILINVGDTMEVMSNGIYKSPVHRVVLNGKKERIYVATFCNADEDKEIQPLNGLVSEARPRLYKAVKKSEKNFFDYYQQGRRPIEAAMI

SEQ ID NO: 90315 - protein, 269 aa, Arabidopsis thaliana
  peptide (1)..(269): Ceres Seq. ID no. 12723497
  misc_feature (122)..(222): Pfam Name: 2OG-Fe(II) oxygenase superfamily Pfam Description: 2OG-Fe(II) oxygenase superfamily
  misc_feature (1)..(269): Homolog of NCBI NO: 15239524 NR Description: ethylene-forming-enzyme-like dioxygenase; protein
  misc_feature (1)..(269): Homolog of NCBI NO: 21593366 NR Description: ethylene-forming-enzyme-like dioxygenase-like
  misc_feature (1)..(269): Homolog of NCBI NO: 15241348 NR Description: ethylene-forming-enzyme-like dioxygenase-like protein id: At5g20400.1, supported by cDNA: 38372. [Arabidopsis
  misc_feature (1)..(269): Homolog of NCBI NO: 15222131 NR Description: flavonol synthase, putative; protein id: [Arabidopsis thaliana] >gi|25285686|pir||C96530 hypothetical
  misc_feature (1)..(269): Homolog of NCBI NO: 15241383 NR Description: ethylene-forming-enzyme-like dioxygenase - like;
  misc_feature (1)..(269): Homolog of NCBI NO: 2688828 NR Description: ethylene-forming-enzyme-like dioxygenase [Prunus
  misc_feature (1)..(269): Homolog of NCBI NO: 24413984 NR Description: ethylene-forming-enzyme-like dioxygenase-like
  misc_feature (1)..(250): Homolog of NCBI NO: 24413982 NR Description: ethylene-forming-enzyme-like dioxygenase-like
  misc_feature (1)..(256): Homolog of NCBI NO: 34898470 NR Description: ESTs D47168(S12332),D46350(S10967) correspond to
  misc_feature (1)..(265): Homolog of NCBI NO: 33115140 NR Description: iron/ascorbate-dependent oxidoreductase [Hordeum
MNHGISEALLDKIHELTKQFFVLPTKEKQKYAREISSFQGFGNDMILSDDQVLDWVDRLYLITYPEDQRQLKFWPENPSGFRETLHEYTMKQQLVVEKFFKALARSLELEDNCFLEMHGENATLETRFNIYPPCPRPDKVLGLKPHSDGSAFTLILPDKNVEGLQFLKDGKWYKASILPHTILINVGDTMEVMSNGIYKSPVHRVVLNGKKERIYVATFCNADEDKEIQPLNGLVSEARPRLYKAVKKSEKNFFDYYQQGRRPIEAAMI

SEQ ID NO: 90316 - DNA, 1362 bp, Arabidopsis thaliana
  misc_feature (1)..(1362): Ceres Seq. ID no. 12723498
  misc_feature: MA Experiment ID: 20000440 Result: Up-regulated in Transcription
  misc_feature: MA Experiment 20000440 PARAMETER Experiment Name: At_Closed-Flower__Sub_P Parameter: Tissue Value: Closed Flower vs. Whole Plant
atggggtcaaagtttcatgcttttatgttcccatggtttggttttggtcacatgactgcatttttgcatctggctaacaaactagcggagaaagaccacaaaataactttcttgctccccaagaaagctcgaaagcaacttgaatctctcaatctcttcccagactgcattgtctttcagactcttaccatcccatctgtagatggcctccctgatggtgctgagacaacctcggatatcccgatctcgttaggcagttttctcgcctcggctatggatcggacacgcattcaggtcaaagaagcagtttctgttggtaaaccggatctgattttcttcgattttgctcactggattccggaaatagctagagagtatggagtcaagagtgtcaatttcataacgatttctgcagcatgtgtagctatttcgttcgtccctggtcgtagtcaagatgacttgggtagtactccaccgggatacccttcctccaaggtgttgcttcggggacacgaaaccaacagtttgtcgttcctctcctatccgtttggagatggaactagtttttacgaacggatcatgataggacttaagaactgcgatgtcatttcgataaggacatgccaagaaatggaaggaaagttctgcgatttcatcgaaaaccaatttcaaagaaaagttctcttgacaggtccaatgcttcctgagccggacaatagcaaaccgctagaagatcaatggcgtcagtggcttagcaagttcgatccgggatcagtaatatattgtgcattgggcagccaaatcattcttgaaaaggatcaattccaagaactctgtttaggaatggagctgacaggtttaccatttcttgtagcggtaaagccaccaaaaggttcatcgacaatccaagaagccttaccaaaagggtttgaagagagggttaaagcacgtggagtggtttggggaggatgggtgcagcaaccattgatattagctcatccatcaataggctgctttgtgagccattgtggtttcgggtcaatgtgggaggctctagtgaatgactgccaaatagtgtttattccacatttgggtgagcaaatattgaacacaagactgatgagcgaggaactcaaggtctcggtagaggtgaaaagagaggaaacgggatggttttcgaaggagagcttgagcggtgcggtcaggtctgtgatggacagagatagcgagctcgggaattgggcgaggaggaaccacgtaaagtggaaggagtctctgcttcgtcatggactaatgagtggttatcttaataagttcgtagaagcattggagaaactagtccaaaatataaatcttgaatga

SEQ ID NO: 90317 - protein, 453 aa, Arabidopsis thaliana
  peptide (1)..(453): Ceres Seq. ID no. 12723499
  misc_feature (1)..(453): Homolog of NCBI NO: 15239525 NR Description: flavonol 3-O-glucosyltransferase-like protein;
  misc_feature (1)..(453): Homolog of NCBI NO: 15239523 NR Description: flavonol 3-O-glucosyltransferase-like protein; id: At5g53990.1, supported by cDNA: gi_17529305, supported by gi_20465446 [Arabidopsis thaliana] >gi|10177261|dbj|BAB10729.1|
  misc_feature (1)..(447): Homolog of NCBI NO: 15217796 NR Description: anthocyanidin-3-glucoside rhamnosyltransferase, protein id: At1g64920.1 [Arabidopsis thaliana]
  misc_feature (1)..(453): Homolog of NCBI NO: 15217773 NR Description: rhamnosyltransferase, putative; protein id:
  misc_feature (1)..(445): Homolog of NCBI NO: 15227766 NR Description: putative flavonol 3-O-glucosyltransferase;
  misc_feature (1)..(445): Homolog of NCBI NO: 15233903 NR Description: putative protein; protein id: At4g09500.1
  misc_feature (2)..(447): Homolog of NCBI NO: 15234196 NR Description: UDP rhamnose--anthocyanidin-3-glucoside
  misc_feature (2)..(451): Homolog of NCBI NO: 15234195 NR Description: UDP rhamnose-anthocyanidin-3-glucoside
  misc_feature (1)..(449): Homolog of NCBI NO: 15223589 NR Description: putative indole-3-acetate protein id: At1g50580.1 [Arabidopsis thaliana]
  misc_feature (1)..(451): Homolog of NCBI NO: 15230017 NR Description: flavonol 3-O-Glucosyltransferase, putative;
MGSKFHAFMFPWFGFGHMTAFLHLANKLAEKDHKITFLLPKKARKQLESLNLFPDCIVFQTLTIPSVDGLPDGAETTSDIPISLGSFLASAMDRTRIQVKEAVSVGKPDLIFFDFAHWIPEIAREYGVKSVNFITISAACVAISFVPGRSQDDLGSTPPGYPSSKVLLRGHETNSLSFLSYPFGDGTSFYERIMIGLKNCDVISIRTCQEMEGKFCDFIENQFQRKVLLTGPMLPEPDNSKPLEDQWRQWLSKFDPGSVIYCALGSQIILEKDQFQELCLGMELTGLPFLVAVKPPKGSSTIQEALPKGFEERVKARGVVWGGWVQQPLILAHPSIGCFVSHCGFGSMWEALVNDCQIVFIPHLGEQILNTRLMSEELKVSVEVKREETGWFSKESLSGAVRSVMDRDSELGNWARRNHVKWKESLLRHGLMSGYLNKFVEALEKLVQNINLE

SEQ ID NO: 90318 - protein, 445 aa, Arabidopsis thaliana
  peptide (1)..(445): Ceres Seq. ID no. 12723500
  misc_feature (1)..(445): Homolog of NCBI NO: 15239525 NR Description: flavonol 3-O-glucosyltransferase-like protein;
  misc_feature (1)..(445): Homolog of NCBI NO: 15239523 NR Description: flavonol 3-O-glucosyltransferase-like protein; id: At5g53990.1, supported by cDNA: gi_17529305, supported by gi_20465446 [Arabidopsis thaliana] >gi|10177261|dbj|BAB10729.1|
  misc_feature (1)..(439): Homolog of NCBI NO: 15217796 NR Description: anthocyanidin-3-glucoside rhamnosyltransferase, protein id: At1g64920.1 [Arabidopsis thaliana]
  misc_feature (1)..(445): Homolog of NCBI NO: 15217773 NR Description: rhamnosyltransferase, putative; protein id:
  misc_feature (1)..(437): Homolog of NCBI NO: 15227766 NR Description: putative flavonol 3-O-glucosyltransferase;
  misc_feature (1)..(437): Homolog of NCBI NO: 15233903 NR Description: putative protein; protein id: At4g09500.1
  misc_feature (1)..(439): Homolog of NCBI NO: 15234196 NR Description: UDP rhamnose--anthocyanidin-3-glucoside
  misc_feature (1)..(443): Homolog of NCBI NO: 15234195 NR Description: UDP rhamnose-anthocyanidin-3-glucoside
  misc_feature (1)..(441): Homolog of NCBI NO: 15223589 NR Description: putative indole-3-acetate protein id: At1g50580.1 [Arabidopsis thaliana]
  misc_feature (1)..(443): Homolog of NCBI NO: 15230017 NR Description: flavonol 3-O-Glucosyltransferase, putative;
MFPWFGFGHMTAFLHLANKLAEKDHKITFLLPKKARKQLESLNLFPDCIVFQTLTIPSVDGLPDGAETTSDIPISLGSFLASAMDRTRIQVKEAVSVGKPDLIFFDFAHWIPEIAREYGVKSVNFITISAACVAISFVPGRSQDDLGSTPPGYPSSKVLLRGHETNSLSFLSYPFGDGTSFYERIMIGLKNCDVISIRTCQEMEGKFCDFIENQFQRKVLLTGPMLPEPDNSKPLEDQWRQWLSKFDPGSVIYCALGSQIILEKDQFQELCLGMELTGLPFLVAVKPPKGSSTIQEALPKGFEERVKARGVVWGGWVQQPLILAHPSIGCFVSHCGFGSMWEALVNDCQIVFIPHLGEQILNTRLMSEELKVSVEVKREETGWFSKESLSGAVRSVMDRDSELGNWARRNHVKWKESLLRHGLMSGYLNKFVEALEKLVQNINLE

SEQ ID NO: 90319 - protein, 436 aa, Arabidopsis thaliana
  peptide (1)..(436): Ceres Seq. ID no. 12723501
  misc_feature (1)..(436): Homolog of NCBI NO: 15239525 NR Description: flavonol 3-O-glucosyltransferase-like protein;
  misc_feature (1)..(436): Homolog of NCBI NO: 15239523 NR Description: flavonol 3-O-glucosyltransferase-like protein; id: At5g53990.1, supported by cDNA: gi_17529305, supported by gi_20465446 [Arabidopsis thaliana] >gi|10177261|dbj|BAB10729.1|
  misc_feature (1)..(430): Homolog of NCBI NO: 15217796 NR Description: anthocyanidin-3-glucoside rhamnosyltransferase, protein id: At1g64920.1 [Arabidopsis thaliana]
  misc_feature (1)..(436): Homolog of NCBI NO: 15217773 NR Description: rhamnosyltransferase, putative; protein id:
  misc_feature (1)..(428): Homolog of NCBI NO: 15227766 NR Description: putative flavonol 3-O-glucosyltransferase;
  misc_feature (1)..(428): Homolog of NCBI NO: 15233903 NR Description: putative protein; protein id: At4g09500.1
  misc_feature (1)..(430): Homolog of NCBI NO: 15234196 NR Description: UDP rhamnose--anthocyanidin-3-glucoside
  misc_feature (1)..(434): Homolog of NCBI NO: 15234195 NR Description: UDP rhamnose-anthocyanidin-3-glucoside
  misc_feature (1)..(432): Homolog of NCBI NO: 15223589 NR Description: putative indole-3-acetate protein id: At1g50580.1 [Arabidopsis thaliana]
  misc_feature (1)..(434): Homolog of NCBI NO: 15230017 NR Description: flavonol 3-O-Glucosyltransferase, putative;
MTAFLHLANKLAEKDHKITFLLPKKARKQLESLNLFPDCIVFQTLTIPSVDGLPDGAETTSDIPISLGSFLASAMDRTRIQVKEAVSVGKPDLIFFDFAHWIPEIAREYGVKSVNFITISAACVAISFVPGRSQDDLGSTPPGYPSSKVLLRGHETNSLSFLSYPFGDGTSFYERIMIGLKNCDVISIRTCQEMEGKFCDFIENQFQRKVLLTGPMLPEPDNSKPLEDQWRQWLSKFDPGSVIYCALGSQIILEKDQFQELCLGMELTGLPFLVAVKPPKGSSTIQEALPKGFEERVKARGVVWGGWVQQPLILAHPSIGCFVSHCGFGSMWEALVNDCQIVFIPHLGEQILNTRLMSEELKVSVEVKREETGWFSKESLSGAVRSVMDRDSELGNWARRNHVKWKESLLRHGLMSGYLNKFVEALEKLVQNINLE

SEQ ID NO: 90320 - DNA, 1254 bp, Arabidopsis thaliana
  misc_feature (1)..(1254): Ceres Seq. ID no. 12723511
  misc_feature: MA Experiment ID: 20000184 Result: Up-regulated in Transcription
  misc_feature: MA Experiment 20000184 PARAMETER Experiment Name: At_Shoots__P Parameter: Age (day) Value: 7
  misc_feature: MA Experiment 20000184 PARAMETER Experiment Name: At_Shoots__P Parameter: Tissue Value: Shoots vs. Whole Plant
  misc_feature: MA Experiment ID: 20000185 Result: Down-regulated in Transcription
  misc_feature: MA Experiment 20000185 PARAMETER Experiment Name: At_Roots__P Parameter: Age (day) Value: 7 vs. 21
  misc_feature: MA Experiment 20000185 PARAMETER Experiment Name: At_Roots__P Parameter: Organism Value: A. thaliana
  misc_feature: MA Experiment 20000185 PARAMETER Experiment Name: At_Roots__P Parameter: Tissue Value: Roots vs. Whole Plant
  misc_feature: MA Experiment ID: 20000453 Result: Down-regulated in Transcription
  misc_feature: MA Experiment 20000453 PARAMETER Experiment Name: At_100uM_ABA_P Parameter: Age (day) Value: 15
  misc_feature: MA Experiment 20000453 PARAMETER Experiment Name: At_100uM_ABA_P Parameter: Organism Value: A. thaliana
  misc_feature: MA Experiment 20000453 PARAMETER Experiment Name: At_100uM_ABA_P Parameter: Plant Line Value: WS
  misc_feature: MA Experiment 20000453 PARAMETER Experiment Name: At_100uM_ABA_P Parameter: Timepoint (hr) Value: 24
  misc_feature: MA Experiment 20000453 PARAMETER Experiment Name: At_100uM_ABA_P Parameter: Tissue Value: Aerial
  misc_feature: MA Experiment 20000453 PARAMETER Experiment Name: At_100uM_ABA_P Parameter: Treatment Value: 100uM ABA vs. No Treatment
  misc_feature: MA Experiment ID: 20000495 Result: Down-regulated in Transcription
  misc_feature: MA Experiment 20000495 PARAMETER Experiment Name: At_Guard_Cells_P Parameter: Harvest Date Value: 8/2/2002
  misc_feature: MA Experiment 20000495 PARAMETER Experiment Name: At_Guard_Cells_P Parameter: Organism Value: A. thaliana
  misc_feature: MA Experiment 20000495 PARAMETER Experiment Name: At_Guard_Cells_P Parameter: Tissue Value: Guard Cells vs. Leaves
  misc_feature: MA Experiment ID: 20001557 Result: Down-regulated in Transcription
  misc_feature: MA Experiment 20001557 PARAMETER Experiment Name: At_Drought_Soil_Dry_P Parameter: Age (day) Value: 27
  misc_feature: MA Experiment 20001557 PARAMETER Experiment Name: At_Drought_Soil_Dry_P Parameter: Organism Value: A. thaliana
  misc_feature: MA Experiment 20001557 PARAMETER Experiment Name: At_Drought_Soil_Dry_P Parameter: Plant Line Value: WS
  misc_feature: MA Experiment 20001557 PARAMETER Experiment Name: At_Drought_Soil_Dry_P Parameter: Post Timepoint (hr) Value: 3
  misc_feature: MA Experiment 20001557 PARAMETER Experiment Name: At_Drought_Soil_Dry_P Parameter: Post-Treatment Value: Re-Water vs. No Drought
  misc_feature: MA Experiment 20001557 PARAMETER Experiment Name: At_Drought_Soil_Dry_P Parameter: Timepoint (day) Value: 13
  misc_feature: MA Experiment 20001557 PARAMETER Experiment Name: At_Drought_Soil_Dry_P Parameter: Treatment Value: Drought vs. No Drought
  misc_feature: MA Experiment ID: 20001558 Result: Down-regulated in Transcription
  misc_feature: MA Experiment 20001558 PARAMETER Experiment Name: At_Drought_Soil_Dry_P Parameter: Age (day) Value: 27
  misc_feature: MA Experiment 20001558 PARAMETER Experiment Name: At_Drought_Soil_Dry_P Parameter: Organism Value: A. thaliana
  misc_feature: MA Experiment 20001558 PARAMETER Experiment Name: At_Drought_Soil_Dry_P Parameter: Plant Line Value: WS
  misc_feature: MA Experiment 20001558 PARAMETER Experiment Name: At_Drought_Soil_Dry_P Parameter: Post Timepoint (hr) Value: 6
  misc_feature: MA Experiment 20001558 PARAMETER Experiment Name: At_Drought_Soil_Dry_P Parameter: Post-Treatment Value: Re-Water vs. No Drought
  misc_feature: MA Experiment 20001558 PARAMETER Experiment Name: At_Drought_Soil_Dry_P Parameter: Timepoint (day) Value: 13
  misc_feature: MA Experiment 20001558 PARAMETER Experiment Name: At_Drought_Soil_Dry_P Parameter: Treatment Value: Drought vs. No Drought
aatacaagaaatagaaacggtgtaggaagctactatgacggcaattccaaacgtcgtcgatattgaatcttcttcctcttcgctttgtcaagagacggcaacggagaccgtcaccgttgaaagaggctcgtctgattcatcttcaaagccagacgacgtcgttttactaatcaaggaagaggaggatgacgccgttaacttgtcacttggtttttggaaattgcacgagataggtttaataacaccgttcttgagaaagacgtttgagatcgtcgatgacaaagtaacagacccggttgtatcatggagcccgacccgtaaaagctttatcatttgggattcttacgagttctcagagaatctacttcccaaatacttcaagcacaagaacttctccagttttattcgtcagcttaactcttacggttttaaaaaggtcgattcagataggtgggaatttgctaacgaagggtttcaaggagggaagaaacatttgcttaagaacatcaagaggagaagcaaaaacactaaatgttgtaacaaggaagcgagtaccaccacgacagagactgaggttgagtcattgaaggaggaacagagtccaatgagattggagatgttgaagctgaaacaacaacaagaagaatctcaacatcagatggtcactgtgcaggagaagatccacggagttgataccgaacaacagcatatgcttagtttctttgcaaagttggctaaagatcaaagatttgtagagagactggtgaagaagagaaagatgaaaatacagagagagctagaagcagctgaattcgtgaagaagctcaagttgcttcaggatcaagaaactcaaaagaacttgttagatgtagaaagagaatttatggccatggctgcaacagaacacaatcccgagcctgacattttggtgaacaatcaaagcgggaatacgagatgtcagcttaactcagaggacctacttgttgacggtggctcaatggatgtaaatgggaggatagagatagagtagagcaaaaccggtaacatagcaatagagaaggtaccaaatcccaaggcttgagatccgaatccgtagcgctttgttgtatggtttcatgtgtatataagcgaaagggacttgtaaaaagcgactcaaggacttgtaaaaaagtgtagctctagtgaaaagggacttgtaaaaaagtgtagctctggttaactgttgccatcgccttccattactaataatttttt

SEQ ID NO: 90321 - protein, 331 aa, Arabidopsis thaliana
  peptide (1)..(331): Ceres Seq. ID no. 12723512
  misc_feature (70)..(233): Pfam Name: HSF-type DNA-binding Pfam Description: HSF-type DNA-binding
  misc_feature (1)..(331): Homolog of NCBI NO: 15239544 NR Description: putative protein; protein id: At5g54070.1, by cDNA: gi_17528983, supported by cDNA: gi_20465484 [Arabidopsis
  misc_feature (43)..(259): Homolog of NCBI NO: 729774 NR Description: HEAT SHOCK FACTOR PROTEIN HSF30 (HEAT SHOCK FACTOR 30) (HSTF 30) (HEAT STRESS TRANSCRIPTION FACTOR)
  misc_feature (178)..(273): Homolog of NCBI NO: 729775 NR Description: HEAT SHOCK FACTOR PROTEIN HSF8 (HEAT SHOCK FACTOR 8) (HSTF 8) (HEAT STRESS TRANSCRIPTION FACTOR)
  misc_feature (71)..(161): Homolog of NCBI NO: 729775 NR Description: HEAT SHOCK FACTOR PROTEIN HSF8 (HEAT SHOCK FACTOR 8) (HSTF 8) (HEAT STRESS TRANSCRIPTION FACTOR)
  misc_feature (178)..(273): Homolog of NCBI NO: 11386827 NR Description: Heat shock factor protein HSF8 (Heat shock factor 8) (HSTF 8) (Heat stress transcription factor)
  misc_feature (71)..(161): Homolog of NCBI NO: 11386827 NR Description: Heat shock factor protein HSF8 (Heat shock factor 8) (HSTF 8) (Heat stress transcription factor)
  misc_feature (7)..(325): Homolog of NCBI NO: 25052685 NR Description: heat stress transcription factor HSFA9
  misc_feature (69)..(282): Homolog of NCBI NO: 11357326 NR Description: heat shock transcription factor-like protein -
  misc_feature (69)..(282): Homolog of NCBI NO: 22326589 NR Description: heat shock transcription factor -like protein;
  misc_feature (63)..(286): Homolog of NCBI NO: 15225255 NR Description: putative heat shock transcription factor; protein At2g26150.1 [Arabidopsis thaliana] >gi|7485001|pir||T02609
MTAIPNVVDIESSSSSLCQETATETVTVERGSSDSSSKPDDVVLLIKEEEDDAVNLSLGFWKLHEIGLITPFLRKTFEIVDDKVTDPVVSWSPTRKSFIIWDSYEFSENLLPKYFKHKNFSSFIRQLNSYGFKKVDSDRWEFANEGFQGGKKHLLKNIKRRSKNTKCCNKEASTTTTETEVESLKEEQSPMRLEMLKLKQQQEESQHQMVTVQEKIHGVDTEQQHMLSFFAKLAKDQRFVERLVKKRKMKIQRELEAAEFVKKLKLLQDQETQKNLLDVEREFMAMAATEHNPEPDILVNNQSGNTRCQLNSEDLLVDGGSMDVNGRIEIE

SEQ ID NO: 90322 - DNA, 1572 bp, Arabidopsis thaliana
  misc_feature (1)..(1572): Ceres Seq. ID no. 12723521
  misc_feature: MA Experiment ID: 20000265 Result: Up-regulated in Transcription
  misc_feature: MA Experiment 20000265 PARAMETER Experiment Name: At_Open_Flower_P Parameter: Age (day) Value: 21
  misc_feature: MA Experiment 20000265 PARAMETER Experiment Name: At_Open_Flower_P Parameter: Plant Line Value: WS
  misc_feature: MA Experiment 20000265 PARAMETER Experiment Name: At_Open_Flower_P Parameter: Tissue Value: Closed Flower vs. Whole Plant
  misc_feature: MA Experiment ID: 20000286 Result: Up-regulated in Transcription
  misc_feature: MA Experiment 20000286 PARAMETER Experiment Name: At_Open_Flower_P Parameter: Age (day) Value: 21
  misc_feature: MA Experiment 20000286 PARAMETER Experiment Name: At_Open_Flower_P Parameter: Plant Line Value: WS
  misc_feature: MA Experiment 20000286 PARAMETER Experiment Name: At_Open_Flower_P Parameter: Tissue Value: Half Open vs. Whole Plant
  misc_feature: MA Experiment ID: 20000438 Result: Down-regulated in Transcription
  misc_feature: MA Experiment 20000438 PARAMETER Experiment Name: At_Shoots__P Parameter: Age (day) Value: 14
  misc_feature: MA Experiment 20000438 PARAMETER Experiment Name: At_Shoots__P Parameter: Tissue Value: Shoots vs. Whole Plant
  misc_feature: MA Experiment ID: 20001910 Result: Down-regulated in Transcription
  misc_feature: MA Experiment 20001910 PARAMETER Experiment Name: At_Drought_Reproduction_P Parameter: Age (day) Value: 37
  misc_feature: MA Experiment 20001910 PARAMETER Experiment Name: At_Drought_Reproduction_P Parameter: Organism Value: A. thaliana
  misc_feature: MA Experiment 20001910 PARAMETER Experiment Name: At_Drought_Reproduction_P Parameter: Plant Line Value: WS
  misc_feature: MA Experiment 20001910 PARAMETER Experiment Name: At_Drought_Reproduction_P Parameter: Timepoint (day) Value: 7
  misc_feature: MA Experiment 20001910 PARAMETER Experiment Name: At_Drought_Reproduction_P Parameter: Tissue Value: Flowers
  misc_feature: MA Experiment 20001910 PARAMETER Experiment Name: At_Drought_Reproduction_P Parameter: Treatment Value: Drought vs. No Drought
atggcgagttataatcttcgttcacaagttcgtcttatagcaataacaatagtaatcatcattactctctcaactccgatcacaaccaacacatcaccacaaccatggaatatcctttcacacaacgaattcgccggaaaactcacctcctcctcctcctccgtcgaatcagccgccacagatttcggccacgtcaccaaaatcttcccttccgccgtcttaatcccttcctccgttgaagacatcacagatctcataaaactctcttttgactctcaactgtcttttcctttagccgctcgtggtcacggacacagccaccgtggccaagcctcggctaaagacggagttgtggtcaacatgcggtccatggtaaaccgggatcgaggtatcaaggtgtctaggacctgtttatatgttgacgtggacgctgcgtggctatggattgaggtgttgaataaaactttggagttagggttaacgccggtttcttggacggattatttgtatttaacagtcggtgggacgttatcaaacggcggaattagtggacaaacgtttcggtacggtccacagatcactaatgttctagagatggatgttattactggaaaaggagagattgcaacttgttccaaggacatgaactcggatcttttcttcgcggtgttaggaggtttgggtcaattcggcattataacaagagccagaattaaacttgaagtagctccgaaaagggccaagtggttaaggtttctatacatagatttctccgaattcacaagagatcaagaacgagtgatatcgaaaacggacggtgtagatttcttagaaggttccattatggtggaccatggcccaccggataactggagatccacgtattatccaccgtccgatcacttgaggatcgcctcaatggtcaaacgacatcgtgtcatctactgccttgaagtcgtcaagtattacgacgaaacttctcaatacacagtcaacgaggaaatggaggagttaagcgatagtttaaaccatgtaagagggtttatgtacgagaaagatgtgacgtatatggatttcctaaaccgagttcgaaccggagagctaaacctgaaatccaaaggccaatgggatgttccacatccatggcttaatctcttcgtaccaaaaactcaaatctccaaatttgatgatggtgtttttaagggtattatcctaagaaataacatcactagcggtcctgttcttgtttatcctatgaatcgcaacaagtggaatgatcggatgtctgccgctatacccgaggaagatgtattttatgcggtagggtttttaagatccgcgggttttgacaattgggaggcttttgatcaagaaaacatggaaatactgaagttttgtgaggatgctaatatgggggttatacaatatcttccttatcattcatcacaagaaggatgggttagacattttggtccgaggtggaatattttcgtagagagaaaatataaatatgatcccaaaatgatattatcaccgggacaaaatatatttcaaaaaataaactcgagttag

SEQ ID NO: 90323 - protein, 523 aa, Arabidopsis thaliana
  peptide (1)..(523): Ceres Seq. ID no. 12723522
  misc_feature (70)..(229): Pfam Name: FAD binding domain Pfam Description: FAD binding domain
  misc_feature (1)..(523): Homolog of NCBI NO: 15241997 NR Description: cytokinin oxidase; protein id: At5g56970.1, by cDNA: gi_11120509 [Arabidopsis thaliana] Cytokinin oxidase 3 precursor (CKO 3) >gi|8777437|dbj|BAA97027.1|
  misc_feature (16)..(517): Homolog of NCBI NO: 11558277 NR Description: cytokinin oxidase [Dendrobium cv. 'Sonia']
  misc_feature (13)..(517): Homolog of NCBI NO: 15233677 NR Description: cytokinin oxidase - like protein; protein id: supported by cDNA: gi_11120511, supported by cDNA: gi_15450760 thaliana] >gi|20137961|sp|Q9FUJ2|CKX4_ARATH Cytokinin oxidase
  misc_feature (54)..(517): Homolog of NCBI NO: 11120512 NR Description: cytokinin oxidase [Arabidopsis thaliana]
  misc_feature (5)..(517): Homolog of NCBI NO: 18399056 NR Description: putative cytokinin oxidase; protein id: supported by cDNA: gi_11120507 [Arabidopsis thaliana] Cytokinin oxidase 2 precursor (CKO 2) >gi|20197481|gb|AAD10149.2|
  misc_feature (5)..(517): Homolog of NCBI NO: 11120508 NR Description: cytokinin oxidase [Arabidopsis thaliana]
  misc_feature (20)..(518): Homolog of NCBI NO: 22330649 NR Description: cytokinin oxidase, putative; protein id:
  misc_feature (20)..(518): Homolog of NCBI NO: 11120516 NR Description: cytokinin oxidase [Arabidopsis thaliana]
  misc_feature (5)..(517): Homolog of NCBI NO: 25345685 NR Description: probable cytokinin oxidase [imported] -
  misc_feature (51)..(519): Homolog of NCBI NO: 15227374 NR Description: putative cytokinin oxidase; protein id: [Arabidopsis thaliana] >gi|7487602|pir||T00807 probable cytokinin
MASYNLRSQVRLIAITIVIIITLSTPITTNTSPQPWNILSHNEFAGKLTSSSSSVESAATDFGHVTKIFPSAVLIPSSVEDITDLIKLSFDSQLSFPLAARGHGHSHRGQASAKDGVVVNMRSMVNRDRGIKVSRTCLYVDVDAAWLWIEVLNKTLELGLTPVSWTDYLYLTVGGTLSNGGISGQTFRYGPQITNVLEMDVITGKGEIATCSKDMNSDLFFAVLGGLGQFGIITRARIKLEVAPKRAKWLRFLYIDFSEFTRDQERVISKTDGVDFLEGSIMVDHGPPDNWRSTYYPPSDHLRIASMVKRHRVIYCLEVVKYYDETSQYTVNEEMEELSDSLNHVRGFMYEKDVTYMDFLNRVRTGELNLKSKGQWDVPHPWLNLFVPKTQISKFDDGVFKGIILRNNITSGPVLVYPMNRNKWNDRMSAAIPEEDVFYAVGFLRSAGFDNWEAFDQENMEILKFCEDANMGVIQYLPYHSSQEGWVRHFGPRWNIFVERKYKYDPKMILSPGQNIFQKINSS

SEQ ID NO: 90324 - protein, 403 aa, Arabidopsis thaliana
  peptide (1)..(403): Ceres Seq. ID no. 12723523
  misc_feature (1)..(109): Pfam Name: FAD binding domain Pfam Description: FAD binding domain
  misc_feature (1)..(403): Homolog of NCBI NO: 15241997 NR Description: cytokinin oxidase; protein id: At5g56970.1, by cDNA: gi_11120509 [Arabidopsis thaliana] Cytokinin oxidase 3 precursor (CKO 3) >gi|8777437|dbj|BAA97027.1|
  misc_feature (1)..(397): Homolog of NCBI NO: 11558277 NR Description: cytokinin oxidase [Dendrobium cv. 'Sonia']
  misc_feature (1)..(397): Homolog of NCBI NO: 15233677 NR Description: cytokinin oxidase - like protein; protein id: supported by cDNA: gi_11120511, supported by cDNA: gi_15450760 thaliana] >gi|20137961|sp|Q9FUJ2|CKX4_ARATH Cytokinin oxidase
  misc_feature (1)..(397): Homolog of NCBI NO: 11120512 NR Description: cytokinin oxidase [Arabidopsis thaliana]
  misc_feature (1)..(397): Homolog of NCBI NO: 18399056 NR Description: putative cytokinin oxidase; protein id: supported by cDNA: gi_11120507 [Arabidopsis thaliana] Cytokinin oxidase 2 precursor (CKO 2) >gi|20197481|gb|AAD10149.2|
  misc_feature (1)..(397): Homolog of NCBI NO: 11120508 NR Description: cytokinin oxidase [Arabidopsis thaliana]
  misc_feature (1)..(398): Homolog of NCBI NO: 22330649 NR Description: cytokinin oxidase, putative; protein id:
  misc_feature (1)..(398): Homolog of NCBI NO: 11120516 NR Description: cytokinin oxidase [Arabidopsis thaliana]
  misc_feature (1)..(397): Homolog of NCBI NO: 25345685 NR Description: probable cytokinin oxidase [imported] -
  misc_feature (1)..(399): Homolog of NCBI NO: 15227374 NR Description: putative cytokinin oxidase; protein id: [Arabidopsis thaliana] >gi|7487602|pir||T00807 probable cytokinin
MRSMVNRDRGIKVSRTCLYVDVDAAWLWIEVLNKTLELGLTPVSWTDYLYLTVGGTLSNGGISGQTFRYGPQITNVLEMDVITGKGEIATCSKDMNSDLFFAVLGGLGQFGIITRARIKLEVAPKRAKWLRFLYIDFSEFTRDQERVISKTDGVDFLEGSIMVDHGPPDNWRSTYYPPSDHLRIASMVKRHRVIYCLEVVKYYDETSQYTVNEEMEELSDSLNHVRGFMYEKDVTYMDFLNRVRTGELNLKSKGQWDVPHPWLNLFVPKTQISKFDDGVFKGIILRNNITSGPVLVYPMNRNKWNDRMSAAIPEEDVFYAVGFLRSAGFDNWEAFDQENMEILKFCEDANMGVIQYLPYHSSQEGWVRHFGPRWNIFVERKYKYDPKMILSPGQNIFQKINSS

SEQ ID NO: 90325 - protein, 400 aa, Arabidopsis thaliana
  peptide (1)..(400): Ceres Seq. ID no. 12723524
  misc_feature (1)..(106): Pfam Name: FAD binding domain Pfam Description: FAD binding domain
  misc_feature (1)..(400): Homolog of NCBI NO: 15241997 NR Description: cytokinin oxidase; protein id: At5g56970.1, by cDNA: gi_11120509 [Arabidopsis thaliana] Cytokinin oxidase 3 precursor (CKO 3) >gi|8777437|dbj|BAA97027.1|
  misc_feature (1)..(394): Homolog of NCBI NO: 11558277 NR Description: cytokinin oxidase [Dendrobium cv. 'Sonia']
  misc_feature (1)..(394): Homolog of NCBI NO: 15233677 NR Description: cytokinin oxidase - like protein; protein id: supported by cDNA: gi_11120511, supported by cDNA: gi_15450760 thaliana] >gi|20137961|sp|Q9FUJ2|CKX4_ARATH Cytokinin oxidase
  misc_feature (1)..(394): Homolog of NCBI NO: 11120512 NR Description: cytokinin oxidase [Arabidopsis thaliana]
  misc_feature (1)..(394): Homolog of NCBI NO: 18399056 NR Description: putative cytokinin oxidase; protein id: supported by cDNA: gi_11120507 [Arabidopsis thaliana] Cytokinin oxidase 2 precursor (CKO 2) >gi|20197481|gb|AAD10149.2|
  misc_feature (1)..(394): Homolog of NCBI NO: 11120508 NR Description: cytokinin oxidase [Arabidopsis thaliana]
  misc_feature (1)..(395): Homolog of NCBI NO: 22330649 NR Description: cytokinin oxidase, putative; protein id:
  misc_feature (1)..(395): Homolog of NCBI NO: 11120516 NR Description: cytokinin oxidase [Arabidopsis thaliana]
  misc_feature (1)..(394): Homolog of NCBI NO: 25345685 NR Description: probable cytokinin oxidase [imported] -
  misc_feature (1)..(396): Homolog of NCBI NO: 15227374 NR Description: putative cytokinin oxidase; protein id: [Arabidopsis thaliana] >gi|7487602|pir||T00807 probable cytokinin
MVNRDRGIKVSRTCLYVDVDAAWLWIEVLNKTLELGLTPVSWTDYLYLTVGGTLSNGGISGQTFRYGPQITNVLEMDVITGKGEIATCSKDMNSDLFFAVLGGLGQFGIITRARIKLEVAPKRAKWLRFLYIDFSEFTRDQERVISKTDGVDFLEGSIMVDHGPPDNWRSTYYPPSDHLRIASMVKRHRVIYCLEVVKYYDETSQYTVNEEMEELSDSLNHVRGFMYEKDVTYMDFLNRVRTGELNLKSKGQWDVPHPWLNLFVPKTQISKFDDGVFKGIILRNNITSGPVLVYPMNRNKWNDRMSAAIPEEDVFYAVGFLRSAGFDNWEAFDQENMEILKFCEDANMGVIQYLPYHSSQEGWVRHFGPRWNIFVERKYKYDPKMILSPGQNIFQKINSS

SEQ ID NO: 90326 - DNA, 1886 bp, Arabidopsis thaliana
  misc_feature (1)..(1886): Ceres Seq. ID no. 12723537
  misc_feature: MA Experiment ID: 20000346 Result: Up-regulated in Transcription
  misc_feature: MA Experiment 20000346 PARAMETER Experiment Name: At_2mM_SA_Sub_P Parameter: Age (day) Value: 14
  misc_feature: MA Experiment 20000346 PARAMETER Experiment Name: At_2mM_SA_Sub_P Parameter: Organism Value: A. thaliana
  misc_feature: MA Experiment 20000346 PARAMETER Experiment Name: At_2mM_SA_Sub_P Parameter: Plant Line Value: WS
  misc_feature: MA Experiment 20000346 PARAMETER Experiment Name: At_2mM_SA_Sub_P Parameter: Timepoint (hr) Value: 1
  misc_feature: MA Experiment 20000346 PARAMETER Experiment Name: At_2mM_SA_Sub_P Parameter: Tissue Value: Aerial
  misc_feature: MA Experiment 20000346 PARAMETER Experiment Name: At_2mM_SA_Sub_P Parameter: Treatment Value: 2mM SA vs. No Treatment
  misc_feature: MA Experiment ID: 20000347 Result: Up-regulated in Transcription
  misc_feature: MA Experiment 20000347 PARAMETER Experiment Name: At_2mM_SA_Sub_P Parameter: Age (day) Value: 14
  misc_feature: MA Experiment 20000347 PARAMETER Experiment Name: At_2mM_SA_Sub_P Parameter: Organism Value: A. thaliana
  misc_feature: MA Experiment 20000347 PARAMETER Experiment Name: At_2mM_SA_Sub_P Parameter: Plant Line Value: WS
  misc_feature: MA Experiment 20000347 PARAMETER Experiment Name: At_2mM_SA_Sub_P Parameter: Timepoint (hr) Value: 6
  misc_feature: MA Experiment 20000347 PARAMETER Experiment Name: At_2mM_SA_Sub_P Parameter: Tissue Value: Aerial
  misc_feature: MA Experiment 20000347 PARAMETER Experiment Name: At_2mM_SA_Sub_P Parameter: Treatment Value: 2mM SA vs. No Treatment
  misc_feature: MA Experiment ID: 20000348 Result: Up-regulated in Transcription
  misc_feature: MA Experiment 20000348 PARAMETER Experiment Name: At_100uM_ABA_Sub_P Parameter: Age (day) Value: 14
  misc_feature: MA Experiment 20000348 PARAMETER Experiment Name: At_100uM_ABA_Sub_P Parameter: Organism Value: A. thaliana
  misc_feature: MA Experiment 20000348 PARAMETER Experiment Name: At_100uM_ABA_Sub_P Parameter: Plant Line Value: WS
  misc_feature: MA Experiment 20000348 PARAMETER Experiment Name: At_100uM_ABA_Sub_P Parameter: Timepoint (hr) Value: 1
  misc_feature: MA Experiment 20000348 PARAMETER Experiment Name: At_100uM_ABA_Sub_P Parameter: Tissue Value: Aerial
  misc_feature: MA Experiment 20000348 PARAMETER Experiment Name: At_100uM_ABA_Sub_P Parameter: Treatment Value: 100uM ABA vs. No Treatment
  misc_feature: MA Experiment ID: 20000349 Result: Up-regulated in Transcription
  misc_feature: MA Experiment 20000349 PARAMETER Experiment Name: At_100uM_ABA_Sub_P Parameter: Age (day) Value: 14
  misc_feature: MA Experiment 20000349 PARAMETER Experiment Name: At_100uM_ABA_Sub_P Parameter: Organism Value: A. thaliana
  misc_feature: MA Experiment 20000349 PARAMETER Experiment Name: At_100uM_ABA_Sub_P Parameter: Plant Line Value: WS
  misc_feature: MA Experiment 20000349 PARAMETER Experiment Name: At_100uM_ABA_Sub_P Parameter: Timepoint (hr) Value: 6
  misc_feature: MA Experiment 20000349 PARAMETER Experiment Name: At_100uM_ABA_Sub_P Parameter: Tissue Value: Aerial
  misc_feature: MA Experiment 20000349 PARAMETER Experiment Name: At_100uM_ABA_Sub_P Parameter: Treatment Value: 100uM ABA vs. No Treatment
  misc_feature: MA Experiment ID: 20000352 Result: Up-regulated in Transcription
  misc_feature: MA Experiment 20000352 PARAMETER Experiment Name: At_Drought_Sub_P Parameter: Age (day) Value: 7
  misc_feature: MA Experiment 20000352 PARAMETER Experiment Name: At_Drought_Sub_P Parameter: Organism Value: A. thaliana
  misc_feature: MA Experiment 20000352 PARAMETER Experiment Name: At_Drought_Sub_P Parameter: Plant Line Value: WS
  misc_feature: MA Experiment 20000352 PARAMETER Experiment Name: At_Drought_Sub_P Parameter: Timepoint (hr) Value: 6
  misc_feature: MA Experiment 20000352 PARAMETER Experiment Name: At_Drought_Sub_P Parameter: Tissue Value: Whole Plant
  misc_feature: MA Experiment 20000352 PARAMETER Experiment Name: At_Drought_Sub_P Parameter: Treatment Value: Drought vs. No Drought
  misc_feature: MA Experiment ID: 20001807 Result: Down-regulated in Transcription
  misc_feature: MA Experiment 20001807 PARAMETER Experiment Name: At_50mM_NH4NO3_L-to-H_Sub_P Parameter: Timepoint (hr) Value: 6
  misc_feature: MA Experiment 20001807 PARAMETER Experiment Name: At_50mM_NH4NO3_L-to-H_Sub_P Parameter: Tissue Value: Leaf
  misc_feature: MA Experiment 20001807 PARAMETER Experiment Name: At_50mM_NH4NO3_L-to-H_Sub_P Parameter: Treatment Value: 50mM NH4NO3 vs 100mM Mannitol
gtgctagctaaggttgtcttcactttcctctaatgagtcatgagtttcttgtcttcatcttcatctaataaagttaacaacactctcatcaatttttattatgttcaaatctgtctgacttttcgttcttttctcttacacccaagcgttttaacaatctaacatctgtctctttgaatacttagatatccaacttcaatttctctcctttctcttcccaactttgattcctgatttgggtttttgttaaagttcaagaaagttcttttttctttttttttcctcctttaatggacgaagtttctcctgcagtcgctgttccattcagaccattcactgaccctcacgccggacttagaggctattgcaacggtgaatctagggttactttaccggaaagttcttgttctggcgacggagctatgaaagattcttcctttgagatcaatacaagacaagattcattgacatcatcatcatctgctatggcaggtgtggatatctccgccggagatgaaatcaacggttcagatgagtttgatccgagatcgatgaatcagagtgagaagaaagtacttagtagaacagagagtagaagtctgtttgagttcaagtgtgttcctttatatggagtgacttcgatttgtggtagacgaccagagatggaagattctgtctcaacgattcctagattccttcaagtttcttctagttcgttgcttgatggtcgagtcactaatggatttaatcctcacttgagtgctcatttctttggtgtttacgatggccatggcggttctcaggtagcgaattattgtcgtgagaggatgcatctggctttgacggaggagatagtgaaggagaaaccggagttttgtgacggtgacacgtggcaagagaagtggaagaaggctttgttcaactcttttatgagagttgactcggagattgaaactgtggctcatgctccggaaactgttgggtctacctcggtggttgcggttgtctttccgactcacatctttgtcgcgaattgcggcgactctagggcggttttgtgtcgcggcaaaacgccactcgcgttgtcggttgatcacaaaccggatagggatgatgaagcggcgaggatagaagctgccggtgggaaagtaatccggtggaacggggctcgtgtatttggtgttctcgcaatgtcaagatccattggcgatagataccttaaaccgtcagtaattccggatccagaagtgacttcagtgcggcgagtaaaagaagatgattgtctcatcttagcaagtgatggtctttgggatgtaatgacaaacgaagaagtgtgcgatttggctcggaaacggattttactatggcataagaagaacgcgatggccggagaggctttgcttccggcggagaaaagaggagaaggaaaagatcctgcagcaatgtccgcggcagagtatttgtcgaagatggctttgcaaaaaggaagcaaagacaatataagtgtggtagtggttgatttgaagggaataaggaaattcaagagcaaatccttgaattgaaaaagaaggtttggaagaaaagtgaaaaaaaaagttttgatggtgggtaaaaattctctttagtgaaaaaagaaagataaaacaacaggtaataattacattgtaatattaatttcctgcttaaatttgttatttactttcttagtcttcccaccattatttaatctttttatatttattttactaacatgatatatataatgtacatgggaatagtgtaacttccaaacaaaaagcccccttgtatttttttttatcttggggttagttgtaataacactacattcgtctacgtaaatatttagtgttattatttgatgtttc

SEQ ID NO: 90327 - protein, 423 aa, Arabidopsis thaliana
  peptide (1)..(423): Ceres Seq. ID no. 12723538
  misc_feature (125)..(404): Pfam Name: Protein phosphatase 2C Pfam Description: Protein phosphatase 2C
  misc_feature (1)..(423): Homolog of NCBI NO: 15242022 NR Description: protein phosphatase 2C, ABI2; protein id: [Arabidopsis thaliana] >gi|3914239|sp|O04719|P2C2_ARATH Protein
  misc_feature (1)..(423): Homolog of NCBI NO: 509419 NR Description: ABI1 [Arabidopsis thaliana]
  misc_feature (1)..(423): Homolog of NCBI NO: 15236110 NR Description: protein phosphatase ABI1; protein id: supported by cDNA: gi_14334799, supported by cDNA: gi_549980 thaliana] >gi|21431817|sp|P49597|P2C1_ARATH Protein phosphatase
  misc_feature (1)..(423): Homolog of NCBI NO: 14334800 NR Description: putative protein phosphatase ABI1 [Arabidopsis
  misc_feature (101)..(421): Homolog of NCBI NO: 21902025 NR Description: protein phosphatase 2C-like protein [Oryza sativa
  misc_feature (36)..(419): Homolog of NCBI NO: 3643082 NR Description: protein phosphatase-2C; PP2C [Mesembryanthemum
  misc_feature (198)..(421): Homolog of NCBI NO: 3242077 NR Description: protein phosphatase 2C [Arabidopsis thaliana]
  misc_feature (198)..(421): Homolog of NCBI NO: 15218595 NR Description: protein phosphatase 2C (AtP2C-HA); protein id:
  misc_feature (186)..(421): Homolog of NCBI NO: 30685388 NR Description: protein phosphatase 2C (PP2C) -related
  misc_feature (186)..(421): Homolog of NCBI NO: 26452332 NR Description: unknown protein [Arabidopsis thaliana]
MDEVSPAVAVPFRPFTDPHAGLRGYCNGESRVTLPESSCSGDGAMKDSSFEINTRQDSLTSSSSAMAGVDISAGDEINGSDEFDPRSMNQSEKKVLSRTESRSLFEFKCVPLYGVTSICGRRPEMEDSVSTIPRFLQVSSSSLLDGRVTNGFNPHLSAHFFGVYDGHGGSQVANYCRERMHLALTEEIVKEKPEFCDGDTWQEKWKKALFNSFMRVDSEIETVAHAPETVGSTSVVAVVFPTHIFVANCGDSRAVLCRGKTPLALSVDHKPDRDDEAARIEAAGGKVIRWNGARVFGVLAMSRSIGDRYLKPSVIPDPEVTSVRRVKEDDCLILASDGLWDVMTNEEVCDLARKRILLWHKKNAMAGEALLPAEKRGEGKDPAAMSAAEYLSKMALQKGSKDNISVVVVDLKGIRKFKSKSLN

SEQ ID NO: 90328 - protein, 379 aa, Arabidopsis thaliana
  peptide (1)..(379): Ceres Seq. ID no. 12723539
  misc_feature (81)..(360): Pfam Name: Protein phosphatase 2C Pfam Description: Protein phosphatase 2C
  misc_feature (1)..(379): Homolog of NCBI NO: 15242022 NR Description: protein phosphatase 2C, ABI2; protein id: [Arabidopsis thaliana] >gi|3914239|sp|O04719|P2C2_ARATH Protein
  misc_feature (1)..(379): Homolog of NCBI NO: 509419 NR Description: ABI1 [Arabidopsis thaliana]
  misc_feature (1)..(379): Homolog of NCBI NO: 15236110 NR Description: protein phosphatase ABI1; protein id: supported by cDNA: gi_14334799, supported by cDNA: gi_549980 thaliana] >gi|21431817|sp|P49597|P2C1_ARATH Protein phosphatase
  misc_feature (1)..(379): Homolog of NCBI NO: 14334800 NR Description: putative protein phosphatase ABI1 [Arabidopsis
  misc_feature (57)..(377): Homolog of NCBI NO: 21902025 NR Description: protein phosphatase 2C-like protein [Oryza sativa
  misc_feature (1)..(375): Homolog of NCBI NO: 3643082 NR Description: protein phosphatase-2C; PP2C [Mesembryanthemum
  misc_feature (154)..(377): Homolog of NCBI NO: 3242077 NR Description: protein phosphatase 2C [Arabidopsis thaliana]
  misc_feature (154)..(377): Homolog of NCBI NO: 15218595 NR Description: protein phosphatase 2C (AtP2C-HA); protein id:
  misc_feature (142)..(377): Homolog of NCBI NO: 30685388 NR Description: protein phosphatase 2C (PP2C) -related
  misc_feature (142)..(377): Homolog of NCBI NO: 26452332 NR Description: unknown protein [Arabidopsis thaliana]
MKDSSFEINTRQDSLTSSSSAMAGVDISAGDEINGSDEFDPRSMNQSEKKVLSRTESRSLFEFKCVPLYGVTSICGRRPEMEDSVSTIPRFLQVSSSSLLDGRVTNGFNPHLSAHFFGVYDGHGGSQVANYCRERMHLALTEEIVKEKPEFCDGDTWQEKWKKALFNSFMRVDSEIETVAHAPETVGSTSVVAVVFPTHIFVANCGDSRAVLCRGKTPLALSVDHKPDRDDEAARIEAAGGKVIRWNGARVFGVLAMSRSIGDRYLKPSVIPDPEVTSVRRVKEDDCLILASDGLWDVMTNEEVCDLARKRILLWHKKNAMAGEALLPAEKRGEGKDPAAMSAAEYLSKMALQKGSKDNISVVVVDLKGIRKFKSKSLN

SEQ ID NO: 90329 - protein, 358 aa, Arabidopsis thaliana
  peptide (1)..(358): Ceres Seq. ID no. 12723540
  misc_feature (60)..(339): Pfam Name: Protein phosphatase 2C Pfam Description: Protein phosphatase 2C
  misc_feature (1)..(358): Homolog of NCBI NO: 15242022 NR Description: protein phosphatase 2C, ABI2; protein id: [Arabidopsis thaliana] >gi|3914239|sp|O04719|P2C2_ARATH Protein
  misc_feature (1)..(358): Homolog of NCBI NO: 509419 NR Description: ABI1 [Arabidopsis thaliana]
  misc_feature (1)..(358): Homolog of NCBI NO: 15236110 NR Description: protein phosphatase ABI1; protein id: supported by cDNA: gi_14334799, supported by cDNA: gi_549980 thaliana] >gi|21431817|sp|P49597|P2C1_ARATH Protein phosphatase
  misc_feature (1)..(358): Homolog of NCBI NO: 14334800 NR Description: putative protein phosphatase ABI1 [Arabidopsis
  misc_feature (36)..(356): Homolog of NCBI NO: 21902025 NR Description: protein phosphatase 2C-like protein [Oryza sativa
  misc_feature (1)..(354): Homolog of NCBI NO: 3643082 NR Description: protein phosphatase-2C; PP2C [Mesembryanthemum
  misc_feature (133)..(356): Homolog of NCBI NO: 3242077 NR Description: protein phosphatase 2C [Arabidopsis thaliana]
  misc_feature (133)..(356): Homolog of NCBI NO: 15218595 NR Description: protein phosphatase 2C (AtP2C-HA); protein id:
  misc_feature (121)..(356): Homolog of NCBI NO: 30685388 NR Description: protein phosphatase 2C (PP2C) -related
  misc_feature (121)..(356): Homolog of NCBI NO: 26452332 NR Description: unknown protein [Arabidopsis thaliana]
MAGVDISAGDEINGSDEFDPRSMNQSEKKVLSRTESRSLFEFKCVPLYGVTSICGRRPEMEDSVSTIPRFLQVSSSSLLDGRVTNGFNPHLSAHFFGVYDGHGGSQVANYCRERMHLALTEEIVKEKPEFCDGDTWQEKWKKALFNSFMRVDSEIETVAHAPETVGSTSVVAVVFPTHIFVANCGDSRAVLCRGKTPLALSVDHKPDRDDEAARIEAAGGKVIRWNGARVFGVLAMSRSIGDRYLKPSVIPDPEVTSVRRVKEDDCLILASDGLWDVMTNEEVCDLARKRILLWHKKNAMAGEALLPAEKRGEGKDPAAMSAAEYLSKMALQKGSKDNISVVVVDLKGIRKFKSKSLN

SEQ ID NO: 90330 - DNA, 1720 bp, Arabidopsis thaliana
  misc_feature (1)..(1720): Ceres Seq. ID no. 12723568
  misc_feature: MA Experiment ID: 20000179 Result: Down-regulated in Transcription
  misc_feature: MA Experiment 20000179 PARAMETER Experiment Name: At_Germinating_Seeds_P Parameter: Age (hr) Value: 6 vs. 0
  misc_feature: MA Experiment 20000179 PARAMETER Experiment Name: At_Germinating_Seeds_P Parameter: Tissue Value: Germinating Seeds
  misc_feature: MA Experiment ID: 20000180 Result: Down-regulated in Transcription
  misc_feature: MA Experiment 20000180 PARAMETER Experiment Name: At_Germinating_Seeds_P Parameter: Age (hr) Value: 24 vs. 0
  misc_feature: MA Experiment 20000180 PARAMETER Experiment Name: At_Germinating_Seeds_P Parameter: Tissue Value: Germinating Seeds
  misc_feature: MA Experiment ID: 20000184 Result: Down-regulated in Transcription
  misc_feature: MA Experiment 20000184 PARAMETER Experiment Name: At_Shoots__P Parameter: Age (day) Value: 7
  misc_feature: MA Experiment 20000184 PARAMETER Experiment Name: At_Shoots__P Parameter: Tissue Value: Shoots vs. Whole Plant
  misc_feature: MA Experiment ID: 20000185 Result: Down-regulated in Transcription
  misc_feature: MA Experiment 20000185 PARAMETER Experiment Name: At_Roots__P Parameter: Age (day) Value: 7 vs. 21
  misc_feature: MA Experiment 20000185 PARAMETER Experiment Name: At_Roots__P Parameter: Organism Value: A. thaliana
  misc_feature: MA Experiment 20000185 PARAMETER Experiment Name: At_Roots__P Parameter: Tissue Value: Roots vs. Whole Plant
  misc_feature: MA Experiment ID: 20000211 Result: Down-regulated in Transcription
  misc_feature: MA Experiment 20000211 PARAMETER Experiment Name: At_0.001percent_MeJA__P Parameter: Age (day) Value: 14
  misc_feature: MA Experiment 20000211 PARAMETER Experiment Name: At_0.001percent_MeJA__P Parameter: Organism Value: A. thaliana
  misc_feature: MA Experiment 20000211 PARAMETER Experiment Name: At_0.001percent_MeJA__P Parameter: Plant Line Value: WS
  misc_feature: MA Experiment 20000211 PARAMETER Experiment Name: At_0.001percent_MeJA__P Parameter: Timepoint (hr) Value: 1
  misc_feature: MA Experiment 20000211 PARAMETER Experiment Name: At_0.001percent_MeJA__P Parameter: Tissue Value: Aerial
  misc_feature: MA Experiment 20000211 PARAMETER Experiment Name: At_0.001percent_MeJA__P Parameter: Treatment Value: 0.001percent MeJA vs. No Treatment
  misc_feature: MA Experiment ID: 20000227 Result: Down-regulated in Transcription
  misc_feature: MA Experiment 20000227 PARAMETER Experiment Name: At_Root-Tips-vs-Tops_P Parameter: Tissue Value: Root Tips vs. Root Tops
  misc_feature: MA Experiment ID: 20000288 Result: Up-regulated in Transcription
  misc_feature: MA Experiment 20000288 PARAMETER Experiment Name: At_Drought_P Parameter: Age (day) Value: 7
  misc_feature: MA Experiment 20000288 PARAMETER Experiment Name: At_Drought_P Parameter: Organism Value: A. thaliana
  misc_feature: MA Experiment 20000288 PARAMETER Experiment Name: At_Drought_P Parameter: Plant Line Value: WS
  misc_feature: MA Experiment 20000288 PARAMETER Experiment Name: At_Drought_P Parameter: Timepoint (hr) Value: 1
  misc_feature: MA Experiment 20000288 PARAMETER Experiment Name: At_Drought_P Parameter: Tissue Value: Whole Plant
  misc_feature: MA Experiment 20000288 PARAMETER Experiment Name: At_Drought_P Parameter: Treatment Value: Drought vs. No Drought
  misc_feature: MA Experiment ID: 20000436 Result: Down-regulated in Transcription
  misc_feature: MA Experiment 20000436 PARAMETER Experiment Name: At_Drought_P Parameter: Age (day) Value: 7
  misc_feature: MA Experiment 20000436 PARAMETER Experiment Name: At_Drought_P Parameter: Organism Value: A. thaliana
  misc_feature: MA Experiment 20000436 PARAMETER Experiment Name: At_Drought_P Parameter: Plant Line Value: WS
  misc_feature: MA Experiment 20000436 PARAMETER Experiment Name: At_Drought_P Parameter: Timepoint (hr) Value: 12
  misc_feature: MA Experiment 20000436 PARAMETER Experiment Name: At_Drought_P Parameter: Tissue Value: Whole Plant
  misc_feature: MA Experiment 20000436 PARAMETER Experiment Name: At_Drought_P Parameter: Treatment Value: Drought vs. No Drought
  misc_feature: MA Experiment ID: 20000438 Result: Down-regulated in Transcription
  misc_feature: MA Experiment 20000438 PARAMETER Experiment Name: At_Shoots__P Parameter: Age (day) Value: 14
  misc_feature: MA Experiment 20000438 PARAMETER Experiment Name: At_Shoots__P Parameter: Tissue Value: Shoots vs. Whole Plant
  misc_feature: MA Experiment ID: 20000439 Result: Down-regulated in Transcription
  misc_feature: MA Experiment 20000439 PARAMETER Experiment Name: At_Roots__P Parameter: Age (day) Value: 14 vs. 21
  misc_feature: MA Experiment 20000439 PARAMETER Experiment Name: At_Roots__P Parameter: Organism Value: A. thaliana
  misc_feature: MA Experiment 20000439 PARAMETER Experiment Name: At_Roots__P Parameter: Tissue Value: Roots vs. Whole Plant
  misc_feature: MA Experiment ID: 20000451 Result: Up-regulated in Transcription
  misc_feature: MA Experiment 20000451 PARAMETER Experiment Name: At_CS6879_Shoots-Roots_P Parameter: Age (day) Value: 14
  misc_feature: MA Experiment 20000451 PARAMETER Experiment Name: At_CS6879_Shoots-Roots_P Parameter: Organism Value: A. thaliana
  misc_feature: MA Experiment 20000451 PARAMETER Experiment Name: At_CS6879_Shoots-Roots_P Parameter: Plant Line Value: CS6879 vs. WS
  misc_feature: MA Experiment 20000451 PARAMETER Experiment Name: At_CS6879_Shoots-Roots_P Parameter: Tissue Value: Roots
  misc_feature: MA Experiment ID: 20000456 Result: Up-regulated in Transcription
  misc_feature: MA Experiment 20000456 PARAMETER Experiment Name: At_100uM_BA_P Parameter: Age (day) Value: 14
  misc_feature: MA Experiment 20000456 PARAMETER Experiment Name: At_100uM_BA_P Parameter: Organism Value: A. thaliana
  misc_feature: MA Experiment 20000456 PARAMETER Experiment Name: At_100uM_BA_P Parameter: Plant Line Value: WS
  misc_feature: MA Experiment 20000456 PARAMETER Experiment Name: At_100uM_BA_P Parameter: Timepoint (hr) Value: 6
  misc_feature: MA Experiment 20000456 PARAMETER Experiment Name: At_100uM_BA_P Parameter: Tissue Value: Aerial
  misc_feature: MA Experiment 20000456 PARAMETER Experiment Name: At_100uM_BA_P Parameter: Treatment Value: 100uM BA vs. No Treatment
  misc_feature: MA Experiment ID: 20000460 Result: Up-regulated in Transcription
  misc_feature: MA Experiment 20000460 PARAMETER Experiment Name: At_10percent_PEG_P Parameter: Age (day) Value: 12
  misc_feature: MA Experiment 20000460 PARAMETER Experiment Name: At_10percent_PEG_P Parameter: Organism Value: A. thaliana
  misc_feature: MA Experiment 20000460 PARAMETER Experiment Name: At_10percent_PEG_P Parameter: Plant Line Value: WS
  misc_feature: MA Experiment 20000460 PARAMETER Experiment Name: At_10percent_PEG_P Parameter: Timepoint (day) Value: 12
  misc_feature: MA Experiment 20000460 PARAMETER Experiment Name: At_10percent_PEG_P Parameter: Tissue Value: Whole Plant
  misc_feature: MA Experiment 20000460 PARAMETER Experiment Name: At_10percent_PEG_P Parameter: Treatment Value: 10percent PEG vs. No Treatment
  misc_feature: MA Experiment ID: 20000576 Result: Down-regulated in Transcription
  misc_feature: MA Experiment 20000576 PARAMETER Experiment Name: At_100uM_ABA_Mutants__P Parameter: Organism Value: A. thaliana
  misc_feature: MA Experiment 20000576 PARAMETER Experiment Name: At_100uM_ABA_Mutants__P Parameter: Plant Line Value: CS23
  misc_feature: MA Experiment 20000576 PARAMETER Experiment Name: At_100uM_ABA_Mutants__P Parameter: Timepoint (hr) Value: 6
  misc_feature: MA Experiment 20000576 PARAMETER Experiment Name: At_100uM_ABA_Mutants__P Parameter: Tissue Value: Whole Plant
  misc_feature: MA Experiment 20000576 PARAMETER Experiment Name: At_100uM_ABA_Mutants__P Parameter: Treatment Value: 1uM ABA vs. No Treatment
  misc_feature: MA Experiment ID: 20000606 Result: Up-regulated in Transcription
  misc_feature: MA Experiment 20000606 PARAMETER Experiment Name: At_CS8548_Mutant_P Parameter: Age (day) Value: 14
  misc_feature: MA Experiment 20000606 PARAMETER Experiment Name: At_CS8548_Mutant_P Parameter: Plant Line Value: CS8548 vs. wt
  misc_feature: MA Experiment 20000606 PARAMETER Experiment Name: At_CS8548_Mutant_P Parameter: Tissue Value: Whole Plant
  misc_feature: MA Experiment ID: 20001247 Result: Up-regulated in Transcription
  misc_feature: MA Experiment 20001247 PARAMETER Experiment Name: At_Far-red-induction_P Parameter: Age (day) Value: 7
  misc_feature: MA Experiment 20001247 PARAMETER Experiment Name: At_Far-red-induction_P Parameter: Light Value: Far-red vs. White
  misc_feature: MA Experiment 20001247 PARAMETER Experiment Name: At_Far-red-induction_P Parameter: Organism Value: A. thaliana
  misc_feature: MA Experiment 20001247 PARAMETER Experiment Name: At_Far-red-induction_P Parameter: Plant Line Value: Columbia
  misc_feature: MA Experiment 20001247 PARAMETER Experiment Name: At_Far-red-induction_P Parameter: Timepoint (hr) Value: 1
  misc_feature: MA Experiment 20001247 PARAMETER Experiment Name: At_Far-red-induction_P Parameter: Tissue Value: Whole Plant
  misc_feature: MA Experiment ID: 20001248 Result: Up-regulated in Transcription
  misc_feature: MA Experiment 20001248 PARAMETER Experiment Name: At_Far-red-induction_P Parameter: Age (day) Value: 7
  misc_feature: MA Experiment 20001248 PARAMETER Experiment Name: At_Far-red-induction_P Parameter: Light Value: Far-red vs. White
  misc_feature: MA Experiment 20001248 PARAMETER Experiment Name: At_Far-red-induction_P Parameter: Organism Value: A. thaliana
  misc_feature: MA Experiment 20001248 PARAMETER Experiment Name: At_Far-red-induction_P Parameter: Plant Line Value: Columbia
  misc_feature: MA Experiment 20001248 PARAMETER Experiment Name: At_Far-red-induction_P Parameter: Timepoint (hr) Value: 4
  misc_feature: MA Experiment 20001248 PARAMETER Experiment Name: At_Far-red-induction_P Parameter: Tissue Value: Whole Plant
  misc_feature: MA Experiment ID: 20001755 Result: Up-regulated in Transcription
  misc_feature: MA Experiment 20001755 PARAMETER Experiment Name: At_50mM_NH4NO3_L-to-H_P Parameter: Timepoint (hr) Value: 2
  misc_feature: MA Experiment 20001755 PARAMETER Experiment Name: At_50mM_NH4NO3_L-to-H_P Parameter: Tissue Value: Leaf
  misc_feature: MA Experiment 20001755 PARAMETER Experiment Name: At_50mM_NH4NO3_L-to-H_P Parameter: Treatment Value: 50mM NH4NO3 vs 100mM Mannitol
  misc_feature: MA Experiment ID: 20001904 Result: Down-regulated in Transcription
  misc_feature: MA Experiment 20001904 PARAMETER Experiment Name: At_Drought_Reproduction_P Parameter: Age (day) Value: 37
  misc_feature: MA Experiment 20001904 PARAMETER Experiment Name: At_Drought_Reproduction_P Parameter: Organism Value: A. thaliana
  misc_feature: MA Experiment 20001904 PARAMETER Experiment Name: At_Drought_Reproduction_P Parameter: Plant Line Value: WS
  misc_feature: MA Experiment 20001904 PARAMETER Experiment Name: At_Drought_Reproduction_P Parameter: Timepoint (day) Value: 7
  misc_feature: MA Experiment 20001904 PARAMETER Experiment Name: At_Drought_Reproduction_P Parameter: Tissue Value: Rosettes
  misc_feature: MA Experiment 20001904 PARAMETER Experiment Name: At_Drought_Reproduction_P Parameter: Treatment Value: Drought vs. No Drought
  misc_feature: MA Experiment ID: 20001905 Result: Down-regulated in Transcription
  misc_feature: MA Experiment 20001905 PARAMETER Experiment Name: At_Drought_Reproduction_P Parameter: Age (day) Value: 40
  misc_feature: MA Experiment 20001905 PARAMETER Experiment Name: At_Drought_Reproduction_P Parameter: Organism Value: A. thaliana
  misc_feature: MA Experiment 20001905 PARAMETER Experiment Name: At_Drought_Reproduction_P Parameter: Plant Line Value: WS
  misc_feature: MA Experiment 20001905 PARAMETER Experiment Name: At_Drought_Reproduction_P Parameter: Timepoint (day) Value: 10
  misc_feature: MA Experiment 20001905 PARAMETER Experiment Name: At_Drought_Reproduction_P Parameter: Tissue Value: Rosettes
  misc_feature: MA Experiment 20001905 PARAMETER Experiment Name: At_Drought_Reproduction_P Parameter: Treatment Value: Drought vs. No Drought
aaaccttctcacaaaaaccaacccaaattctttctatatattaaaaaaaaatcaacacaaaggaaaaaaaaatggattacgttttgattgttttgccacttgcattgtttctcatagcttacaaattcttattctcatccaaaacgcagggcttcaatctcccaccaggaccaactccgtttcctatcgtcggccatctccacctagtgaaaccaccggtccaccgtctcttccgccgcttcgctgaaaaatacggcgacatcttctccctccgttacggctctcgccaagtcgtagtgatctcttcattgcctctcgtaagagaatccttcaccggtcaaaacgacgtcattttaacaaacagaccgcattttctgaccgcgaaatacgtcgcttacgattacaccactataggaaccgccgcttacggtgaccattggcgtaatctccgccgtatttgctctctagaaatcctctcctctaaccgtctcaccggattcctctccgtacgtaaagacgagattcgtcggctgctcacaaaactctcacgtgaatatgacggccgtgttgtcgagcttgaacctcttcttgcagatttgacgttcaataatattgtccgcatggtcacagggagacgctactacggagaccaggttcataacaaggaagaagcgaatctattcaagaaactagtgacggacatcaatgacaacagtggtgcgagccatccaggagattatctaccgattcttaaagtgttcggacacggctacgagaaaaaagtgaaagcactaggcgaagccatggacgctttcttacaacgactgctcgatgaatgtcgaataaatggagagagcaacacaatggttagtcacttgttgtctttacaactagaccaacccaagtattacagtgacgtcatcatcaaagggctcatgctcagtatgatgctagctggaacggatactgcggccgtaacattggaatgggcgatggcaaatttattaaaaaaacctgaagtgttgaaaaaggcaaaagctgagatagacgagaagattggagaagagagattggtcgatgaacctgacattgcgaatctaccttatctccaaaacatagtttccgagacttttcggttgtgtccagctgcaccacttcttgttccacgttctccatctgaagatctcaagattggtggatacgacataccacgtggcactatcgtgctagtgaacgcttgggccatccatagagacccaagactttgggatgagcccgagaagtttatgcctgagcggttcgaagaccaagaagcttcaaagaaactaatggtgtttggtaacggacgaagaacgtgtcctggtgcgactttaggccagaggatggtattgttggctttaggttcgttgattcaatgctttgactgggaaaaagtcaacggtgaagatgttgacatgacagagaatcctggaatggctatgcgtaaactcgtgcaattacgagccgtttgccataaacgtcccattatgactaatctcttggcttaaatatcacattttattgaccaccattttgaagtttaccggtttaagcatttttttgggtttagattttttatatataaatacatgattgttttgaagtttggaaattttaataatgtaagattccatgaaaaatgttgtaatataaaattcgaatcatgaaattaataattcgg

SEQ ID NO: 90331 - protein, 491 aa, Arabidopsis thaliana
  peptide (1)..(491): Ceres Seq. ID no. 12723569
  misc_feature (31)..(478): Pfam Name: Cytochrome P450 Pfam Description: Cytochrome P450
  misc_feature (1)..(491): Homolog of NCBI NO: 15242068 NR Description: cytochrome p450 family; protein id: At5g57220.1, by cDNA: gi_17528949, supported by cDNA: gi_20465950 [Arabidopsis >gi|8777355|dbj|BAA96945.1| cytochrome P450 [Arabidopsis
  misc_feature (1)..(491): Homolog of NCBI NO: 18420031 NR Description: cytochrome p450 family; protein id: At4g37400.1,
  misc_feature (1)..(491): Homolog of NCBI NO: 21618287 NR Description: cytochrome P450 monooxygenase-like protein
  misc_feature (6)..(490): Homolog of NCBI NO: 15235559 NR Description: cytochrome p450 family; protein id: At4g37430.1, by cDNA: 33365., supported by cDNA: gi_14532439, supported by gi_3164143 [Arabidopsis thaliana]
  misc_feature (6)..(490): Homolog of NCBI NO: 21618274 NR Description: cytochrome P450 monooxygenase CYP91A2
  misc_feature (6)..(490): Homolog of NCBI NO: 25282605 NR Description: cytochrome P450 monooxygenase [imported] - thaliana >gi|3164144|dbj|BAA28539.1| cytochrome P450
  misc_feature (6)..(490): Homolog of NCBI NO: 18491105 NR Description: AT4g37430/F6G17_80 [Arabidopsis thaliana]
  misc_feature (6)..(473): Homolog of NCBI NO: 23397303 NR Description: putative cytochrome P450 monooxygenase (CYP91A2)
  misc_feature (2)..(491): Homolog of NCBI NO: 15235541 NR Description: cytochrome p450, putative; protein id: supported by cDNA: 102007. [Arabidopsis thaliana]
  misc_feature (2)..(451): Homolog of NCBI NO: 18252165 NR Description: cytochrome P450 monooxygenase - like protein
MDYVLIVLPLALFLIAYKFLFSSKTQGFNLPPGPTPFPIVGHLHLVKPPVHRLFRRFAEKYGDIFSLRYGSRQVVVISSLPLVRESFTGQNDVILTNRPHFLTAKYVAYDYTTIGTAAYGDHWRNLRRICSLEILSSNRLTGFLSVRKDEIRRLLTKLSREYDGRVVELEPLLADLTFNNIVRMVTGRRYYGDQVHNKEEANLFKKLVTDINDNSGASHPGDYLPILKVFGHGYEKKVKALGEAMDAFLQRLLDECRINGESNTMVSHLLSLQLDQPKYYSDVIIKGLMLSMMLAGTDTAAVTLEWAMANLLKKPEVLKKAKAEIDEKIGEERLVDEPDIANLPYLQNIVSETFRLCPAAPLLVPRSPSEDLKIGGYDIPRGTIVLVNAWAIHRDPRLWDEPEKFMPERFEDQEASKKLMVFGNGRRTCPGATLGQRMVLLALGSLIQCFDWEKVNGEDVDMTENPGMAMRKLVQLRAVCHKRPIMTNLLA

SEQ ID NO: 90332 - protein, 308 aa, Arabidopsis thaliana
  peptide (1)..(308): Ceres Seq. ID no. 12723570
  misc_feature (1)..(295): Pfam Name: Cytochrome P450 Pfam Description: Cytochrome P450
  misc_feature (1)..(308): Homolog of NCBI NO: 15242068 NR Description: cytochrome p450 family; protein id: At5g57220.1, by cDNA: gi_17528949, supported by cDNA: gi_20465950 [Arabidopsis >gi|8777355|dbj|BAA96945.1| cytochrome P450 [Arabidopsis
  misc_feature (1)..(308): Homolog of NCBI NO: 18420031 NR Description: cytochrome p450 family; protein id: At4g37400.1,
  misc_feature (1)..(308): Homolog of NCBI NO: 21618287 NR Description: cytochrome P450 monooxygenase-like protein
  misc_feature (1)..(307): Homolog of NCBI NO: 15235559 NR Description: cytochrome p450 family; protein id: At4g37430.1, by cDNA: 33365., supported by cDNA: gi_14532439, supported by gi_3164143 [Arabidopsis thaliana]
  misc_feature (1)..(307): Homolog of NCBI NO: 21618274 NR Description: cytochrome P450 monooxygenase CYP91A2
  misc_feature (1)..(307): Homolog of NCBI NO: 25282605 NR Description: cytochrome P450 monooxygenase [imported] - thaliana >gi|3164144|dbj|BAA28539.1| cytochrome P450
  misc_feature (1)..(307): Homolog of NCBI NO: 18491105 NR Description: AT4g37430/F6G17_80 [Arabidopsis thaliana]
  misc_feature (1)..(290): Homolog of NCBI NO: 23397303 NR Description: putative cytochrome P450 monooxygenase (CYP91A2)
  misc_feature (1)..(308): Homolog of NCBI NO: 15235541 NR Description: cytochrome p450, putative; protein id: supported by cDNA: 102007. [Arabidopsis thaliana]
  misc_feature (1)..(268): Homolog of NCBI NO: 18252165 NR Description: cytochrome P450 monooxygenase - like protein
MVTGRRYYGDQVHNKEEANLFKKLVTDINDNSGASHPGDYLPILKVFGHGYEKKVKALGEAMDAFLQRLLDECRINGESNTMVSHLLSLQLDQPKYYSDVIIKGLMLSMMLAGTDTAAVTLEWAMANLLKKPEVLKKAKAEIDEKIGEERLVDEPDIANLPYLQNIVSETFRLCPAAPLLVPRSPSEDLKIGGYDIPRGTIVLVNAWAIHRDPRLWDEPEKFMPERFEDQEASKKLMVFGNGRRTCPGATLGQRMVLLALGSLIQCFDWEKVNGEDVDMTENPGMAMRKLVQLRAVCHKRPIMTNLLA

SEQ ID NO: 90333 - protein, 247 aa, Arabidopsis thaliana
  peptide (1)..(247): Ceres Seq. ID no. 12723571
  misc_feature (1)..(234): Pfam Name: Cytochrome P450 Pfam Description: Cytochrome P450
  misc_feature (1)..(247): Homolog of NCBI NO: 15242068 NR Description: cytochrome p450 family; protein id: At5g57220.1, by cDNA: gi_17528949, supported by cDNA: gi_20465950 [Arabidopsis >gi|8777355|dbj|BAA96945.1| cytochrome P450 [Arabidopsis
  misc_feature (1)..(247): Homolog of NCBI NO: 18420031 NR Description: cytochrome p450 family; protein id: At4g37400.1,
  misc_feature (1)..(247): Homolog of NCBI NO: 21618287 NR Description: cytochrome P450 monooxygenase-like protein
  misc_feature (1)..(246): Homolog of NCBI NO: 15235559 NR Description: cytochrome p450 family; protein id: At4g37430.1, by cDNA: 33365., supported by cDNA: gi_14532439, supported by gi_3164143 [Arabidopsis thaliana]
  misc_feature (1)..(246): Homolog of NCBI NO: 21618274 NR Description: cytochrome P450 monooxygenase CYP91A2
  misc_feature (1)..(246): Homolog of NCBI NO: 25282605 NR Description: cytochrome P450 monooxygenase [imported] - thaliana >gi|3164144|dbj|BAA28539.1| cytochrome P450
  misc_feature (1)..(246): Homolog of NCBI NO: 18491105 NR Description: AT4g37430/F6G17_80 [Arabidopsis thaliana]
  misc_feature (1)..(229): Homolog of NCBI NO: 23397303 NR Description: putative cytochrome P450 monooxygenase (CYP91A2)
  misc_feature (1)..(247): Homolog of NCBI NO: 15235541 NR Description: cytochrome p450, putative; protein id: supported by cDNA: 102007. [Arabidopsis thaliana]
  misc_feature (1)..(207): Homolog of NCBI NO: 18252165 NR Description: cytochrome P450 monooxygenase - like protein
MDAFLQRLLDECRINGESNTMVSHLLSLQLDQPKYYSDVIIKGLMLSMMLAGTDTAAVTLEWAMANLLKKPEVLKKAKAEIDEKIGEERLVDEPDIANLPYLQNIVSETFRLCPAAPLLVPRSPSEDLKIGGYDIPRGTIVLVNAWAIHRDPRLWDEPEKFMPERFEDQEASKKLMVFGNGRRTCPGATLGQRMVLLALGSLIQCFDWEKVNGEDVDMTENPGMAMRKLVQLRAVCHKRPIMTNLLA

SEQ ID NO: 90334 - DNA, 483 bp, Arabidopsis thaliana
  misc_feature (1)..(483): Ceres Seq. ID no. 12723572
  misc_feature: MA Experiment ID: 20000184 Result: Down-regulated in Transcription
  misc_feature: MA Experiment 20000184 PARAMETER Experiment Name: At_Shoots__P Parameter: Age (day) Value: 7
  misc_feature: MA Experiment 20000184 PARAMETER Experiment Name: At_Shoots__P Parameter: Tissue Value: Shoots vs. Whole Plant
  misc_feature: MA Experiment ID: 20001247 Result: Down-regulated in Transcription
  misc_feature: MA Experiment 20001247 PARAMETER Experiment Name: At_Far-red-induction_P Parameter: Age (day) Value: 7
  misc_feature: MA Experiment 20001247 PARAMETER Experiment Name: At_Far-red-induction_P Parameter: Light Value: Far-red vs. White
  misc_feature: MA Experiment 20001247 PARAMETER Experiment Name: At_Far-red-induction_P Parameter: Organism Value: A. thaliana
  misc_feature: MA Experiment 20001247 PARAMETER Experiment Name: At_Far-red-induction_P Parameter: Plant Line Value: Columbia
  misc_feature: MA Experiment 20001247 PARAMETER Experiment Name: At_Far-red-induction_P Parameter: Timepoint (hr) Value: 1
  misc_feature: MA Experiment 20001247 PARAMETER Experiment Name: At_Far-red-induction_P Parameter: Tissue Value: Whole Plant
atgggagattcaacatttctcgatagaatgcttctccagcttcgctccacttgcaagtattacagcggttaccctaaggatctcgggccatcgcgggttctccattttacatcagaaagagagtttgtccaactccttcaccagggctatcctgtggttgtcgcattcaccataaggagtaactacacacaacatcttgaccggatgcttgaggaagctgctgctgagttctatcccaacataaaatttatgcgtgttgagtgtcccaagtatcccggattctgcataactcgccagaaaaatgaatatcctttcattgaaatattccatagcccacaacatgccggtaatgaaggaaaagtacaggatccaaatatcactcggtattcagtgaaagttgtaccttacaattatgatatgagtccctacggattcagagaattctttaagcgccagggggttcgtacttcggatcccaaatga

SEQ ID NO: 90335 - protein, 160 aa, Arabidopsis thaliana
  peptide (1)..(160): Ceres Seq. ID no. 12723573
  misc_feature (1)..(160): Homolog of NCBI NO: 15242070 NR Description: unknown protein; protein id: At5g57230.1 thaliana] >gi|8777356|dbj|BAA96946.1| gene_id:MJB24.4~unknown
MGDSTFLDRMLLQLRSTCKYYSGYPKDLGPSRVLHFTSEREFVQLLHQGYPVVVAFTIRSNYTQHLDRMLEEAAAEFYPNIKFMRVECPKYPGFCITRQKNEYPFIEIFHSPQHAGNEGKVQDPNITRYSVKVVPYNYDMSPYGFREFFKRQGVRTSDPK

SEQ ID NO: 90336 - protein, 151 aa, Arabidopsis thaliana
  peptide (1)..(151): Ceres Seq. ID no. 12723574
  misc_feature (1)..(151): Homolog of NCBI NO: 15242070 NR Description: unknown protein; protein id: At5g57230.1 thaliana] >gi|8777356|dbj|BAA96946.1| gene_id:MJB24.4~unknown
MLLQLRSTCKYYSGYPKDLGPSRVLHFTSEREFVQLLHQGYPVVVAFTIRSNYTQHLDRMLEEAAAEFYPNIKFMRVECPKYPGFCITRQKNEYPFIEIFHSPQHAGNEGKVQDPNITRYSVKVVPYNYDMSPYGFREFFKRQGVRTSDPK

SEQ ID NO: 90337 - protein, 92 aa, Arabidopsis thaliana
  peptide (1)..(92): Ceres Seq. ID no. 12723575
  misc_feature (1)..(92): Homolog of NCBI NO: 15242070 NR Description: unknown protein; protein id: At5g57230.1 thaliana] >gi|8777356|dbj|BAA96946.1| gene_id:MJB24.4~unknown
MLEEAAAEFYPNIKFMRVECPKYPGFCITRQKNEYPFIEIFHSPQHAGNEGKVQDPNITRYSVKVVPYNYDMSPYGFREFFKRQGVRTSDPK

SEQ ID NO: 90338 - DNA, 2889 bp, Arabidopsis thaliana
  misc_feature (1)..(2889): Ceres Seq. ID no. 12723580
  misc_feature: MA Experiment ID: 20000315 Result: Down-regulated in Transcription
  misc_feature: MA Experiment 20000315 PARAMETER Experiment Name: At_14day_Shoots-Roots_Sub_P Parameter: Age (day) Value: 14
  misc_feature: MA Experiment 20000315 PARAMETER Experiment Name: At_14day_Shoots-Roots_Sub_P Parameter: Organism Value: A. thaliana
  misc_feature: MA Experiment 20000315 PARAMETER Experiment Name: At_14day_Shoots-Roots_Sub_P Parameter: Plant Line Value: WS
  misc_feature: MA Experiment 20000315 PARAMETER Experiment Name: At_14day_Shoots-Roots_Sub_P Parameter: Tissue Value: Shoots vs. Whole Plant
  misc_feature: MA Experiment ID: 20000355 Result: Up-regulated in Transcription
  misc_feature: MA Experiment 20000355 PARAMETER Experiment Name: At_Siliques_Sub_P Parameter: Age (day) Value: 21
  misc_feature: MA Experiment 20000355 PARAMETER Experiment Name: At_Siliques_Sub_P Parameter: Organism Value: A. thaliana
  misc_feature: MA Experiment 20000355 PARAMETER Experiment Name: At_Siliques_Sub_P Parameter: Plant Line Value: WS
  misc_feature: MA Experiment 20000355 PARAMETER Experiment Name: At_Siliques_Sub_P Parameter: Tissue Value: Less Than 5mm Siliques vs. Whole Plant
  misc_feature: MA Experiment ID: 20000440 Result: Up-regulated in Transcription
  misc_feature: MA Experiment 20000440 PARAMETER Experiment Name: At_Closed-Flower__Sub_P Parameter: Tissue Value: Closed Flower vs. Whole Plant
atgacgttttccatgagagatttagatcaggctcttcaaggagctggccagaaatccgggattgaaatatggcgcatcgagaacttcaaacctgtcactgttccacaagagtctcatgggaaatttttcaccggggattcctatatagtcttaaagaccacagcgtcaagaagcggttctttgcatcatgatattcactactggctcggtaaagattccagccaggatgaagcaggtgctgtagccgtcatgactgttgaattagattcagcattaggtggacgtgctgttcagtaccgagaagtacagggtcacgaaaccgagaagtttctttcctacttcaaaccttgcataatacctcaagaaggtggagttgcttcagggttcaaccatgtaaagcccgaggagcatcagacgcgtctgtatatctgcaaaggcaaacatgtcgtccgtgttaaagaggttccgtttgttcgatcgactctcaaccacgaagacgtttttattcttgatacagagtctaaaatttttcaattcagtggttccaagtcgagtattcaagaaagagcaaaagctcttgaggttgttcagtacattaaagacacttaccatgatggaaagtgcgatatcgcagctgttgaggatgggaggatgatggctgatgctgaagctggagagttttggggcttgtttggtgggtttgctccgcttcctaagaaaccagcagtcaatgatgacgaaaccgctgcatctgatggtatcaaacttttcagtgtcgagaagggacagacagatgccgtagaggctgagtgtttgacgaaagagcttctggacactaacaaatgttatattctcgattgcggtcttgaattgttcgtttggaagggacgaagtacttcaatcgaccaaagaaagagcgcaactgaagctgcagaagaatttttccgttcgtctgaaccgccaaaatcaaacctggtcagtgtgatggaagggtatgaaacagtgatgttccgatctaagtttgattcatggccggcttcaagtaccatagctgagccccaacaaggcagaggcaaagtcgcagctcttttgcagcggcaaggagttaacgttcaaggcctggttaagacttcttcttcttcttctaaagacgaaccgaagccatacattgatggtacaggaaatctccaggtctggcgaatcaattgtgaagaaaagatccttctcgaagcagcagagcaatcaaagttctatagcggggattgttatatactccagtactcatacccaggagaagacagagaggaacatctagtgggtacttggtttggcaagcaaagcgttgaggaagacagagcatctgctatttctttggcaaacaagatggttgaatccatgaagtttgtgccggctcaggctcgcattaatgagggaaaagagccaattcagttttttgtgatcatgcaaagcttcatcacatttaagggtggtgtaagtgatgctttcaaaaagtacatagctgagaacgacatccctgatactacttacgaagcagaaggtgttgcactgtttcgggttcaaggttctggacccgagaacatgcaagccatacagatagaagcggcttccgcaggactaaattcttcgcactgttatatattacacggtgattctactgttttcacttggtgtggcaatcttacttcctcggaagatcaagaacttatggaaagaatgttggatttgattaagccaaatgaacccactaaggcacaaaaggaaggctcagagtctgaacagttttgggaattattaggaggcaaatcagaatatccgagccaaaagatcaaaagggatggagagagtgatcctcatctcttttcttgcacatatacaaacgaaagtctgaaggctacagagatcttcaacttcactcaagatgatttgatgactgaagatatcttcatacttgattgtcacactgaggtctttgtctgggtgggacaacaagttgacccaaagaagaaacctcaagctttggacattggagagaactttcttaagcatgatttcctcctagagaatctagcaagtgaaacaccgatatacattgtaacagagggaaacgaacctccatttttcactcggttcttcacctgggactcttctaaatctggaatgcatggagactctttccagagaaagcttgcgatcctgacaaataaaggaaagccgcttctagataaacctaaaaggagagtccctgcatacagtagcaggtccaccgttccagacaaatcgcagcctcggtccagaagtatgacttttagtccagacagggcccgcgtgaggggacggtctccagctttcaacgcacttgcagcaaactttgagaaactaaatataagaaaccaatcaactccaccacctatggttagtccaatggtccggaagctttacccgaaatctcatgccccagacctctcgaagatagctcctaaatccgctatagctgcccgtacagcgctttttgaaaaacctactcctacttctcaagaaccacctactagccccagttcttcagaagctacaaaccaagcagaagcaccaaaatcgacatcagagacaaacgaggaagaagcaatgagcagcatcaatgaagactcaaaagaagaagaagcagaagaagagagcagcctccctactttcccatatgaacgccttaaaaccgactcagaggatcctgtttcagatgtcgacctcactagaagagaggcatacttgacttcagtagagttcaaggagaagtttgagatgacaaagaatgagttctacaaactgcctaaatggaaacaaaacaagctcaaaatgtctgtcaatctcttctaa

SEQ ID NO: 90339 - protein, 962 aa, Arabidopsis thaliana
  peptide (1)..(962): Ceres Seq. ID no. 12723581
  misc_feature (28)..(111): Pfam Name: Gelsolin repeat Pfam Description: Gelsolin repeat
  misc_feature (1)..(919): Homolog of NCBI NO: 38344157 NR Description: OSJNBa0041A02.24 [Oryza sativa (japonica
  misc_feature (1)..(962): Homolog of NCBI NO: 25091523 NR Description: Villin 3 >gi|11358922|pir||T50668 villin 3 - Arabidopsis thaliana >gi|3415117|gb|AAC31607.1| villin 3
  misc_feature (1)..(962): Homolog of NCBI NO: 18410709 NR Description: villin 3 fragment; protein id: At3g57410.1,
  misc_feature (4)..(962): Homolog of NCBI NO: 18405794 NR Description: putative villin 2; protein id: At2g41740.1, by cDNA: gi_19310557, supported by cDNA: gi_3415114 [Arabidopsis >gi|25091521|sp|O81644|VIL2_ARATH Villin 2
  misc_feature (4)..(962): Homolog of NCBI NO: 11358919 NR Description: villin 2 [imported] - Arabidopsis thaliana
  misc_feature (1)..(962): Homolog of NCBI NO: 11358975 NR Description: actin bundling protein ABP135 [imported] - lily >gi|5880464|gb|AAD54660.1|AF088901_1 actin bundling protein
  misc_feature (1)..(526): Homolog of NCBI NO: 4938492 NR Description: putative villin, fragment [Arabidopsis thaliana]
  misc_feature (6)..(909): Homolog of NCBI NO: 25091518 NR Description: Villin 1 >gi|11358918|pir||T50671 villin 1 - Arabidopsis thaliana >gi|3415113|gb|AAC31605.1| villin 1
  misc_feature (872)..(962): Homolog of NCBI NO: 25091518 NR Description: Villin 1 >gi|11358918|pir||T50671 villin 1 - Arabidopsis thaliana >gi|3415113|gb|AAC31605.1| villin 1
  misc_feature (6)..(909): Homolog of NCBI NO: 18402176 NR Description: putative villin; protein id: At2g29890.1, by cDNA: gi_3415112 [Arabidopsis thaliana]
MTFSMRDLDQALQGAGQKSGIEIWRIENFKPVTVPQESHGKFFTGDSYIVLKTTASRSGSLHHDIHYWLGKDSSQDEAGAVAVMTVELDSALGGRAVQYREVQGHETEKFLSYFKPCIIPQEGGVASGFNHVKPEEHQTRLYICKGKHVVRVKEVPFVRSTLNHEDVFILDTESKIFQFSGSKSSIQERAKALEVVQYIKDTYHDGKCDIAAVEDGRMMADAEAGEFWGLFGGFAPLPKKPAVNDDETAASDGIKLFSVEKGQTDAVEAECLTKELLDTNKCYILDCGLELFVWKGRSTSIDQRKSATEAAEEFFRSSEPPKSNLVSVMEGYETVMFRSKFDSWPASSTIAEPQQGRGKVAALLQRQGVNVQGLVKTSSSSSKDEPKPYIDGTGNLQVWRINCEEKILLEAAEQSKFYSGDCYILQYSYPGEDREEHLVGTWFGKQSVEEDRASAISLANKMVESMKFVPAQARINEGKEPIQFFVIMQSFITFKGGVSDAFKKYIAENDIPDTTYEAEGVALFRVQGSGPENMQAIQIEAASAGLNSSHCYILHGDSTVFTWCGNLTSSEDQELMERMLDLIKPNEPTKAQKEGSESEQFWELLGGKSEYPSQKIKRDGESDPHLFSCTYTNESLKATEIFNFTQDDLMTEDIFILDCHTEVFVWVGQQVDPKKKPQALDIGENFLKHDFLLENLASETPIYIVTEGNEPPFFTRFFTWDSSKSGMHGDSFQRKLAILTNKGKPLLDKPKRRVPAYSSRSTVPDKSQPRSRSMTFSPDRARVRGRSPAFNALAANFEKLNIRNQSTPPPMVSPMVRKLYPKSHAPDLSKIAPKSAIAARTALFEKPTPTSQEPPTSPSSSEATNQAEAPKSTSETNEEEAMSSINEDSKEEEAEEESSLPTFPYERLKTDSEDPVSDVDLTRREAYLTSVEFKEKFEMTKNEFYKLPKWKQNKLKMSVNLF

SEQ ID NO: 90340 - protein, 958 aa, Arabidopsis thaliana
  peptide (1)..(958): Ceres Seq. ID no. 12723582
  misc_feature (24)..(107): Pfam Name: Gelsolin repeat Pfam Description: Gelsolin repeat
  misc_feature (1)..(915): Homolog of NCBI NO: 38344157 NR Description: OSJNBa0041A02.24 [Oryza sativa (japonica
  misc_feature (1)..(958): Homolog of NCBI NO: 25091523 NR Description: Villin 3 >gi|11358922|pir||T50668 villin 3 - Arabidopsis thaliana >gi|3415117|gb|AAC31607.1| villin 3
  misc_feature (1)..(958): Homolog of NCBI NO: 18410709 NR Description: villin 3 fragment; protein id: At3g57410.1,
  misc_feature (1)..(958): Homolog of NCBI NO: 18405794 NR Description: putative villin 2; protein id: At2g41740.1, by cDNA: gi_19310557, supported by cDNA: gi_3415114 [Arabidopsis >gi|25091521|sp|O81644|VIL2_ARATH Villin 2
  misc_feature (1)..(958): Homolog of NCBI NO: 11358919 NR Description: villin 2 [imported] - Arabidopsis thaliana
  misc_feature (1)..(958): Homolog of NCBI NO: 11358975 NR Description: actin bundling protein ABP135 [imported] - lily >gi|5880464|gb|AAD54660.1|AF088901_1 actin bundling protein
  misc_feature (1)..(522): Homolog of NCBI NO: 4938492 NR Description: putative villin, fragment [Arabidopsis thaliana]
  misc_feature (2)..(905): Homolog of NCBI NO: 25091518 NR Description: Villin 1 >gi|11358918|pir||T50671 villin 1 - Arabidopsis thaliana >gi|3415113|gb|AAC31605.1| villin 1
  misc_feature (868)..(958): Homolog of NCBI NO: 25091518 NR Description: Villin 1 >gi|11358918|pir||T50671 villin 1 - Arabidopsis thaliana >gi|3415113|gb|AAC31605.1| villin 1
  misc_feature (2)..(905): Homolog of NCBI NO: 18402176 NR Description: putative villin; protein id: At2g29890.1, by cDNA: gi_3415112 [Arabidopsis thaliana]
MRDLDQALQGAGQKSGIEIWRIENFKPVTVPQESHGKFFTGDSYIVLKTTASRSGSLHHDIHYWLGKDSSQDEAGAVAVMTVELDSALGGRAVQYREVQGHETEKFLSYFKPCIIPQEGGVASGFNHVKPEEHQTRLYICKGKHVVRVKEVPFVRSTLNHEDVFILDTESKIFQFSGSKSSIQERAKALEVVQYIKDTYHDGKCDIAAVEDGRMMADAEAGEFWGLFGGFAPLPKKPAVNDDETAASDGIKLFSVEKGQTDAVEAECLTKELLDTNKCYILDCGLELFVWKGRSTSIDQRKSATEAAEEFFRSSEPPKSNLVSVMEGYETVMFRSKFDSWPASSTIAEPQQGRGKVAALLQRQGVNVQGLVKTSSSSSKDEPKPYIDGTGNLQVWRINCEEKILLEAAEQSKFYSGDCYILQYSYPGEDREEHLVGTWFGKQSVEEDRASAISLANKMVESMKFVPAQARINEGKEPIQFFVIMQSFITFKGGVSDAFKKYIAENDIPDTTYEAEGVALFRVQGSGPENMQAIQIEAASAGLNSSHCYILHGDSTVFTWCGNLTSSEDQELMERMLDLIKPNEPTKAQKEGSESEQFWELLGGKSEYPSQKIKRDGESDPHLFSCTYTNESLKATEIFNFTQDDLMTEDIFILDCHTEVFVWVGQQVDPKKKPQALDIGENFLKHDFLLENLASETPIYIVTEGNEPPFFTRFFTWDSSKSGMHGDSFQRKLAILTNKGKPLLDKPKRRVPAYSSRSTVPDKSQPRSRSMTFSPDRARVRGRSPAFNALAANFEKLNIRNQSTPPPMVSPMVRKLYPKSHAPDLSKIAPKSAIAARTALFEKPTPTSQEPPTSPSSSEATNQAEAPKSTSETNEEEAMSSINEDSKEEEAEEESSLPTFPYERLKTDSEDPVSDVDLTRREAYLTSVEFKEKFEMTKNEFYKLPKWKQNKLKMSVNLF

SEQ ID NO: 90341 - protein, 879 aa, Arabidopsis thaliana; identical to SEQ ID NO: 78691
  peptide (1)..(879): Ceres Seq. ID no. 12723583
  misc_feature (844)..(879): Pfam Name: Villin headpiece domain Pfam Description: Villin headpiece domain
  misc_feature (1)..(836): Homolog of NCBI NO: 38344157 NR Description: OSJNBa0041A02.24 [Oryza sativa (japonica
  misc_feature (1)..(879): Homolog of NCBI NO: 25091523 NR Description: Villin 3 >gi|11358922|pir||T50668 villin 3 - Arabidopsis thaliana >gi|3415117|gb|AAC31607.1| villin 3
  misc_feature (1)..(879): Homolog of NCBI NO: 18410709 NR Description: villin 3 fragment; protein id: At3g57410.1,
  misc_feature (1)..(879): Homolog of NCBI NO: 18405794 NR Description: putative villin 2; protein id: At2g41740.1, by cDNA: gi_19310557, supported by cDNA: gi_3415114 [Arabidopsis >gi|25091521|sp|O81644|VIL2_ARATH Villin 2
  misc_feature (1)..(879): Homolog of NCBI NO: 11358919 NR Description: villin 2 [imported] - Arabidopsis thaliana
  misc_feature (1)..(879): Homolog of NCBI NO: 11358975 NR Description: actin bundling protein ABP135 [imported] - lily >gi|5880464|gb|AAD54660.1|AF088901_1 actin bundling protein
  misc_feature (1)..(443): Homolog of NCBI NO: 4938492 NR Description: putative villin, fragment [Arabidopsis thaliana]
  misc_feature (1)..(826): Homolog of NCBI NO: 25091518 NR Description: Villin 1 >gi|11358918|pir||T50671 villin 1 - Arabidopsis thaliana >gi|3415113|gb|AAC31605.1| villin 1
  misc_feature (789)..(879): Homolog of NCBI NO: 25091518 NR Description: Villin 1 >gi|11358918|pir||T50671 villin 1 - Arabidopsis thaliana >gi|3415113|gb|AAC31605.1| villin 1
  misc_feature (1)..(826): Homolog of NCBI NO: 18402176 NR Description: putative villin; protein id: At2g29890.1, by cDNA: gi_3415112 [Arabidopsis thaliana]

SEQ ID NO: 90342 - DNA, 3177 bp, Arabidopsis thaliana
  misc_feature (1)..(3177): Ceres Seq. ID no. 12723584
  misc_feature: MA Experiment ID: 20000180 Result: Up-regulated in Transcription
  misc_feature: MA Experiment 20000180 PARAMETER Experiment Name: At_Germinating_Seeds_P Parameter: Age (hr) Value: 24 vs. 0
  misc_feature: MA Experiment 20000180 PARAMETER Experiment Name: At_Germinating_Seeds_P Parameter: Tissue Value: Germinating Seeds
  misc_feature: MA Experiment ID: 20000227 Result: Down-regulated in Transcription
  misc_feature: MA Experiment 20000227 PARAMETER Experiment Name: At_Root-Tips-vs-Tops_P Parameter: Tissue Value: Root Tips vs. Root Tops
  misc_feature: MA Experiment ID: 20000436 Result: Up-regulated in Transcription
  misc_feature: MA Experiment 20000436 PARAMETER Experiment Name: At_Drought_P Parameter: Age (day) Value: 7
  misc_feature: MA Experiment 20000436 PARAMETER Experiment Name: At_Drought_P Parameter: Organism Value: A. thaliana
  misc_feature: MA Experiment 20000436 PARAMETER Experiment Name: At_Drought_P Parameter: Plant Line Value: WS
  misc_feature: MA Experiment 20000436 PARAMETER Experiment Name: At_Drought_P Parameter: Timepoint (hr) Value: 12
  misc_feature: MA Experiment 20000436 PARAMETER Experiment Name: At_Drought_P Parameter: Tissue Value: Whole Plant
  misc_feature: MA Experiment 20000436 PARAMETER Experiment Name: At_Drought_P Parameter: Treatment Value: Drought vs. No Drought
  misc_feature: MA Experiment ID: 20000437 Result: Up-regulated in Transcription
  misc_feature: MA Experiment 20000437 PARAMETER Experiment Name: At_Drought_P Parameter: Age (day) Value: 8
  misc_feature: MA Experiment 20000437 PARAMETER Experiment Name: At_Drought_P Parameter: Organism Value: A. thaliana
  misc_feature: MA Experiment 20000437 PARAMETER Experiment Name: At_Drought_P Parameter: Plant Line Value: WS
  misc_feature: MA Experiment 20000437 PARAMETER Experiment Name: At_Drought_P Parameter: Timepoint (hr) Value: 24
  misc_feature: MA Experiment 20000437 PARAMETER Experiment Name: At_Drought_P Parameter: Tissue Value: Whole Plant
  misc_feature: MA Experiment 20000437 PARAMETER Experiment Name: At_Drought_P Parameter: Treatment Value: Drought vs. No Drought
  misc_feature: MA Experiment ID: 20000495 Result: Up-regulated in Transcription
  misc_feature: MA Experiment 20000495 PARAMETER Experiment Name: At_Guard_Cells_P Parameter: Harvest Date Value: 8/2/2002
  misc_feature: MA Experiment 20000495 PARAMETER Experiment Name: At_Guard_Cells_P Parameter: Organism Value: A. thaliana
  misc_feature: MA Experiment 20000495 PARAMETER Experiment Name: At_Guard_Cells_P Parameter: Tissue Value: Guard Cells vs. Leaves
  misc_feature: MA Experiment ID: 20000496 Result: Up-regulated in Transcription
  misc_feature: MA Experiment 20000496 PARAMETER Experiment Name: At_Guard_Cells_P Parameter: Harvest Date Value: 7/19/2002
  misc_feature: MA Experiment 20000496 PARAMETER Experiment Name: At_Guard_Cells_P Parameter: Organism Value: Canola
  misc_feature: MA Experiment 20000496 PARAMETER Experiment Name: At_Guard_Cells_P Parameter: Tissue Value: Guard Cells vs. Leaves
  misc_feature: MA Experiment ID: 20000794 Result: Up-regulated in Transcription
  misc_feature: MA Experiment 20000794 PARAMETER Experiment Name: At_Petals_P Parameter: Age (day) Value: 23-25 days
  misc_feature: MA Experiment 20000794 PARAMETER Experiment Name: At_Petals_P Parameter: Plant Line Value: WS
  misc_feature: MA Experiment 20000794 PARAMETER Experiment Name: At_Petals_P Parameter: Tissue Value: Petals vs. Whole plant
  misc_feature: MA Experiment ID: 20001558 Result: Down-regulated in Transcription
  misc_feature: MA Experiment 20001558 PARAMETER Experiment Name: At_Drought_Soil_Dry_P Parameter: Age (day) Value: 27
  misc_feature: MA Experiment 20001558 PARAMETER Experiment Name: At_Drought_Soil_Dry_P Parameter: Organism Value: A. thaliana
  misc_feature: MA Experiment 20001558 PARAMETER Experiment Name: At_Drought_Soil_Dry_P Parameter: Plant Line Value: WS
  misc_feature: MA Experiment 20001558 PARAMETER Experiment Name: At_Drought_Soil_Dry_P Parameter: Post Timepoint (hr) Value: 6
  misc_feature: MA Experiment 20001558 PARAMETER Experiment Name: At_Drought_Soil_Dry_P Parameter: Post-Treatment Value: Re-Water vs. No Drought
  misc_feature: MA Experiment 20001558 PARAMETER Experiment Name: At_Drought_Soil_Dry_P Parameter: Timepoint (day) Value: 13
  misc_feature: MA Experiment 20001558 PARAMETER Experiment Name: At_Drought_Soil_Dry_P Parameter: Treatment Value: Drought vs. No Drought
  misc_feature: MA Experiment ID: 20001911 Result: Up-regulated in Transcription
  misc_feature: MA Experiment 20001911 PARAMETER Experiment Name: At_Drought_Reproduction_P Parameter: Age (day) Value: 40
  misc_feature: MA Experiment 20001911 PARAMETER Experiment Name: At_Drought_Reproduction_P Parameter: Organism Value: A. thaliana
  misc_feature: MA Experiment 20001911 PARAMETER Experiment Name: At_Drought_Reproduction_P Parameter: Plant Line Value: WS
  misc_feature: MA Experiment 20001911 PARAMETER Experiment Name: At_Drought_Reproduction_P Parameter: Timepoint (day) Value: 10
  misc_feature: MA Experiment 20001911 PARAMETER Experiment Name: At_Drought_Reproduction_P Parameter: Tissue Value: Flowers
  misc_feature: MA Experiment 20001911 PARAMETER Experiment Name: At_Drought_Reproduction_P Parameter: Treatment Value: Drought vs. No Drought
accttcacttgctctcttttttccgaagaatctggcacagagagaagatggcgagtggcctcgaggatatcgtgaacgagaatgttgatttggagaaaatacctattgaggaagtgttccagcagttgaaatgcagcagagaaggtttatctggagcagaaggagaaaacagactccagatctttggccccaacaaactcgaggagaagaaggaaagcaagttactcaagttcttgggttttatgtggaaccctctctcttgggtcatggaagcagctgcaatcatggctattgccttggctaatggcggtggaaagccaccggattggcaagattttgtcggtatcgtttgtcttttggttatcaattcaactatcagttttgtcgaagaaaacaatgctggaaatgctgctgctgctcttatggctggtcttgctcccaaaactaaggttctaagagatggcaaatggtcagagcaagaagcttctattcttgttcctggagatattgtgagcatcaagcttggtgacatcattcctgctgatgcacgtcttcttgaaggtgatcctttaaaagtcgaccaatctgctttgaccggagaatctcttcccgcaacgaaaggtccaggggaagaagttttctccggttctacctgcaagcaaggtgagattgaagcggttgtgatagccactggagtccatactttcttcggtaaagcggctcatctagtcgacagcacaaaccaagttggacatttccagaaagttcttacggcgattggaaacttctgcatatgttccatagctgttggtattgcgattgagatcgttgtcatgtatccgatccagcgcagacactacagagacggaatcgacaatcttcttgttcttttgattggtggtatccccattgcaatgcctactgtcttgtctgtcacaatggctattggatctcacaagttgtctcaacaaggagctatcacaaaacgaatgaccgccattgaagaaatggctggtatggatgttctgtgcagcgataaaaccgggactctcacgctaaacaagcttagtgttgacaagaatcttattgaggtttattgtaaaggcgttgagaaagatgaagttttgctttttgctgctagagcttcaagagttgagaaccaagatgctattgatgctgctatggttggaatgctcgctgatccaaaagaggcaagagctggaatcagagagattcacttcctaccattcaatccagttgataagcgaaccgctttgacgtttatcgacagcaacggaaactggcaccgagtaagcaaaggagctcccgagcagattcttgatctctgtaacgcgagagctgatctgaggaagagagtccactctacaatcgataagtacgctgagcgtggacttaggtcattagctgtttcaagacagactgtaccagagaaaacaaaagaaagctctggtagtccatgggaatttgttggtgtgttgcctctgtttgatcctccaagacatgatagtgccgaaaccattagaagagctctagacctcggtgtcaatgtcaagatgattactggtgatcaacttgctattgcgaaagagacaggacgtagacttggaatgggatcaaacatgtacccatcctcttctttactcggtaaacacaaagacgaagccatggctcacattcctgttgaggatttgattgagaaagctgatggctttgctggagtcttcccagagcacaaatacgaaattgtgaagaagttgcaagaaaggaagcatatctgtggtatgactggagatggagtgaatgacgctccagcattgaagaaagcggatataggtatcgctgtggcggatgcaactgacgctgcacgaggtgcttctgatattgtcctcaccgagccaggtctcagtgtgatcatcagcgcggttctaaccagtagagccatcttccagagaatgaagaactacacaatatatgcagtctcaattaccattcgtatagtgtttgggtttatgctcattgctctaatatggaagttcgacttttcaccattcatggttttgatcattgctatattaaacgatggaaccatcatgactatctcaaaggacagagtcaagccttctccaacaccagatagctggaaactcaaagaaatcttcgcaaccggcgttgttcttggaggctacatggctataatgactgttgttttcttctgggccgcatacaaaaccgatttcttcccgagaacattccacgtgagagacttgagaggcagtgaacatgagatgatgtctgctttatacttacaagtcagtattgtgagccaagctcttatattcgtcactcgatctagaagctggtcttttacagaacgacctggatatttcttgctaattgctttctgggtagcacaattgattgcaacggctattgcggtttacggtaattgggaatttgcaagaatcaaaggaataggatggggatgggctggagtaatctggctttacagtattgtcttctactttccattagacataatgaaattcgcaatccgttacatactagccggaacagcctggaagaatatcattgacaacaggactgcgtttaccactaagcaaaactatggaatagaggagagggaagcacaatgggctcatgcacaaaggactttacacggtcttcagaacactgaaacagccaacgttgtcccggagagaggtggttacagagaactgtctgagattgcaaatcaagccaagagacgagctgagatcgcaaggcttagggaacttcatacgcttaaaggacatgtagagtcagtggtgaagctaaagggactagacattgagacagctggtcactacaccgtttaataaagatttaacaagaagatgattaaggaagaagaagatccttttgtttaagagatgataatgatgatgattttataacaagagaataaggttttttttctgtgtatgttaagttcctctaaactcctggggtttttcttccttccttattcatggttttagactttaattataaccatgtgtttttgtttcccctctcttgaataaaaaagagaagatactaatatcataggtttaatacgtttatgttttataaaagttcaatagatattgtttttgg

SEQ ID NO: 90343 - protein, 964 aa, Arabidopsis thaliana
  peptide (1)..(964): Ceres Seq. ID no. 12723585
  misc_feature (339)..(625): Pfam Name: haloacid dehalogenase-like hydrolase Pfam Description: haloacid dehalogenase-like hydrolase
  misc_feature (17)..(858): Homolog of NCBI NO: 6691153 NR Description: plasma membrane H(+)-ATPase [Filobasidiella
  misc_feature (17)..(858): Homolog of NCBI NO: 3348073 NR Description: plasma membrane H(+)-ATPase 1 [Filobasidiella
  misc_feature (21)..(861): Homolog of NCBI NO: 2652922 NR Description: plasma membrane (H+) ATPase [Uromyces fabae]
  misc_feature (34)..(863): Homolog of NCBI NO: 1709664 NR Description: Probable plasma membrane ATPase (Proton pump)
  misc_feature (13)..(753): Homolog of NCBI NO: 1709666 NR Description: Plasma membrane ATPase (Proton pump)
  misc_feature (760)..(821): Homolog of NCBI NO: 1709666 NR Description: Plasma membrane ATPase (Proton pump)
  misc_feature (14)..(755): Homolog of NCBI NO: 1709665 NR Description: Plasma membrane ATPase (Proton pump)
  misc_feature (773)..(821): Homolog of NCBI NO: 1709665 NR Description: Plasma membrane ATPase (Proton pump)
  misc_feature (26)..(762): Homolog of NCBI NO: 16751320 NR Description: putative plasma membrane-type proton ATPase
  misc_feature (760)..(821): Homolog of NCBI NO: 16751320 NR Description: putative plasma membrane-type proton ATPase
LHLLSFFRRIWHREKMASGLEDIVNENVDLEKIPIEEVFQQLKCSREGLSGAEGENRLQIFGPNKLEEKKESKLLKFLGFMWNPLSWVMEAAAIMAIALANGGGKPPDWQDFVGIVCLLVINSTISFVEENNAGNAAAALMAGLAPKTKVLRDGKWSEQEASILVPGDIVSIKLGDIIPADARLLEGDPLKVDQSALTGESLPATKGPGEEVFSGSTCKQGEIEAVVIATGVHTFFGKAAHLVDSTNQVGHFQKVLTAIGNFCICSIAVGIAIEIVVMYPIQRRHYRDGIDNLLVLLIGGIPIAMPTVLSVTMAIGSHKLSQQGAITKRMTAIEEMAGMDVLCSDKTGTLTLNKLSVDKNLIEVYCKGVEKDEVLLFAARASRVENQDAIDAAMVGMLADPKEARAGIREIHFLPFNPVDKRTALTFIDSNGNWHRVSKGAPEQILDLCNARADLRKRVHSTIDKYAERGLRSLAVSRQTVPEKTKESSGSPWEFVGVLPLFDPPRHDSAETIRRALDLGVNVKMITGDQLAIAKETGRRLGMGSNMYPSSSLLGKHKDEAMAHIPVEDLIEKADGFAGVFPEHKYEIVKKLQERKHICGMTGDGVNDAPALKKADIGIAVADATDAARGASDIVLTEPGLSVIISAVLTSRAIFQRMKNYTIYAVSITIRIVFGFMLIALIWKFDFSPFMVLIIAILNDGTIMTISKDRVKPSPTPDSWKLKEIFATGVVLGGYMAIMTVVFFWAAYKTDFFPRTFHVRDLRGSEHEMMSALYLQVSIVSQALIFVTRSRSWSFTERPGYFLLIAFWVAQLIATAIAVYGNWEFARIKGIGWGWAGVIWLYSIVFYFPLDIMKFAIRYILAGTAWKNIIDNRTAFTTKQNYGIEEREAQWAHAQRTLHGLQNTETANVVPERGGYRELSEIANQAKRRAEIARLRELHTLKGHVESVVKLKGLDIETAGHYTV

SEQ ID NO: 90344 - protein, 949 aa, Arabidopsis thaliana
  peptide (1)..(949): Ceres Seq. ID no. 12723586
  misc_feature (324)..(610): Pfam Name: haloacid dehalogenase-like hydrolase Pfam Description: haloacid dehalogenase-like hydrolase
  misc_feature (2)..(843): Homolog of NCBI NO: 6691153 NR Description: plasma membrane H(+)-ATPase [Filobasidiella
  misc_feature (2)..(843): Homolog of NCBI NO: 3348073 NR Description: plasma membrane H(+)-ATPase 1 [Filobasidiella
  misc_feature (6)..(846): Homolog of NCBI NO: 2652922 NR Description: plasma membrane (H+) ATPase [Uromyces fabae]
  misc_feature (19)..(848): Homolog of NCBI NO: 1709664 NR Description: Probable plasma membrane ATPase (Proton pump)
  misc_feature (1)..(738): Homolog of NCBI NO: 1709666 NR Description: Plasma membrane ATPase (Proton pump)
  misc_feature (745)..(806): Homolog of NCBI NO: 1709666 NR Description: Plasma membrane ATPase (Proton pump)
  misc_feature (1)..(740): Homolog of NCBI NO: 1709665 NR Description: Plasma membrane ATPase (Proton pump)
  misc_feature (758)..(806): Homolog of NCBI NO: 1709665 NR Description: Plasma membrane ATPase (Proton pump)
  misc_feature (11)..(747): Homolog of NCBI NO: 16751320 NR Description: putative plasma membrane-type proton ATPase
  misc_feature (745)..(806): Homolog of NCBI NO: 16751320 NR Description: putative plasma membrane-type proton ATPase
MASGLEDIVNENVDLEKIPIEEVFQQLKCSREGLSGAEGENRLQIFGPNKLEEKKESKLLKFLGFMWNPLSWVMEAAAIMAIALANGGGKPPDWQDFVGIVCLLVINSTISFVEENNAGNAAAALMAGLAPKTKVLRDGKWSEQEASILVPGDIVSIKLGDIIPADARLLEGDPLKVDQSALTGESLPATKGPGEEVFSGSTCKQGEIEAVVIATGVHTFFGKAAHLVDSTNQVGHFQKVLTAIGNFCICSIAVGIAIEIVVMYPIQRRHYRDGIDNLLVLLIGGIPIAMPTVLSVTMAIGSHKLSQQGAITKRMTAIEEMAGMDVLCSDKTGTLTLNKLSVDKNLIEVYCKGVEKDEVLLFAARASRVENQDAIDAAMVGMLADPKEARAGIREIHFLPFNPVDKRTALTFIDSNGNWHRVSKGAPEQILDLCNARADLRKRVHSTIDKYAERGLRSLAVSRQTVPEKTKESSGSPWEFVGVLPLFDPPRHDSAETIRRALDLGVNVKMITGDQLAIAKETGRRLGMGSNMYPSSSLLGKHKDEAMAHIPVEDLIEKADGFAGVFPEHKYEIVKKLQERKHICGMTGDGVNDAPALKKADIGIAVADATDAARGASDIVLTEPGLSVIISAVLTSRAIFQRMKNYTIYAVSITIRIVFGFMLIALIWKFDFSPFMVLIIAILNDGTIMTISKDRVKPSPTPDSWKLKEIFATGVVLGGYMAIMTVVFFWAAYKTDFFPRTFHVRDLRGSEHEMMSALYLQVSIVSQALIFVTRSRSWSFTERPGYFLLIAFWVAQLIATAIAVYGNWEFARIKGIGWGWAGVIWLYSIVFYFPLDIMKFAIRYILAGTAWKNIIDNRTAFTTKQNYGIEEREAQWAHAQRTLHGLQNTETANVVPERGGYRELSEIANQAKRRAEIARLRELHTLKGHVESVVKLKGLDIETAGHYTV

SEQ ID NO: 90345 - protein, 884 aa, Arabidopsis thaliana
  peptide (1)..(884): Ceres Seq. ID no. 12723587
  misc_feature (259)..(545): Pfam Name: haloacid dehalogenase-like hydrolase Pfam Description: haloacid dehalogenase-like hydrolase
  misc_feature (1)..(778): Homolog of NCBI NO: 6691153 NR Description: plasma membrane H(+)-ATPase [Filobasidiella
  misc_feature (1)..(778): Homolog of NCBI NO: 3348073 NR Description: plasma membrane H(+)-ATPase 1 [Filobasidiella
  misc_feature (1)..(781): Homolog of NCBI NO: 2652922 NR Description: plasma membrane (H+) ATPase [Uromyces fabae]
  misc_feature (1)..(783): Homolog of NCBI NO: 1709664 NR Description: Probable plasma membrane ATPase (Proton pump)
  misc_feature (1)..(673): Homolog of NCBI NO: 1709666 NR Description: Plasma membrane ATPase (Proton pump)
  misc_feature (680)..(741): Homolog of NCBI NO: 1709666 NR Description: Plasma membrane ATPase (Proton pump)
  misc_feature (1)..(675): Homolog of NCBI NO: 1709665 NR Description: Plasma membrane ATPase (Proton pump)
  misc_feature (693)..(741): Homolog of NCBI NO: 1709665 NR Description: Plasma membrane ATPase (Proton pump)
  misc_feature (1)..(682): Homolog of NCBI NO: 16751320 NR Description: putative plasma membrane-type proton ATPase
  misc_feature (680)..(741): Homolog of NCBI NO: 16751320 NR Description: putative plasma membrane-type proton ATPase
MWNPLSWVMEAAAIMAIALANGGGKPPDWQDFVGIVCLLVINSTISFVEENNAGNAAAALMAGLAPKTKVLRDGKWSEQEASILVPGDIVSIKLGDIIPADARLLEGDPLKVDQSALTGESLPATKGPGEEVFSGSTCKQGEIEAVVIATGVHTFFGKAAHLVDSTNQVGHFQKVLTAIGNFCICSIAVGIAIEIVVMYPIQRRHYRDGIDNLLVLLIGGIPIAMPTVLSVTMAIGSHKLSQQGAITKRMTAIEEMAGMDVLCSDKTGTLTLNKLSVDKNLIEVYCKGVEKDEVLLFAARASRVENQDAIDAAMVGMLADPKEARAGIREIHFLPFNPVDKRTALTFIDSNGNWHRVSKGAPEQILDLCNARADLRKRVHSTIDKYAERGLRSLAVSRQTVPEKTKESSGSPWEFVGVLPLFDPPRHDSAETIRRALDLGVNVKMITGDQLAIAKETGRRLGMGSNMYPSSSLLGKHKDEAMAHIPVEDLIEKADGFAGVFPEHKYEIVKKLQERKHICGMTGDGVNDAPALKKADIGIAVADATDAARGASDIVLTEPGLSVIISAVLTSRAIFQRMKNYTIYAVSITIRIVFGFMLIALIWKFDFSPFMVLIIAILNDGTIMTISKDRVKPSPTPDSWKLKEIFATGVVLGGYMAIMTVVFFWAAYKTDFFPRTFHVRDLRGSEHEMMSALYLQVSIVSQALIFVTRSRSWSFTERPGYFLLIAFWVAQLIATAIAVYGNWEFARIKGIGWGWAGVIWLYSIVFYFPLDIMKFAIRYILAGTAWKNIIDNRTAFTTKQNYGIEEREAQWAHAQRTLHGLQNTETANVVPERGGYRELSEIANQAKRRAEIARLRELHTLKGHVESVVKLKGLDIETAGHYTV

SEQ ID NO: 90346 - DNA, 1803 bp, Arabidopsis thaliana
  misc_feature (1)..(1803): Ceres Seq. ID no. 12723588
  misc_feature: MA Experiment ID: 20000179 Result: Down-regulated in Transcription
  misc_feature: MA Experiment 20000179 PARAMETER Experiment Name: At_Germinating_Seeds_P Parameter: Age (hr) Value: 6 vs. 0
  misc_feature: MA Experiment 20000179 PARAMETER Experiment Name: At_Germinating_Seeds_P Parameter: Tissue Value: Germinating Seeds
  misc_feature: MA Experiment ID: 20000180 Result: Down-regulated in Transcription
  misc_feature: MA Experiment 20000180 PARAMETER Experiment Name: At_Germinating_Seeds_P Parameter: Age (hr) Value: 24 vs. 0
  misc_feature: MA Experiment 20000180 PARAMETER Experiment Name: At_Germinating_Seeds_P Parameter: Tissue Value: Germinating Seeds
  misc_feature: MA Experiment ID: 20000264 Result: Up-regulated in Transcription
  misc_feature: MA Experiment 20000264 PARAMETER Experiment Name: At_Open_Flower_P Parameter: Age (day) Value: 21
  misc_feature: MA Experiment 20000264 PARAMETER Experiment Name: At_Open_Flower_P Parameter: Plant Line Value: WS
  misc_feature: MA Experiment 20000264 PARAMETER Experiment Name: At_Open_Flower_P Parameter: Tissue Value: Open Flower vs. Whole Plant
  misc_feature: MA Experiment ID: 20000265 Result: Up-regulated in Transcription
  misc_feature: MA Experiment 20000265 PARAMETER Experiment Name: At_Open_Flower_P Parameter: Age (day) Value: 21
  misc_feature: MA Experiment 20000265 PARAMETER Experiment Name: At_Open_Flower_P Parameter: Plant Line Value: WS
  misc_feature: MA Experiment 20000265 PARAMETER Experiment Name: At_Open_Flower_P Parameter: Tissue Value: Closed Flower vs. Whole Plant
  misc_feature: MA Experiment ID: 20000286 Result: Up-regulated in Transcription
  misc_feature: MA Experiment 20000286 PARAMETER Experiment Name: At_Open_Flower_P Parameter: Age (day) Value: 21
  misc_feature: MA Experiment 20000286 PARAMETER Experiment Name: At_Open_Flower_P Parameter: Plant Line Value: WS
  misc_feature: MA Experiment 20000286 PARAMETER Experiment Name: At_Open_Flower_P Parameter: Tissue Value: Half Open vs. Whole Plant
  misc_feature: MA Experiment ID: 20000496 Result: Down-regulated in Transcription
  misc_feature: MA Experiment 20000496 PARAMETER Experiment Name: At_Guard_Cells_P Parameter: Harvest Date Value: 7/19/2002
  misc_feature: MA Experiment 20000496 PARAMETER Experiment Name: At_Guard_Cells_P Parameter: Organism Value: Canola
  misc_feature: MA Experiment 20000496 PARAMETER Experiment Name: At_Guard_Cells_P Parameter: Tissue Value: Guard Cells vs. Leaves
  misc_feature: MA Experiment ID: 20000794 Result: Up-regulated in Transcription
  misc_feature: MA Experiment 20000794 PARAMETER Experiment Name: At_Petals_P Parameter: Age (day) Value: 23-25 days
  misc_feature: MA Experiment 20000794 PARAMETER Experiment Name: At_Petals_P Parameter: Plant Line Value: WS
  misc_feature: MA Experiment 20000794 PARAMETER Experiment Name: At_Petals_P Parameter: Tissue Value: Petals vs. Whole plant
atggattcttcttcgtttgaagataatgaatgcattgagacttgtaaaccaaacgttttgaatgtaagtgaaaggagagaattgatccacgcattgtctaaccagcctgaagaagcttcggagcttttgaattcatggagcagaaatgagatcatgaagatcatatgtgctgagatgggtaaagaaaggaagtacactggtcttaacaaaccaaagctcatagagaatcttctgaatcttgtgtctcgtcctcttggagagacctcttgttctgaccgtagaaactcgaggaagaaggagaagaagatgatcggttacatcatttgctgtgagaatttagcttgtagagctgcgcttggatgcgatgatacgttttgcagaaggtgttcttgctgcatctgtcaaaagtttgatgataataaggatcctagtttatggcttacttgtgatgcttgtggatcgtcttgtcatttggaatgtggtttgaagcaagataggtatgggattgggagtgatgatcttgatggtaggttttattgcgcgtattgcggtaaagataatgacttgctcggatgctggagaaaacaagtgaaggtggcgaaagagacgcggcgtgtggatgtactttgttatcgtctttctttaggacagaagctgttgagaggtaccacgaagtatcggaatctgttggaacttatggatgaggcggtgaagaagctcgaaggtgatgtgggtccgttgtcgggttgggccatgaagatggctcgaggcatcgtcaatagactttcttcgggtgtgcatgtccagaagctgtgttctcaggcaatggaagctctggacaaagtggtctcaccatcagaatctgtttcaggacaaggtgacaagatgaccgtgagagtagaagagattcaagcaagatcagtcactgtgagagtagactccgaggagccgtcttcttctacacaaaacaagatcacaggtttcaggttgttttgtcgaaagtcgaaggacgaagaatgctcgtctcaggggaattgtgttgtttatctacctgagacgacgtctgccatccaaggacttgaacccgacaccgagttctgtctcagagtggtttcctttaacgaggaaggtgacttagatgagtctgagcttcggttcacaacgttgaaggatgatggagatgaagctggggaccagcaaagccctttgacaaactcaagcagtggtctttgtagtaatccatctttaccagaagatgaatctaataatgtcaataaaagctgcagcaaaggaaatggtgacaaggacaacactgaacactgtagtgcaggagaagtagaatctgagcttgaagaagagaggcttgtaaagaggaaagcaaacaagatagatggaagagacttgcttgtaacaccctgcaagagagatatttataaaggaaagcaaggagggaataaaagattcaaatcaagaacagtatccttgaacgagaaacctgagatcaataatgccgcaaatggagtaggagataaagacttgggtcatattgttaagacgattagatgtttagaggaagaaggacatatagacaagagttttagggaaaggttcttgacatggtatagcttaagagctactcaccgagaagtaagagttgtgaagatctttgttgagacgtttatggaggatctgtcttctttgggacaacagcttgtggatacattctcagaaagtatactgagtaagagatcatcgacaaatggtgtagtacctgctgggatctgcctcaagctttggcattaa

SEQ ID NO: 90347 - protein, 600 aa, Arabidopsis thaliana
  peptide (1)..(600): Ceres Seq. ID no. 12723589
  misc_feature (293)..(382): Pfam Name: Fibronectin type III domain Pfam Description: Fibronectin type III domain
  misc_feature (354)..(600): Homolog of NCBI NO: 15234667 NR Description: putative protein; protein id: At4g30200.1, by cDNA: gi_11177136 [Arabidopsis thaliana]
  misc_feature (61)..(290): Homolog of NCBI NO: 15234667 NR Description: putative protein; protein id: At4g30200.1, by cDNA: gi_11177136 [Arabidopsis thaliana]
  misc_feature (89)..(600): Homolog of NCBI NO: 38637254 NR Description: putative coiled-coil protein [Oryza sativa
  misc_feature (16)..(96): Homolog of NCBI NO: 38637254 NR Description: putative coiled-coil protein [Oryza sativa
  misc_feature (4)..(455): Homolog of NCBI NO: 30350861 NR Description: hypothetical protein At2g18880 [Arabidopsis
  misc_feature (517)..(598): Homolog of NCBI NO: 30350861 NR Description: hypothetical protein At2g18880 [Arabidopsis
  misc_feature (268)..(437): Homolog of NCBI NO: 15234667 NR Description: putative protein; protein id: At4g30200.1, by cDNA: gi_11177136 [Arabidopsis thaliana]
  misc_feature (61)..(423): Homolog of NCBI NO: 30688585 NR Description: coiled-coil protein [Arabidopsis thaliana] putative protein [Arabidopsis thaliana]
  misc_feature (110)..(387): Homolog of NCBI NO: 15230113 NR Description: hypothetical protein; protein id: At3g24440.1 thaliana] >gi|9294095|dbj|BAB01947.1|
  misc_feature (489)..(590): Homolog of NCBI NO: 15230113 NR Description: hypothetical protein; protein id: At3g24440.1 thaliana] >gi|9294095|dbj|BAB01947.1|
MDSSSFEDNECIETCKPNVLNVSERRELIHALSNQPEEASELLNSWSRNEIMKIICAEMGKERKYTGLNKPKLIENLLNLVSRPLGETSCSDRRNSRKKEKKMIGYIICCENLACRAALGCDDTFCRRCSCCICQKFDDNKDPSLWLTCDACGSSCHLECGLKQDRYGIGSDDLDGRFYCAYCGKDNDLLGCWRKQVKVAKETRRVDVLCYRLSLGQKLLRGTTKYRNLLELMDEAVKKLEGDVGPLSGWAMKMARGIVNRLSSGVHVQKLCSQAMEALDKVVSPSESVSGQGDKMTVRVEEIQARSVTVRVDSEEPSSSTQNKITGFRLFCRKSKDEECSSQGNCVVYLPETTSAIQGLEPDTEFCLRVVSFNEEGDLDESELRFTTLKDDGDEAGDQQSPLTNSSSGLCSNPSLPEDESNNVNKSCSKGNGDKDNTEHCSAGEVESELEEERLVKRKANKIDGRDLLVTPCKRDIYKGKQGGNKRFKSRTVSLNEKPEINNAANGVGDKDLGHIVKTIRCLEEEGHIDKSFRERFLTWYSLRATHREVRVVKIFVETFMEDLSSLGQQLVDTFSESILSKRSSTNGVVPAGICLKLWH

SEQ ID NO: 90348 - protein, 549 aa, Arabidopsis thaliana
  peptide (1)..(549): Ceres Seq. ID no. 12723590
  misc_feature (242)..(331): Pfam Name: Fibronectin type III domain Pfam Description: Fibronectin type III domain
  misc_feature (303)..(549): Homolog of NCBI NO: 15234667 NR Description: putative protein; protein id: At4g30200.1, by cDNA: gi_11177136 [Arabidopsis thaliana]
  misc_feature (10)..(239): Homolog of NCBI NO: 15234667 NR Description: putative protein; protein id: At4g30200.1, by cDNA: gi_11177136 [Arabidopsis thaliana]
  misc_feature (38)..(549): Homolog of NCBI NO: 38637254 NR Description: putative coiled-coil protein [Oryza sativa
  misc_feature (1)..(45): Homolog of NCBI NO: 38637254 NR Description: putative coiled-coil protein [Oryza sativa
  misc_feature (1)..(404): Homolog of NCBI NO: 30350861 NR Description: hypothetical protein At2g18880 [Arabidopsis
  misc_feature (466)..(547): Homolog of NCBI NO: 30350861 NR Description: hypothetical protein At2g18880 [Arabidopsis
  misc_feature (217)..(386): Homolog of NCBI NO: 15234667 NR Description: putative protein; protein id: At4g30200.1, by cDNA: gi_11177136 [Arabidopsis thaliana]
  misc_feature (10)..(372): Homolog of NCBI NO: 30688585 NR Description: coiled-coil protein [Arabidopsis thaliana] putative protein [Arabidopsis thaliana]
  misc_feature (59)..(336): Homolog of NCBI NO: 15230113 NR Description: hypothetical protein; protein id: At3g24440.1 thaliana] >gi|9294095|dbj|BAB01947.1|
  misc_feature (438)..(539): Homolog of NCBI NO: 15230113 NR Description: hypothetical protein; protein id: At3g24440.1 thaliana] >gi|9294095|dbj|BAB01947.1|
MKIICAEMGKERKYTGLNKPKLIENLLNLVSRPLGETSCSDRRNSRKKEKKMIGYIICCENLACRAALGCDDTFCRRCSCCICQKFDDNKDPSLWLTCDACGSSCHLECGLKQDRYGIGSDDLDGRFYCAYCGKDNDLLGCWRKQVKVAKETRRVDVLCYRLSLGQKLLRGTTKYRNLLELMDEAVKKLEGDVGPLSGWAMKMARGIVNRLSSGVHVQKLCSQAMEALDKVVSPSESVSGQGDKMTVRVEEIQARSVTVRVDSEEPSSSTQNKITGFRLFCRKSKDEECSSQGNCVVYLPETTSAIQGLEPDTEFCLRVVSFNEEGDLDESELRFTTLKDDGDEAGDQQSPLTNSSSGLCSNPSLPEDESNNVNKSCSKGNGDKDNTEHCSAGEVESELEEERLVKRKANKIDGRDLLVTPCKRDIYKGKQGGNKRFKSRTVSLNEKPEINNAANGVGDKDLGHIVKTIRCLEEEGHIDKSFRERFLTWYSLRATHREVRVVKIFVETFMEDLSSLGQQLVDTFSESILSKRSSTNGVVPAGICLKLWH

SEQ ID NO: 90349 - protein, 542 aa, Arabidopsis thaliana
  peptide (1)..(542): Ceres Seq. ID no. 12723591
  misc_feature (235)..(324): Pfam Name: Fibronectin type III domain Pfam Description: Fibronectin type III domain
  misc_feature (296)..(542): Homolog of NCBI NO: 15234667 NR Description: putative protein; protein id: At4g30200.1, by cDNA: gi_11177136 [Arabidopsis thaliana]
  misc_feature (3)..(232): Homolog of NCBI NO: 15234667 NR Description: putative protein; protein id: At4g30200.1, by cDNA: gi_11177136 [Arabidopsis thaliana]
  misc_feature (31)..(542): Homolog of NCBI NO: 38637254 NR Description: putative coiled-coil protein [Oryza sativa
  misc_feature (1)..(38): Homolog of NCBI NO: 38637254 NR Description: putative coiled-coil protein [Oryza sativa
  misc_feature (1)..(397): Homolog of NCBI NO: 30350861 NR Description: hypothetical protein At2g18880 [Arabidopsis
  misc_feature (459)..(540): Homolog of NCBI NO: 30350861 NR Description: hypothetical protein At2g18880 [Arabidopsis
  misc_feature (210)..(379): Homolog of NCBI NO: 15234667 NR Description: putative protein; protein id: At4g30200.1, by cDNA: gi_11177136 [Arabidopsis thaliana]
  misc_feature (3)..(365): Homolog of NCBI NO: 30688585 NR Description: coiled-coil protein [Arabidopsis thaliana] putative protein [Arabidopsis thaliana]
  misc_feature (52)..(329): Homolog of NCBI NO: 15230113 NR Description: hypothetical protein; protein id: At3g24440.1 thaliana] >gi|9294095|dbj|BAB01947.1|
  misc_feature (431)..(532): Homolog of NCBI NO: 15230113 NR Description: hypothetical protein; protein id: At3g24440.1 thaliana] >gi|9294095|dbj|BAB01947.1|
MGKERKYTGLNKPKLIENLLNLVSRPLGETSCSDRRNSRKKEKKMIGYIICCENLACRAALGCDDTFCRRCSCCICQKFDDNKDPSLWLTCDACGSSCHLECGLKQDRYGIGSDDLDGRFYCAYCGKDNDLLGCWRKQVKVAKETRRVDVLCYRLSLGQKLLRGTTKYRNLLELMDEAVKKLEGDVGPLSGWAMKMARGIVNRLSSGVHVQKLCSQAMEALDKVVSPSESVSGQGDKMTVRVEEIQARSVTVRVDSEEPSSSTQNKITGFRLFCRKSKDEECSSQGNCVVYLPETTSAIQGLEPDTEFCLRVVSFNEEGDLDESELRFTTLKDDGDEAGDQQSPLTNSSSGLCSNPSLPEDESNNVNKSCSKGNGDKDNTEHCSAGEVESELEEERLVKRKANKIDGRDLLVTPCKRDIYKGKQGGNKRFKSRTVSLNEKPEINNAANGVGDKDLGHIVKTIRCLEEEGHIDKSFRERFLTWYSLRATHREVRVVKIFVETFMEDLSSLGQQLVDTFSESILSKRSSTNGVVPAGICLKLWH

SEQ ID NO: 90350 - DNA, 1563 bp, Arabidopsis thaliana
  misc_feature (1)..(1563): Ceres Seq. ID no. 12723601
  misc_feature: MA Experiment ID: 20000307 Result: Up-regulated in Transcription
  misc_feature: MA Experiment 20000307 PARAMETER Experiment Name: At_Germinating_Seeds_Sub_P Parameter: Age (hr) Value: 24 vs. 0
  misc_feature: MA Experiment 20000307 PARAMETER Experiment Name: At_Germinating_Seeds_Sub_P Parameter: Organism Value: A. thaliana
  misc_feature: MA Experiment 20000307 PARAMETER Experiment Name: At_Germinating_Seeds_Sub_P Parameter: Plant Line Value: WS
  misc_feature: MA Experiment 20000307 PARAMETER Experiment Name: At_Germinating_Seeds_Sub_P Parameter: Tissue Value: Germinating Seeds
  misc_feature: MA Experiment ID: 20000314 Result: Up-regulated in Transcription
  misc_feature: MA Experiment 20000314 PARAMETER Experiment Name: At_14day_Shoots-Roots_Sub_P Parameter: Age (day) Value: 14
  misc_feature: MA Experiment 20000314 PARAMETER Experiment Name: At_14day_Shoots-Roots_Sub_P Parameter: Organism Value: A. thaliana
  misc_feature: MA Experiment 20000314 PARAMETER Experiment Name: At_14day_Shoots-Roots_Sub_P Parameter: Plant Line Value: WS
  misc_feature: MA Experiment 20000314 PARAMETER Experiment Name: At_14day_Shoots-Roots_Sub_P Parameter: Tissue Value: Roots vs. Whole Plant
  misc_feature: MA Experiment ID: 20000315 Result: Down-regulated in Transcription
  misc_feature: MA Experiment 20000315 PARAMETER Experiment Name: At_14day_Shoots-Roots_Sub_P Parameter: Age (day) Value: 14
  misc_feature: MA Experiment 20000315 PARAMETER Experiment Name: At_14day_Shoots-Roots_Sub_P Parameter: Organism Value: A. thaliana
  misc_feature: MA Experiment 20000315 PARAMETER Experiment Name: At_14day_Shoots-Roots_Sub_P Parameter: Plant Line Value: WS
  misc_feature: MA Experiment 20000315 PARAMETER Experiment Name: At_14day_Shoots-Roots_Sub_P Parameter: Tissue Value: Shoots vs. Whole Plant
  misc_feature: MA Experiment ID: 20000328 Result: Down-regulated in Transcription
  misc_feature: MA Experiment 20000328 PARAMETER Experiment Name: At_42deg_Heat_Sub_P Parameter: Age (day) Value: 14
  misc_feature: MA Experiment 20000328 PARAMETER Experiment Name: At_42deg_Heat_Sub_P Parameter: Organism Value: A. thaliana
  misc_feature: MA Experiment 20000328 PARAMETER Experiment Name: At_42deg_Heat_Sub_P Parameter: Plant Line Value: WS
  misc_feature: MA Experiment 20000328 PARAMETER Experiment Name: At_42deg_Heat_Sub_P Parameter: Temperature (deg C) Value: 42 vs. 22
  misc_feature: MA Experiment 20000328 PARAMETER Experiment Name: At_42deg_Heat_Sub_P Parameter: Timepoint (hr) Value: 6
  misc_feature: MA Experiment 20000328 PARAMETER Experiment Name: At_42deg_Heat_Sub_P Parameter: Tissue Value: Aerial
  misc_feature: MA Experiment ID: 20000355 Result: Down-regulated in Transcription
  misc_feature: MA Experiment 20000355 PARAMETER Experiment Name: At_Siliques_Sub_P Parameter: Age (day) Value: 21
  misc_feature: MA Experiment 20000355 PARAMETER Experiment Name: At_Siliques_Sub_P Parameter: Organism Value: A. thaliana
  misc_feature: MA Experiment 20000355 PARAMETER Experiment Name: At_Siliques_Sub_P Parameter: Plant Line Value: WS
  misc_feature: MA Experiment 20000355 PARAMETER Experiment Name: At_Siliques_Sub_P Parameter: Tissue Value: Less Than 5mm Siliques vs. Whole Plant
  misc_feature: MA Experiment ID: 20000440 Result: Down-regulated in Transcription
  misc_feature: MA Experiment 20000440 PARAMETER Experiment Name: At_Closed-Flower__Sub_P Parameter: Tissue Value: Closed Flower vs. Whole Plant
atgaaagagtattggacatcattagcttcactactcggagttttagcattttgtcaaagcttaatgcaatcaatattcccaccggagctccgtttcgctttcctcaaattcttcaacagaatcttccacgtcttctcttcttactgctacttcgacataacagagatcgacggcgtcaacaccaacgaactctacaacgccgttcagctttacttaagctcctccgtctcaatagccggaaaccgtttaagtctaacccgcgccgttaactcttcctccatcactttcggtctctccaacaacgactcaatcgtcgacacctttaacggcgttacagttctatgggaacacgtcgttacacagcgtcaaactcagacttttgcttggagaccattacctgaagagaaacgtggattcactctacgaatcaagaaaaaggacaaaactttgatactcaattcttatcttgattacatcatggagagagctaatgagattcgtcggaaaaaccaagaccggttgctttatactaactcaagaggtgggtctcttgactcaagaggacatccttgggaatctgttccttttaagcatccgagtactttcgaaactttagctatggatccgagaaagaagcaacagatcatggatgatcttaaagattttgctgaaggtcaagtcttttatcagaagactggtagggcttggaagagaggttacttgttgtacgggccaccaggtactggtaagtcgagtatgatcgcagcgatggcgaattatctcggttacgatatttacgatcttgagctcactgaggttcatagtaactcggagttgaggaagttgttgatgaaaacgagttctaagtctattattgttatagaggatattgattgttcgattaatttgactaataggaagaagaatagtagtaatgtatcgtcgcaacggagttattatgatgcggagacaagaaacggttcgggttcaggttcgggtggttcgggagaggaaggtggtaatgggaatactataacgttgtcgggtttgttgaattttacagatgggctttggtcttgttgtggaagtgagaggatctttgtgtttacgaccaatcatatagagaagcttgatcctgcattgcttagaagtgggagaatggatatgcatatctacatgagtttttgtaacttcccatcgttgaagattttgttgaagaattatttggggtatggggtggaagatataaacggcgacgttttgaaggagatggagatggttgtggagaaggctgagatgactcctgctgatgtaagtgaggctttgattaagaataggagggataaagagaaggcgattagggagttgttggaggatttaaaaagtagaggggagagaaatgtgaaagatgggaaattgaggggtggaagtgggaatttgactgaattggaagttgttgaggaacaagagaagagggcaatagatagtcaaaatgaagatgaggatcatgatgaagaagagattgagcttgaggataacatttgtaagactagagaagattga

SEQ ID NO: 90351 - protein, 520 aa, Arabidopsis thaliana
  peptide (1)..(520): Ceres Seq. ID no. 12723602
  misc_feature (239)..(451): Pfam Name: ATPase family associated with various cellular Pfam Description: ATPase family associated with various cellular
  misc_feature (1)..(520): Homolog of NCBI NO: 15242143 NR Description: putative protein; protein id: At5g57480.1
  misc_feature (1)..(520): Homolog of NCBI NO: 18416629 NR Description: putative mitochondrial protein; protein id: supported by cDNA: gi_19715598 [Arabidopsis thaliana]
  misc_feature (17)..(520): Homolog of NCBI NO: 7485479 NR Description: hypothetical protein F14M19.110 - Arabidopsis >gi|4539301|emb|CAB39604.1| putative mitochondrial protein thaliana] >gi|7269434|emb|CAB79438.1| putative mitochondrial
  misc_feature (8)..(507): Homolog of NCBI NO: 15234674 NR Description: putative protein; protein id: At4g30250.1
  misc_feature (1)..(498): Homolog of NCBI NO: 15233037 NR Description: hypothetical protein; protein id: At3g28580.1, by cDNA: gi_18175626 [Arabidopsis thaliana]
  misc_feature (1)..(512): Homolog of NCBI NO: 15242536 NR Description: putative protein; protein id: At5g40010.1
  misc_feature (5)..(513): Homolog of NCBI NO: 15233010 NR Description: hypothetical protein; protein id: At3g28510.1, by cDNA: gi_20466451 [Arabidopsis thaliana]
  misc_feature (6)..(504): Homolog of NCBI NO: 15233016 NR Description: hypothetical protein; protein id: At3g28540.1
  misc_feature (1)..(331): Homolog of NCBI NO: 10176992 NR Description: contains similarity to AAA-type
  misc_feature (1)..(331): Homolog of NCBI NO: 15242534 NR Description: putative protein; protein id: At5g40000.1
MKEYWTSLASLLGVLAFCQSLMQSIFPPELRFAFLKFFNRIFHVFSSYCYFDITEIDGVNTNELYNAVQLYLSSSVSIAGNRLSLTRAVNSSSITFGLSNNDSIVDTFNGVTVLWEHVVTQRQTQTFAWRPLPEEKRGFTLRIKKKDKTLILNSYLDYIMERANEIRRKNQDRLLYTNSRGGSLDSRGHPWESVPFKHPSTFETLAMDPRKKQQIMDDLKDFAEGQVFYQKTGRAWKRGYLLYGPPGTGKSSMIAAMANYLGYDIYDLELTEVHSNSELRKLLMKTSSKSIIVIEDIDCSINLTNRKKNSSNVSSQRSYYDAETRNGSGSGSGGSGEEGGNGNTITLSGLLNFTDGLWSCCGSERIFVFTTNHIEKLDPALLRSGRMDMHIYMSFCNFPSLKILLKNYLGYGVEDINGDVLKEMEMVVEKAEMTPADVSEALIKNRRDKEKAIRELLEDLKSRGERNVKDGKLRGGSGNLTELEVVEEQEKRAIDSQNEDEDHDEEEIELEDNICKTRED

SEQ ID NO: 90352 - protein, 499 aa, Arabidopsis thaliana
  peptide (1)..(499): Ceres Seq. ID no. 12723603
  misc_feature (218)..(430): Pfam Name: ATPase family associated with various cellular Pfam Description: ATPase family associated with various cellular
  misc_feature (1)..(499): Homolog of NCBI NO: 15242143 NR Description: putative protein; protein id: At5g57480.1
  misc_feature (1)..(499): Homolog of NCBI NO: 18416629 NR Description: putative mitochondrial protein; protein id: supported by cDNA: gi_19715598 [Arabidopsis thaliana]
  misc_feature (1)..(499): Homolog of NCBI NO: 7485479 NR Description: hypothetical protein F14M19.110 - Arabidopsis >gi|4539301|emb|CAB39604.1| putative mitochondrial protein thaliana] >gi|7269434|emb|CAB79438.1| putative mitochondrial
  misc_feature (1)..(486): Homolog of NCBI NO: 15234674 NR Description: putative protein; protein id: At4g30250.1
  misc_feature (1)..(477): Homolog of NCBI NO: 15233037 NR Description: hypothetical protein; protein id: At3g28580.1, by cDNA: gi_18175626 [Arabidopsis thaliana]
  misc_feature (1)..(491): Homolog of NCBI NO: 15242536 NR Description: putative protein; protein id: At5g40010.1
  misc_feature (1)..(492): Homolog of NCBI NO: 15233010 NR Description: hypothetical protein; protein id: At3g28510.1, by cDNA: gi_20466451 [Arabidopsis thaliana]
  misc_feature (1)..(483): Homolog of NCBI NO: 15233016 NR Description: hypothetical protein; protein id: At3g28540.1
  misc_feature (1)..(310): Homolog of NCBI NO: 10176992 NR Description: contains similarity to AAA-type
  misc_feature (1)..(310): Homolog of NCBI NO: 15242534 NR Description: putative protein; protein id: At5g40000.1
MQSIFPPELRFAFLKFFNRIFHVFSSYCYFDITEIDGVNTNELYNAVQLYLSSSVSIAGNRLSLTRAVNSSSITFGLSNNDSIVDTFNGVTVLWEHVVTQRQTQTFAWRPLPEEKRGFTLRIKKKDKTLILNSYLDYIMERANEIRRKNQDRLLYTNSRGGSLDSRGHPWESVPFKHPSTFETLAMDPRKKQQIMDDLKDFAEGQVFYQKTGRAWKRGYLLYGPPGTGKSSMIAAMANYLGYDIYDLELTEVHSNSELRKLLMKTSSKSIIVIEDIDCSINLTNRKKNSSNVSSQRSYYDAETRNGSGSGSGGSGEEGGNGNTITLSGLLNFTDGLWSCCGSERIFVFTTNHIEKLDPALLRSGRMDMHIYMSFCNFPSLKILLKNYLGYGVEDINGDVLKEMEMVVEKAEMTPADVSEALIKNRRDKEKAIRELLEDLKSRGERNVKDGKLRGGSGNLTELEVVEEQEKRAIDSQNEDEDHDEEEIELEDNICKTRED

SEQ ID NO: 90353 - protein, 361 aa, Arabidopsis thaliana
  peptide (1)..(361): Ceres Seq. ID no. 12723604
  misc_feature (80)..(292): Pfam Name: ATPase family associated with various cellular Pfam Description: ATPase family associated with various cellular
  misc_feature (1)..(361): Homolog of NCBI NO: 15242143 NR Description: putative protein; protein id: At5g57480.1
  misc_feature (1)..(361): Homolog of NCBI NO: 18416629 NR Description: putative mitochondrial protein; protein id: supported by cDNA: gi_19715598 [Arabidopsis thaliana]
  misc_feature (1)..(361): Homolog of NCBI NO: 7485479 NR Description: hypothetical protein F14M19.110 - Arabidopsis >gi|4539301|emb|CAB39604.1| putative mitochondrial protein thaliana] >gi|7269434|emb|CAB79438.1| putative mitochondrial
  misc_feature (1)..(348): Homolog of NCBI NO: 15234674 NR Description: putative protein; protein id: At4g30250.1
  misc_feature (1)..(339): Homolog of NCBI NO: 15233037 NR Description: hypothetical protein; protein id: At3g28580.1, by cDNA: gi_18175626 [Arabidopsis thaliana]
  misc_feature (1)..(353): Homolog of NCBI NO: 15242536 NR Description: putative protein; protein id: At5g40010.1
  misc_feature (1)..(354): Homolog of NCBI NO: 15233010 NR Description: hypothetical protein; protein id: At3g28510.1, by cDNA: gi_20466451 [Arabidopsis thaliana]
  misc_feature (1)..(345): Homolog of NCBI NO: 15233016 NR Description: hypothetical protein; protein id: At3g28540.1
  misc_feature (1)..(172): Homolog of NCBI NO: 10176992 NR Description: contains similarity to AAA-type
  misc_feature (1)..(172): Homolog of NCBI NO: 15242534 NR Description: putative protein; protein id: At5g40000.1
MERANEIRRKNQDRLLYTNSRGGSLDSRGHPWESVPFKHPSTFETLAMDPRKKQQIMDDLKDFAEGQVFYQKTGRAWKRGYLLYGPPGTGKSSMIAAMANYLGYDIYDLELTEVHSNSELRKLLMKTSSKSIIVIEDIDCSINLTNRKKNSSNVSSQRSYYDAETRNGSGSGSGGSGEEGGNGNTITLSGLLNFTDGLWSCCGSERIFVFTTNHIEKLDPALLRSGRMDMHIYMSFCNFPSLKILLKNYLGYGVEDINGDVLKEMEMVVEKAEMTPADVSEALIKNRRDKEKAIRELLEDLKSRGERNVKDGKLRGGSGNLTELEVVEEQEKRAIDSQNEDEDHDEEEIELEDNICKTRED

SEQ ID NO: 90354 - DNA, 1062 bp, Arabidopsis thaliana
  misc_feature (1)..(1062): Ceres Seq. ID no. 12723611
  misc_feature: MA Experiment ID: 20000180 Result: Up-regulated in Transcription
  misc_feature: MA Experiment 20000180 PARAMETER Experiment Name: At_Germinating_Seeds_P Parameter: Age (hr) Value: 24 vs. 0
  misc_feature: MA Experiment 20000180 PARAMETER Experiment Name: At_Germinating_Seeds_P Parameter: Tissue Value: Germinating Seeds
  misc_feature: MA Experiment ID: 20000439 Result: Up-regulated in Transcription
  misc_feature: MA Experiment 20000439 PARAMETER Experiment Name: At_Roots__P Parameter: Age (day) Value: 14 vs. 21
  misc_feature: MA Experiment 20000439 PARAMETER Experiment Name: At_Roots__P Parameter: Organism Value: A. thaliana
  misc_feature: MA Experiment 20000439 PARAMETER Experiment Name: At_Roots__P Parameter: Tissue Value: Roots vs. Whole Plant
  misc_feature: MA Experiment ID: 20000460 Result: Down-regulated in Transcription
  misc_feature: MA Experiment 20000460 PARAMETER Experiment Name: At_10percent_PEG_P Parameter: Age (day) Value: 12
  misc_feature: MA Experiment 20000460 PARAMETER Experiment Name: At_10percent_PEG_P Parameter: Organism Value: A. thaliana
  misc_feature: MA Experiment 20000460 PARAMETER Experiment Name: At_10percent_PEG_P Parameter: Plant Line Value: WS
  misc_feature: MA Experiment 20000460 PARAMETER Experiment Name: At_10percent_PEG_P Parameter: Timepoint (day) Value: 12
  misc_feature: MA Experiment 20000460 PARAMETER Experiment Name: At_10percent_PEG_P Parameter: Tissue Value: Whole Plant
  misc_feature: MA Experiment 20000460 PARAMETER Experiment Name: At_10percent_PEG_P Parameter: Treatment Value: 10percent PEG vs. No Treatment
  misc_feature: MA Experiment ID: 20000527 Result: Down-regulated in Transcription
  misc_feature: MA Experiment 20000527 PARAMETER Experiment Name: At_10percent_PEG_P Parameter: Age (day) Value: 20
  misc_feature: MA Experiment 20000527 PARAMETER Experiment Name: At_10percent_PEG_P Parameter: Organism Value: A. thaliana
  misc_feature: MA Experiment 20000527 PARAMETER Experiment Name: At_10percent_PEG_P Parameter: Plant Line Value: WS
  misc_feature: MA Experiment 20000527 PARAMETER Experiment Name: At_10percent_PEG_P Parameter: Timepoint (day) Value: 20
  misc_feature: MA Experiment 20000527 PARAMETER Experiment Name: At_10percent_PEG_P Parameter: Tissue Value: Whole Plant
  misc_feature: MA Experiment 20000527 PARAMETER Experiment Name: At_10percent_PEG_P Parameter: Treatment Value: 10percent PEG vs. No Treatment
  misc_feature: MA Experiment ID: 20001450 Result: Down-regulated in Transcription
  misc_feature: MA Experiment 20001450 PARAMETER Experiment Name: At_Far-red-induction_P Parameter: Age (day) Value: 7
  misc_feature: MA Experiment 20001450 PARAMETER Experiment Name: At_Far-red-induction_P Parameter: Light Value: Far-red vs. White
  misc_feature: MA Experiment 20001450 PARAMETER Experiment Name: At_Far-red-induction_P Parameter: Organism Value: A. thaliana
  misc_feature: MA Experiment 20001450 PARAMETER Experiment Name: At_Far-red-induction_P Parameter: Plant Line Value: Columbia
  misc_feature: MA Experiment 20001450 PARAMETER Experiment Name: At_Far-red-induction_P Parameter: Timepoint (hr) Value: 8
  misc_feature: MA Experiment 20001450 PARAMETER Experiment Name: At_Far-red-induction_P Parameter: Tissue Value: Whole Plant
atcagaaaacaattagacaacaacaacaacaacgacaacagcaacaacagcaaaaaatggcggcttttgcgaccaaacagtctcccttgttgttggcgtctcttctgatcttgatcggcgtagccaccggaagtttctacgacagcttcgatatcacttggggagctggtcgtgctaatatatttgagagtggacaactcttgacttgcactctcgacaagacatccggttcaggttttcaatccaagaaagagtatttgttcggaaagatcgatatgaagataaaacttgttcccggaaattctgccggaaccgtcacagcttactacctttcttcaaaaggtgagacatgggatgagattgatttcgagttcttgggtaacgttactggacagccttatgttatccatacaaatgtctttaccggaggtaaaggtaaccgcgaaatgcagttctatctctggtttgatcccactgctgatttccacacttacaccgtgctttggaaccctctcaacatcatctttctggttgatggtatcccaatccgggtgttcaagaacaatgaggctaacggcgtggcttacccgaaaagccaaccaatgaagatctactcaagtctatgggaagctgatgattgggccacacaaggcgggaaagtcaagaccgattggaccaacgctccattcagcgcttcctacagaagctttaacgatgtggattgctgcagccggacctcgatatggaactgggttacgtgtaatgcgaatagcaactcgtggatgtggactacacttaattcaaatcagcttggacagctgaagtgggtgcaaaaagattatatgatctataactattgtacggatttcaagaggttccctcaaggtttacccactgaatgcaacctcaactgatcgtattacagagaaaattcaagcacgttgatatggtttctttccttctttcatttttttgtctcatatttgttgatttcatcattttgttatttttgagtttcaaagatttatttcccattttgggtaattgattatttgttttgcc

SEQ ID NO: 90355 - protein, 303 aa, Arabidopsis thaliana
  peptide (1)..(303): Ceres Seq. ID no. 12723612
  misc_feature (45)..(226): Pfam Name: Glycosyl hydrolases family 16 Pfam Description: Glycosyl hydrolases family 16
  misc_feature (19)..(303): Homolog of NCBI NO: 15242778 NR Description: xyloglucan endotransglycosylase, putative; id: At5g57530.1, supported by cDNA: gi_16323042 [Arabidopsis >gi|9758314|dbj|BAB08788.1| xyloglucan endotransglycosylase
  misc_feature (19)..(303): Homolog of NCBI NO: 15242779 NR Description: xyloglucan endotransglycosylase, putative; id: At5g57540.1 [Arabidopsis thaliana]
  misc_feature (19)..(302): Homolog of NCBI NO: 15235998 NR Description: xyloglucan endotransglycosylase XTR9; protein id: supported by cDNA: gi_20260567, supported by cDNA: gi_4218962 thaliana] >gi|7447404|pir||T04236 xyloglucan [Arabidopsis
QKTIRQQQQQRQQQQQQKMAAFATKQSPLLLASLLILIGVATGSFYDSFDITWGAGRANIFESGQLLTCTLDKTSGSGFQSKKEYLFGKIDMKIKLVPGNSAGTVTAYYLSSKGETWDEIDFEFLGNVTGQPYVIHTNVFTGGKGNREMQFYLWFDPTADFHTYTVLWNPLNIIFLVDGIPIRVFKNNEANGVAYPKSQPMKIYSSLWEADDWATQGGKVKTDWTNAPFSASYRSFNDVDCCSRTSIWNWVTCNANSNSWMWTTLNSNQLGQLKWVQKDYMIYNYCTDFKRFPQGLPTECNLN

SEQ ID NO: 90356 - protein, 285 aa, Arabidopsis thaliana
  peptide (1)..(285): Ceres Seq. ID no. 12723613
  misc_feature (27)..(208): Pfam Name: Glycosyl hydrolases family 16 Pfam Description: Glycosyl hydrolases family 16
  misc_feature (1)..(285): Homolog of NCBI NO: 15242778 NR Description: xyloglucan endotransglycosylase, putative; id: At5g57530.1, supported by cDNA: gi_16323042 [Arabidopsis >gi|9758314|dbj|BAB08788.1| xyloglucan endotransglycosylase
  misc_feature (1)..(285): Homolog of NCBI NO: 15242779 NR Description: xyloglucan endotransglycosylase, putative; id: At5g57540.1 [Arabidopsis thaliana]
  misc_feature (1)..(284): Homolog of NCBI NO: 15235998 NR Description: xyloglucan endotransglycosylase XTR9; protein id: supported by cDNA: gi_20260567, supported by cDNA: gi_4218962 thaliana] >gi|7447404|pir||T04236 xyloglucan [Arabidopsis
MAAFATKQSPLLLASLLILIGVATGSFYDSFDITWGAGRANIFESGQLLTCTLDKTSGSGFQSKKEYLFGKIDMKIKLVPGNSAGTVTAYYLSSKGETWDEIDFEFLGNVTGQPYVIHTNVFTGGKGNREMQFYLWFDPTADFHTYTVLWNPLNIIFLVDGIPIRVFKNNEANGVAYPKSQPMKIYSSLWEADDWATQGGKVKTDWTNAPFSASYRSFNDVDCCSRTSIWNWVTCNANSNSWMWTTLNSNQLGQLKWVQKDYMIYNYCTDFKRFPQGLPTECNLN

SEQ ID NO: 90357 - protein, 212 aa, Arabidopsis thaliana
  peptide (1)..(212): Ceres Seq. ID no. 12723614
  misc_feature (1)..(135): Pfam Name: Glycosyl hydrolases family 16 Pfam Description: Glycosyl hydrolases family 16
  misc_feature (1)..(212): Homolog of NCBI NO: 15242778 NR Description: xyloglucan endotransglycosylase, putative; id: At5g57530.1, supported by cDNA: gi_16323042 [Arabidopsis >gi|9758314|dbj|BAB08788.1| xyloglucan endotransglycosylase
  misc_feature (1)..(212): Homolog of NCBI NO: 15242779 NR Description: xyloglucan endotransglycosylase, putative; id: At5g57540.1 [Arabidopsis thaliana]
  misc_feature (1)..(211): Homolog of NCBI NO: 15235998 NR Description: xyloglucan endotransglycosylase XTR9; protein id: supported by cDNA: gi_20260567, supported by cDNA: gi_4218962 thaliana] >gi|7447404|pir||T04236 xyloglucan [Arabidopsis
MKIKLVPGNSAGTVTAYYLSSKGETWDEIDFEFLGNVTGQPYVIHTNVFTGGKGNREMQFYLWFDPTADFHTYTVLWNPLNIIFLVDGIPIRVFKNNEANGVAYPKSQPMKIYSSLWEADDWATQGGKVKTDWTNAPFSASYRSFNDVDCCSRTSIWNWVTCNANSNSWMWTTLNSNQLGQLKWVQKDYMIYNYCTDFKRFPQGLPTECNLN

SEQ ID NO: 90358 - DNA, 1059 bp, Arabidopsis thaliana
  misc_feature (1)..(1059): Ceres Seq. ID no. 12723619
  misc_feature: MA Experiment ID: 20000166 Result: Up-regulated in Transcription
  misc_feature: MA Experiment 20000166 PARAMETER Experiment Name: At_100uM_ABA_P Parameter: Age (day) Value: 14
  misc_feature: MA Experiment 20000166 PARAMETER Experiment Name: At_100uM_ABA_P Parameter: Organism Value: A. thaliana
  misc_feature: MA Experiment 20000166 PARAMETER Experiment Name: At_100uM_ABA_P Parameter: Plant Line Value: WS
  misc_feature: MA Experiment 20000166 PARAMETER Experiment Name: At_100uM_ABA_P Parameter: Timepoint (hr) Value: 1
  misc_feature: MA Experiment 20000166 PARAMETER Experiment Name: At_100uM_ABA_P Parameter: Tissue Value: Aerial
  misc_feature: MA Experiment 20000166 PARAMETER Experiment Name: At_100uM_ABA_P Parameter: Treatment Value: 100uM ABA vs. No Treatment
  misc_feature: MA Experiment ID: 20000169 Result: Up-regulated in Transcription
  misc_feature: MA Experiment 20000169 PARAMETER Experiment Name: At_100uM_ABA_P Parameter: Age (day) Value: 14
  misc_feature: MA Experiment 20000169 PARAMETER Experiment Name: At_100uM_ABA_P Parameter: Organism Value: A. thaliana
  misc_feature: MA Experiment 20000169 PARAMETER Experiment Name: At_100uM_ABA_P Parameter: Plant Line Value: WS
  misc_feature: MA Experiment 20000169 PARAMETER Experiment Name: At_100uM_ABA_P Parameter: Timepoint (hr) Value: 6
  misc_feature: MA Experiment 20000169 PARAMETER Experiment Name: At_100uM_ABA_P Parameter: Tissue Value: Aerial
  misc_feature: MA Experiment 20000169 PARAMETER Experiment Name: At_100uM_ABA_P Parameter: Treatment Value: 100uM ABA vs. No Treatment
  misc_feature: MA Experiment ID: 20000179 Result: Down-regulated in Transcription
  misc_feature: MA Experiment 20000179 PARAMETER Experiment Name: At_Germinating_Seeds_P Parameter: Age (hr) Value: 6 vs. 0
  misc_feature: MA Experiment 20000179 PARAMETER Experiment Name: At_Germinating_Seeds_P Parameter: Tissue Value: Germinating Seeds
  misc_feature: MA Experiment ID: 20000180 Result: Down-regulated in Transcription
  misc_feature: MA Experiment 20000180 PARAMETER Experiment Name: At_Germinating_Seeds_P Parameter: Age (hr) Value: 24 vs. 0
  misc_feature: MA Experiment 20000180 PARAMETER Experiment Name: At_Germinating_Seeds_P Parameter: Tissue Value: Germinating Seeds
  misc_feature: MA Experiment ID: 20000182 Result: Up-regulated in Transcription
  misc_feature: MA Experiment 20000182 PARAMETER Experiment Name: At_2mM_SA_P Parameter: Age (day) Value: 14
  misc_feature: MA Experiment 20000182 PARAMETER Experiment Name: At_2mM_SA_P Parameter: Organism Value: A. thaliana
  misc_feature: MA Experiment 20000182 PARAMETER Experiment Name: At_2mM_SA_P Parameter: Plant Line Value: WS
  misc_feature: MA Experiment 20000182 PARAMETER Experiment Name: At_2mM_SA_P Parameter: Timepoint (hr) Value: 6
  misc_feature: MA Experiment 20000182 PARAMETER Experiment Name: At_2mM_SA_P Parameter: Tissue Value: Aerial
  misc_feature: MA Experiment 20000182 PARAMETER Experiment Name: At_2mM_SA_P Parameter: Treatment Value: 2mM SA vs. No Treatment
  misc_feature: MA Experiment ID: 20000184 Result: Down-regulated in Transcription
  misc_feature: MA Experiment 20000184 PARAMETER Experiment Name: At_Shoots__P Parameter: Age (day) Value: 7
  misc_feature: MA Experiment 20000184 PARAMETER Experiment Name: At_Shoots__P Parameter: Tissue Value: Shoots vs. Whole Plant
  misc_feature: MA Experiment ID: 20000185 Result: Down-regulated in Transcription
  misc_feature: MA Experiment 20000185 PARAMETER Experiment Name: At_Roots__P Parameter: Age (day) Value: 7 vs. 21
  misc_feature: MA Experiment 20000185 PARAMETER Experiment Name: At_Roots__P Parameter: Organism Value: A. thaliana
  misc_feature: MA Experiment 20000185 PARAMETER Experiment Name: At_Roots__P Parameter: Tissue Value: Roots vs. Whole Plant
  misc_feature: MA Experiment ID: 20000213 Result: Down-regulated in Transcription
  misc_feature: MA Experiment 20000213 PARAMETER Experiment Name: At_4deg_Cold_P Parameter: Timepoint (hr) Value: 2
  misc_feature: MA Experiment ID: 20000234 Result: Down-regulated in Transcription
  misc_feature: MA Experiment 20000234 PARAMETER Experiment Name: At_Siliques_P Parameter: Age (day) Value: 21
  misc_feature: MA Experiment 20000234 PARAMETER Experiment Name: At_Siliques_P Parameter: Organism Value: A. thaliana
  misc_feature: MA Experiment 20000234 PARAMETER Experiment Name: At_Siliques_P Parameter: Plant Line Value: WS
  misc_feature: MA Experiment 20000234 PARAMETER Experiment Name: At_Siliques_P Parameter: Tissue Value: Less Than 5mm Siliques vs. Whole Plant
  misc_feature: MA Experiment ID: 20000235 Result: Down-regulated in Transcription
  misc_feature: MA Experiment 20000235 PARAMETER Experiment Name: At_Siliques_P Parameter: Age (day) Value: 21
  misc_feature: MA Experiment 20000235 PARAMETER Experiment Name: At_Siliques_P Parameter: Organism Value: A. thaliana
  misc_feature: MA Experiment 20000235 PARAMETER Experiment Name: At_Siliques_P Parameter: Plant Line Value: WS
  misc_feature: MA Experiment 20000235 PARAMETER Experiment Name: At_Siliques_P Parameter: Tissue Value: 5-10mm Siliques vs. Whole Plant
  misc_feature: MA Experiment ID: 20000264 Result: Down-regulated in Transcription
  misc_feature: MA Experiment 20000264 PARAMETER Experiment Name: At_Open_Flower_P Parameter: Age (day) Value: 21
  misc_feature: MA Experiment 20000264 PARAMETER Experiment Name: At_Open_Flower_P Parameter: Plant Line Value: WS
  misc_feature: MA Experiment 20000264 PARAMETER Experiment Name: At_Open_Flower_P Parameter: Tissue Value: Open Flower vs. Whole Plant
  misc_feature: MA Experiment ID: 20000265 Result: Down-regulated in Transcription
  misc_feature: MA Experiment 20000265 PARAMETER Experiment Name: At_Open_Flower_P Parameter: Age (day) Value: 21
  misc_feature: MA Experiment 20000265 PARAMETER Experiment Name: At_Open_Flower_P Parameter: Plant Line Value: WS
  misc_feature: MA Experiment 20000265 PARAMETER Experiment Name: At_Open_Flower_P Parameter: Tissue Value: Closed Flower vs. Whole Plant
  misc_feature: MA Experiment ID: 20000286 Result: Down-regulated in Transcription
  misc_feature: MA Experiment 20000286 PARAMETER Experiment Name: At_Open_Flower_P Parameter: Age (day) Value: 21
  misc_feature: MA Experiment 20000286 PARAMETER Experiment Name: At_Open_Flower_P Parameter: Plant Line Value: WS
  misc_feature: MA Experiment 20000286 PARAMETER Experiment Name: At_Open_Flower_P Parameter: Tissue Value: Half Open vs. Whole Plant
  misc_feature: MA Experiment ID: 20000438 Result: Down-regulated in Transcription
  misc_feature: MA Experiment 20000438 PARAMETER Experiment Name: At_Shoots__P Parameter: Age (day) Value: 14
  misc_feature: MA Experiment 20000438 PARAMETER Experiment Name: At_Shoots__P Parameter: Tissue Value: Shoots vs. Whole Plant
  misc_feature: MA Experiment ID: 20000439 Result: Down-regulated in Transcription
  misc_feature: MA Experiment 20000439 PARAMETER Experiment Name: At_Roots__P Parameter: Age (day) Value: 14 vs. 21
  misc_feature: MA Experiment 20000439 PARAMETER Experiment Name: At_Roots__P Parameter: Organism Value: A. thaliana
  misc_feature: MA Experiment 20000439 PARAMETER Experiment Name: At_Roots__P Parameter: Tissue Value: Roots vs. Whole Plant
  misc_feature: MA Experiment ID: 20000453 Result: Up-regulated in Transcription
  misc_feature: MA Experiment 20000453 PARAMETER Experiment Name: At_100uM_ABA_P Parameter: Age (day) Value: 15
  misc_feature: MA Experiment 20000453 PARAMETER Experiment Name: At_100uM_ABA_P Parameter: Organism Value: A. thaliana
  misc_feature: MA Experiment 20000453 PARAMETER Experiment Name: At_100uM_ABA_P Parameter: Plant Line Value: WS
  misc_feature: MA Experiment 20000453 PARAMETER Experiment Name: At_100uM_ABA_P Parameter: Timepoint (hr) Value: 24
  misc_feature: MA Experiment 20000453 PARAMETER Experiment Name: At_100uM_ABA_P Parameter: Tissue Value: Aerial
  misc_feature: MA Experiment 20000453 PARAMETER Experiment Name: At_100uM_ABA_P Parameter: Treatment Value: 100uM ABA vs. No Treatment
  misc_feature: MA Experiment ID: 20000455 Result: Up-regulated in Transcription
  misc_feature: MA Experiment 20000455 PARAMETER Experiment Name: At_100uM_ABA_P Parameter: Age (day) Value: 16
  misc_feature: MA Experiment 20000455 PARAMETER Experiment Name: At_100uM_ABA_P Parameter: Organism Value: A. thaliana
  misc_feature: MA Experiment 20000455 PARAMETER Experiment Name: At_100uM_ABA_P Parameter: Plant Line Value: WS
  misc_feature: MA Experiment 20000455 PARAMETER Experiment Name: At_100uM_ABA_P Parameter: Timepoint (hr) Value: 48
  misc_feature: MA Experiment 20000455 PARAMETER Experiment Name: At_100uM_ABA_P Parameter: Tissue Value: Aerial
  misc_feature: MA Experiment 20000455 PARAMETER Experiment Name: At_100uM_ABA_P Parameter: Treatment Value: 100uM ABA vs. No Treatment
  misc_feature: MA Experiment ID: 20000573 Result: Up-regulated in Transcription
  misc_feature: MA Experiment 20000573 PARAMETER Experiment Name: At_100uM_ABA_Mutants__P Parameter: Organism Value: A. thaliana
  misc_feature: MA Experiment 20000573 PARAMETER Experiment Name: At_100uM_ABA_Mutants__P Parameter: Plant Line Value: CS22 vs. Ler wt
  misc_feature: MA Experiment 20000573 PARAMETER Experiment Name: At_100uM_ABA_Mutants__P Parameter: Timepoint (hr) Value: N/A
  misc_feature: MA Experiment 20000573 PARAMETER Experiment Name: At_100uM_ABA_Mutants__P Parameter: Tissue Value: Whole Plant
  misc_feature: MA Experiment 20000573 PARAMETER Experiment Name: At_100uM_ABA_Mutants__P Parameter: Treatment Value: None
  misc_feature: MA Experiment ID: 20000574 Result: Up-regulated in Transcription
  misc_feature: MA Experiment 20000574 PARAMETER Experiment Name: At_100uM_ABA_Mutants__P Parameter: Organism Value: A. thaliana
  misc_feature: MA Experiment 20000574 PARAMETER Experiment Name: At_100uM_ABA_Mutants__P Parameter: Plant Line Value: CS23 vs. Ler wt
  misc_feature: MA Experiment 20000574 PARAMETER Experiment Name: At_100uM_ABA_Mutants__P Parameter: Timepoint (hr) Value: N/A
  misc_feature: MA Experiment 20000574 PARAMETER Experiment Name: At_100uM_ABA_Mutants__P Parameter: Tissue Value: Whole Plant
  misc_feature: MA Experiment 20000574 PARAMETER Experiment Name: At_100uM_ABA_Mutants__P Parameter: Treatment Value: None
  misc_feature: MA Experiment ID: 20000794 Result: Down-regulated in Transcription
  misc_feature: MA Experiment 20000794 PARAMETER Experiment Name: At_Petals_P Parameter: Age (day) Value: 23-25 days
  misc_feature: MA Experiment 20000794 PARAMETER Experiment Name: At_Petals_P Parameter: Plant Line Value: WS
  misc_feature: MA Experiment 20000794 PARAMETER Experiment Name: At_Petals_P Parameter: Tissue Value: Petals vs. Whole plant
  misc_feature: MA Experiment ID: 20001450 Result: Up-regulated in Transcription
  misc_feature: MA Experiment 20001450 PARAMETER Experiment Name: At_Far-red-induction_P Parameter: Age (day) Value: 7
  misc_feature: MA Experiment 20001450 PARAMETER Experiment Name: At_Far-red-induction_P Parameter: Light Value: Far-red vs. White
  misc_feature: MA Experiment 20001450 PARAMETER Experiment Name: At_Far-red-induction_P Parameter: Organism Value: A. thaliana
  misc_feature: MA Experiment 20001450 PARAMETER Experiment Name: At_Far-red-induction_P Parameter: Plant Line Value: Columbia
  misc_feature: MA Experiment 20001450 PARAMETER Experiment Name: At_Far-red-induction_P Parameter: Timepoint (hr) Value: 8
  misc_feature: MA Experiment 20001450 PARAMETER Experiment Name: At_Far-red-induction_P Parameter: Tissue Value: Whole Plant
  misc_feature: MA Experiment ID: 20001451 Result: Up-regulated in Transcription
  misc_feature: MA Experiment 20001451 PARAMETER Experiment Name: At_Far-red-induction_P Parameter: Age (day) Value: 7
  misc_feature: MA Experiment 20001451 PARAMETER Experiment Name: At_Far-red-induction_P Parameter: Light Value: Far-red vs. White
  misc_feature: MA Experiment 20001451 PARAMETER Experiment Name: At_Far-red-induction_P Parameter: Organism Value: A. thaliana
  misc_feature: MA Experiment 20001451 PARAMETER Experiment Name: At_Far-red-induction_P Parameter: Plant Line Value: Columbia
  misc_feature: MA Experiment 20001451 PARAMETER Experiment Name: At_Far-red-induction_P Parameter: Timepoint (hr) Value: 24
  misc_feature: MA Experiment 20001451 PARAMETER Experiment Name: At_Far-red-induction_P Parameter: Tissue Value: Whole Plant
  misc_feature: MA Experiment ID: 20001458 Result: Down-regulated in Transcription
  misc_feature: MA Experiment 20001458 PARAMETER Experiment Name: At_50mM_NH4NO3_L-to-H_P Parameter: Age (day) Value: Undefined
  misc_feature: MA Experiment 20001458 PARAMETER Experiment Name: At_50mM_NH4NO3_L-to-H_P Parameter: Organism Value: Undefined
  misc_feature: MA Experiment 20001458 PARAMETER Experiment Name: At_50mM_NH4NO3_L-to-H_P Parameter: Plant Line Value: Undefined
  misc_feature: MA Experiment 20001458 PARAMETER Experiment Name: At_50mM_NH4NO3_L-to-H_P Parameter: Timepoint (hr) Value: 2
  misc_feature: MA Experiment 20001458 PARAMETER Experiment Name: At_50mM_NH4NO3_L-to-H_P Parameter: Tissue Value: Siliques
  misc_feature: MA Experiment 20001458 PARAMETER Experiment Name: At_50mM_NH4NO3_L-to-H_P Parameter: Treatment Value: 50mM NH4NO3 vs. 100mM Manitol
  misc_feature: MA Experiment ID: 20001459 Result: Down-regulated in Transcription
  misc_feature: MA Experiment 20001459 PARAMETER Experiment Name: At_50mM_NH4NO3_L-to-H_P Parameter: Age (day) Value: Undefined
  misc_feature: MA Experiment 20001459 PARAMETER Experiment Name: At_50mM_NH4NO3_L-to-H_P Parameter: Organism Value: Undefined
  misc_feature: MA Experiment 20001459 PARAMETER Experiment Name: At_50mM_NH4NO3_L-to-H_P Parameter: Plant Line Value: Undefined
  misc_feature: MA Experiment 20001459 PARAMETER Experiment Name: At_50mM_NH4NO3_L-to-H_P Parameter: Timepoint (hr) Value: 4
  misc_feature: MA Experiment 20001459 PARAMETER Experiment Name: At_50mM_NH4NO3_L-to-H_P Parameter: Tissue Value: Siliques
  misc_feature: MA Experiment 20001459 PARAMETER Experiment Name: At_50mM_NH4NO3_L-to-H_P Parameter: Treatment Value: 50mM NH4NO3 vs. 100mM Manitol
  misc_feature: MA Experiment ID: 20001504 Result: Down-regulated in Transcription
  misc_feature: MA Experiment 20001504 PARAMETER Experiment Name: At_Far-red-enriched_P Parameter: Age (day) Value: 10
  misc_feature: MA Experiment 20001504 PARAMETER Experiment Name: At_Far-red-enriched_P Parameter: Light Value: Far-red enriched vs. White
  misc_feature: MA Experiment 20001504 PARAMETER Experiment Name: At_Far-red-enriched_P Parameter: Organism Value: A. thaliana
  misc_feature: MA Experiment 20001504 PARAMETER Experiment Name: At_Far-red-enriched_P Parameter: Plant Line Value: Columbia
  misc_feature: MA Experiment 20001504 PARAMETER Experiment Name: At_Far-red-enriched_P Parameter: Timepoint (day) Value: 6
  misc_feature: MA Experiment 20001504 PARAMETER Experiment Name: At_Far-red-enriched_P Parameter: Tissue Value: Whole Plant
  misc_feature: MA Experiment ID: 20001556 Result: Up-regulated in Transcription
  misc_feature: MA Experiment 20001556 PARAMETER Experiment Name: At_Drought_Soil_Dry_P Parameter: Age (day) Value: 26
  misc_feature: MA Experiment 20001556 PARAMETER Experiment Name: At_Drought_Soil_Dry_P Parameter: Organism Value: A. thaliana
  misc_feature: MA Experiment 20001556 PARAMETER Experiment Name: At_Drought_Soil_Dry_P Parameter: Plant Line Value: WS
  misc_feature: MA Experiment 20001556 PARAMETER Experiment Name: At_Drought_Soil_Dry_P Parameter: Post Timepoint (hr) Value: None
  misc_feature: MA Experiment 20001556 PARAMETER Experiment Name: At_Drought_Soil_Dry_P Parameter: Post-Treatment Value: None
  misc_feature: MA Experiment 20001556 PARAMETER Experiment Name: At_Drought_Soil_Dry_P Parameter: Timepoint (day) Value: 12
  misc_feature: MA Experiment 20001556 PARAMETER Experiment Name: At_Drought_Soil_Dry_P Parameter: Treatment Value: Drought vs. No Drought
  misc_feature: MA Experiment ID: 20001557 Result: Down-regulated in Transcription
  misc_feature: MA Experiment 20001557 PARAMETER Experiment Name: At_Drought_Soil_Dry_P Parameter: Age (day) Value: 27
  misc_feature: MA Experiment 20001557 PARAMETER Experiment Name: At_Drought_Soil_Dry_P Parameter: Organism Value: A. thaliana
  misc_feature: MA Experiment 20001557 PARAMETER Experiment Name: At_Drought_Soil_Dry_P Parameter: Plant Line Value: WS
  misc_feature: MA Experiment 20001557 PARAMETER Experiment Name: At_Drought_Soil_Dry_P Parameter: Post Timepoint (hr) Value: 3
  misc_feature: MA Experiment 20001557 PARAMETER Experiment Name: At_Drought_Soil_Dry_P Parameter: Post-Treatment Value: Re-Water vs. No Drought
  misc_feature: MA Experiment 20001557 PARAMETER Experiment Name: At_Drought_Soil_Dry_P Parameter: Timepoint (day) Value: 13
  misc_feature: MA Experiment 20001557 PARAMETER Experiment Name: At_Drought_Soil_Dry_P Parameter: Treatment Value: Drought vs. No Drought
  misc_feature: MA Experiment ID: 20001560 Result: Up-regulated in Transcription
  misc_feature: MA Experiment 20001560 PARAMETER Experiment Name: At_Drought_Soil_Dry_P Parameter: Age (day) Value: 28
  misc_feature: MA Experiment 20001560 PARAMETER Experiment Name: At_Drought_Soil_Dry_P Parameter: Organism Value: A. thaliana
  misc_feature: MA Experiment 20001560 PARAMETER Experiment Name: At_Drought_Soil_Dry_P Parameter: Plant Line Value: WS
  misc_feature: MA Experiment 20001560 PARAMETER Experiment Name: At_Drought_Soil_Dry_P Parameter: Post Timepoint (hr) Value: None
  misc_feature: MA Experiment 20001560 PARAMETER Experiment Name: At_Drought_Soil_Dry_P Parameter: Post-Treatment Value: None
  misc_feature: MA Experiment 20001560 PARAMETER Experiment Name: At_Drought_Soil_Dry_P Parameter: Timepoint (day) Value: 14
  misc_feature: MA Experiment 20001560 PARAMETER Experiment Name: At_Drought_Soil_Dry_P Parameter: Treatment Value: Drought vs. No Drought
  misc_feature: MA Experiment ID: 20001904 Result: Up-regulated in Transcription
  misc_feature: MA Experiment 20001904 PARAMETER Experiment Name: At_Drought_Reproduction_P Parameter: Age (day) Value: 37
  misc_feature: MA Experiment 20001904 PARAMETER Experiment Name: At_Drought_Reproduction_P Parameter: Organism Value: A. thaliana
  misc_feature: MA Experiment 20001904 PARAMETER Experiment Name: At_Drought_Reproduction_P Parameter: Plant Line Value: WS
  misc_feature: MA Experiment 20001904 PARAMETER Experiment Name: At_Drought_Reproduction_P Parameter: Timepoint (day) Value: 7
  misc_feature: MA Experiment 20001904 PARAMETER Experiment Name: At_Drought_Reproduction_P Parameter: Tissue Value: Rosettes
  misc_feature: MA Experiment 20001904 PARAMETER Experiment Name: At_Drought_Reproduction_P Parameter: Treatment Value: Drought vs. No Drought
  misc_feature: MA Experiment ID: 20001910 Result: Up-regulated in Transcription
  misc_feature: MA Experiment 20001910 PARAMETER Experiment Name: At_Drought_Reproduction_P Parameter: Age (day) Value: 37
  misc_feature: MA Experiment 20001910 PARAMETER Experiment Name: At_Drought_Reproduction_P Parameter: Organism Value: A. thaliana
  misc_feature: MA Experiment 20001910 PARAMETER Experiment Name: At_Drought_Reproduction_P Parameter: Plant Line Value: WS
  misc_feature: MA Experiment 20001910 PARAMETER Experiment Name: At_Drought_Reproduction_P Parameter: Timepoint (day) Value: 7
  misc_feature: MA Experiment 20001910 PARAMETER Experiment Name: At_Drought_Reproduction_P Parameter: Tissue Value: Flowers
  misc_feature: MA Experiment 20001910 PARAMETER Experiment Name: At_Drought_Reproduction_P Parameter: Treatment Value: Drought vs. No Drought
gaatgatttcaattctctatcttattgacacataaacatggaccggtccactttcatcttatctctactcttcacactcactgtctcgactacgaccctcttctctccggttttcgcaggaacgttcgacacagaattcgatatcacttggggtgatggtcgtggcaaggttcttaacaacggagagcttctcactctctccctcgacagagcctccggctctggttttcaaaccaagaaagagtatttgttcgggaaaatcgacatgcagctcaaactcgtccctggaaactccgccggaaccgtcactgcctactacttgaagtcaaaaggtgatacgtgggacgaaatcgatttcgagtttcttggtaatctaactggtgatccgtataccatgcatacgaatgtgtatactcaaggcaaaggtgatagagaacaacaatttcatctctggttcgatccaaccgctgatttccacacttactctgttttatggaaccctcatcacatcgttttcatggttgatgatattccggtaagagaattcaagaatctacaacatatgggtatccagtatccaaaattgcagccgatgaggttatactcgagtctatggaacgcggaccagtgggctacaaggggaggtctcgttaagactgactggtccaaggcaccattcaccgcttcttacagaaactttagagcggatgcatgtgtttcctcgggcggaagatcatcttgtcctgccggttcacctagatggttctctcaaaggcttgatctaacagcggaagataagatgagagtggtgcagaggaagtacatgatctataactattgtacggacaccaaaaggtttcctcaaggatttccaaaggagtgtagacactagctacgagaattaatgtgtgatccgaaactccaaagctagtattgtataggttcgtctaaattatatatgtaatgtttatgtttatttaggttctgtaataagcaatttcccctgtttctatgtagatattctcataataaaatgggcgtgagttatgttggttcaat

SEQ ID NO: 90359 - protein, 284 aa, Arabidopsis thaliana
  peptide (1)..(284): Ceres Seq. ID no. 12723620
  misc_feature (30)..(211): Pfam Name: Glycosyl hydrolases family 16 Pfam Description: Glycosyl hydrolases family 16
  misc_feature (1)..(284): Homolog of NCBI NO: 22327914 NR Description: xyloglucan endotransglycosylase (XTR3); protein At5g57550.1 [Arabidopsis thaliana] endoxyloglucan transferase [Arabidopsis thaliana]
  misc_feature (8)..(284): Homolog of NCBI NO: 2129773 NR Description: xyloglucan endo-1,4-beta-D-glucanase (EC 3.2.1.-) - Arabidopsis thaliana (fragment) >gi|1244752|gb|AAB18364.1|
  misc_feature (1)..(282): Homolog of NCBI NO: 29500891 NR Description: putative xyloglucan endotransglycosylase [Cucumis >gi|29500899|emb|CAD87533.1| putative xyloglucan
  misc_feature (4)..(284): Homolog of NCBI NO: 8886865 NR Description: xyloglucan endotransglycosylase XET1 [Asparagus
  misc_feature (4)..(282): Homolog of NCBI NO: 29500893 NR Description: putative xyloglucan endotransglycosylase [Cucumis >gi|29500901|emb|CAD87534.1| putative xyloglucan
MDRSTFILSLLFTLTVSTTTLFSPVFAGTFDTEFDITWGDGRGKVLNNGELLTLSLDRASGSGFQTKKEYLFGKIDMQLKLVPGNSAGTVTAYYLKSKGDTWDEIDFEFLGNLTGDPYTMHTNVYTQGKGDREQQFHLWFDPTADFHTYSVLWNPHHIVFMVDDIPVREFKNLQHMGIQYPKLQPMRLYSSLWNADQWATRGGLVKTDWSKAPFTASYRNFRADACVSSGGRSSCPAGSPRWFSQRLDLTAEDKMRVVQRKYMIYNYCTDTKRFPQGFPKECRH

SEQ ID NO: 90360 - protein, 208 aa, Arabidopsis thaliana
  peptide (1)..(208): Ceres Seq. ID no. 12723621
  misc_feature (1)..(135): Pfam Name: Glycosyl hydrolases family 16 Pfam Description: Glycosyl hydrolases family 16
  misc_feature (1)..(208): Homolog of NCBI NO: 22327914 NR Description: xyloglucan endotransglycosylase (XTR3); protein At5g57550.1 [Arabidopsis thaliana] endoxyloglucan transferase [Arabidopsis thaliana]
  misc_feature (1)..(208): Homolog of NCBI NO: 2129773 NR Description: xyloglucan endo-1,4-beta-D-glucanase (EC 3.2.1.-) - Arabidopsis thaliana (fragment) >gi|1244752|gb|AAB18364.1|
  misc_feature (1)..(206): Homolog of NCBI NO: 29500891 NR Description: putative xyloglucan endotransglycosylase [Cucumis >gi|29500899|emb|CAD87533.1| putative xyloglucan
  misc_feature (1)..(208): Homolog of NCBI NO: 8886865 NR Description: xyloglucan endotransglycosylase XET1 [Asparagus
  misc_feature (1)..(206): Homolog of NCBI NO: 29500893 NR Description: putative xyloglucan endotransglycosylase [Cucumis >gi|29500901|emb|CAD87534.1| putative xyloglucan
MQLKLVPGNSAGTVTAYYLKSKGDTWDEIDFEFLGNLTGDPYTMHTNVYTQGKGDREQQFHLWFDPTADFHTYSVLWNPHHIVFMVDDIPVREFKNLQHMGIQYPKLQPMRLYSSLWNADQWATRGGLVKTDWSKAPFTASYRNFRADACVSSGGRSSCPAGSPRWFSQRLDLTAEDKMRVVQRKYMIYNYCTDTKRFPQGFPKECRH

SEQ ID NO: 90361 - protein, 165 aa, Arabidopsis thaliana
  peptide (1)..(165): Ceres Seq. ID no. 12723622
  misc_feature (1)..(92): Pfam Name: Glycosyl hydrolases family 16 Pfam Description: Glycosyl hydrolases family 16
  misc_feature (1)..(165): Homolog of NCBI NO: 22327914 NR Description: xyloglucan endotransglycosylase (XTR3); protein At5g57550.1 [Arabidopsis thaliana] endoxyloglucan transferase [Arabidopsis thaliana]
  misc_feature (1)..(165): Homolog of NCBI NO: 2129773 NR Description: xyloglucan endo-1,4-beta-D-glucanase (EC 3.2.1.-) - Arabidopsis thaliana (fragment) >gi|1244752|gb|AAB18364.1|
  misc_feature (1)..(163): Homolog of NCBI NO: 29500891 NR Description: putative xyloglucan endotransglycosylase [Cucumis >gi|29500899|emb|CAD87533.1| putative xyloglucan
  misc_feature (1)..(165): Homolog of NCBI NO: 8886865 NR Description: xyloglucan endotransglycosylase XET1 [Asparagus
  misc_feature (1)..(163): Homolog of NCBI NO: 29500893 NR Description: putative xyloglucan endotransglycosylase [Cucumis >gi|29500901|emb|CAD87534.1| putative xyloglucan
MHTNVYTQGKGDREQQFHLWFDPTADFHTYSVLWNPHHIVFMVDDIPVREFKNLQHMGIQYPKLQPMRLYSSLWNADQWATRGGLVKTDWSKAPFTASYRNFRADACVSSGGRSSCPAGSPRWFSQRLDLTAEDKMRVVQRKYMIYNYCTDTKRFPQGFPKECRH

SEQ ID NO: 90362 - DNA, 2388 bp, Arabidopsis thaliana
  misc_feature (1)..(2388): Ceres Seq. ID no. 12723627
  misc_feature: MA Experiment ID: 20000182 Result: Up-regulated in Transcription
  misc_feature: MA Experiment 20000182 PARAMETER Experiment Name: At_2mM_SA_P Parameter: Age (day) Value: 14
  misc_feature: MA Experiment 20000182 PARAMETER Experiment Name: At_2mM_SA_P Parameter: Organism Value: A. thaliana
  misc_feature: MA Experiment 20000182 PARAMETER Experiment Name: At_2mM_SA_P Parameter: Plant Line Value: WS
  misc_feature: MA Experiment 20000182 PARAMETER Experiment Name: At_2mM_SA_P Parameter: Timepoint (hr) Value: 6
  misc_feature: MA Experiment 20000182 PARAMETER Experiment Name: At_2mM_SA_P Parameter: Tissue Value: Aerial
  misc_feature: MA Experiment 20000182 PARAMETER Experiment Name: At_2mM_SA_P Parameter: Treatment Value: 2mM SA vs. No Treatment
  misc_feature: MA Experiment ID: 20000184 Result: Down-regulated in Transcription
  misc_feature: MA Experiment 20000184 PARAMETER Experiment Name: At_Shoots__P Parameter: Age (day) Value: 7
  misc_feature: MA Experiment 20000184 PARAMETER Experiment Name: At_Shoots__P Parameter: Tissue Value: Shoots vs. Whole Plant
  misc_feature: MA Experiment ID: 20000234 Result: Down-regulated in Transcription
  misc_feature: MA Experiment 20000234 PARAMETER Experiment Name: At_Siliques_P Parameter: Age (day) Value: 21
  misc_feature: MA Experiment 20000234 PARAMETER Experiment Name: At_Siliques_P Parameter: Organism Value: A. thaliana
  misc_feature: MA Experiment 20000234 PARAMETER Experiment Name: At_Siliques_P Parameter: Plant Line Value: WS
  misc_feature: MA Experiment 20000234 PARAMETER Experiment Name: At_Siliques_P Parameter: Tissue Value: Less Than 5mm Siliques vs. Whole Plant
  misc_feature: MA Experiment ID: 20000235 Result: Down-regulated in Transcription
  misc_feature: MA Experiment 20000235 PARAMETER Experiment Name: At_Siliques_P Parameter: Age (day) Value: 21
  misc_feature: MA Experiment 20000235 PARAMETER Experiment Name: At_Siliques_P Parameter: Organism Value: A. thaliana
  misc_feature: MA Experiment 20000235 PARAMETER Experiment Name: At_Siliques_P Parameter: Plant Line Value: WS
  misc_feature: MA Experiment 20000235 PARAMETER Experiment Name: At_Siliques_P Parameter: Tissue Value: 5-10mm Siliques vs. Whole Plant
  misc_feature: MA Experiment ID: 20000265 Result: Down-regulated in Transcription
  misc_feature: MA Experiment 20000265 PARAMETER Experiment Name: At_Open_Flower_P Parameter: Age (day) Value: 21
  misc_feature: MA Experiment 20000265 PARAMETER Experiment Name: At_Open_Flower_P Parameter: Plant Line Value: WS
  misc_feature: MA Experiment 20000265 PARAMETER Experiment Name: At_Open_Flower_P Parameter: Tissue Value: Closed Flower vs. Whole Plant
aatgagtcgccacagttgaccgattaacccaaaactgcgacgactcaaaacaaagagatactatactatcatcaaaactccaattctctattcactactaatcattgttccaattcaacgccggtggcttttaatcggcgagacactctctgatttctcggtctccgattaactgatctaggttttttttggggaggagaatgcaaaggtagatgatggatagtggtaataataatatgaatagagccaagaggaatttggatgggaacgatgatgatcagcctgagcgaaaacgccctgcttttgctagtgtgattgttgaggctctgaaagtagatagtttgcagaagctttgctcctctttggaacctattctccgccgagttgtcagcgaggaactggaacgtgctttagcaaaactaggccctgctaggcttactggaagttcgggctcttctccaaagcgaattgaaggtccggatggtcggaagttacagttgcacttcaaatctaggttatctctcccgttattcactggggggaaagtagaaggagagcaaggtgctgtgattcatgttgtcttgattgatgcaaacactggccgtgctgtggtatatggtccagaggcttcggcaaagcttcacattgttgtgcttgagggtgactttaacactgaagatgatgaagactggacacaagaagaatttgaaagccatgttgtaaaagagcgttcaggaaagagaccgttgctgactggagaagtgtatgttacactcaaggaaggggttggaactttgggcgagctagttttcacggataattcgagttggattcgaagtcggaagttccgacttggtttacgggtggtttctgggtgttgtgatggcatgcgtatccgtgaggccaagacggaagcttttgttgttaaggatcacaggggcgaattgtacaagaagcattatccacctgctctgaatgatgatgtgtggagattggacaagatcggcaaggatggggcattccataaaaagcttactgctgaaggaataaacactgtagaagattttctgagagtaatggtcaaggattctccaaaattacgtactattcttggaagcggcatgtcaaacaaaatgtgggatgcactagtagagcacgcaaagacgtgtgtccagagcagcaagctttatatctactatgctgaggattcaaggaatgtcggtgttgtgttcaataatatctatgagctaagcggccttatttctggagatcaatacttctctgctgattcacttactgatagccaaaaggtatatgttgaggggctggtgaagaaagcatatgaaaactggaacctagtcatagagtatgatggaaaatctcttttagacttgaagcagccccagaggttgagtattactcacactaatctggaaaattactcgactgctgccattgaccatccaatgcagatggtggcagggcattcgtcttcaatgccgcctaaccagtctccagtgctttcagattttgctattggagggtatgatcaaactctggcaacaagatatcattcgcatccccagcttttaaactccaacccgcgagcacaatttgaggttgcttcatgcagtacatcgcaagaccagttcatgggaaatctacatcaaactcaaagcaccataaacaatcaacacatgaatggcctggctctcggtccttcacaatcatccacaagcggataccaaaacatcaacccttcttctgttcaccaggcagatctcaaccatttagaagactggtcaaacccccgtgagagaggaccagatgatttcttctcagaggaagagatccgactcagaagccatgaaatgctagagagtgaagacatgcaacagttcctccgcctattcagcatgggaggaggaggcaatggctctgcaacacacttgccagaagatggatatactttcccatcgtttctacacacgcctatgcaaggttatgatgaagaccgtggtcgatcaggcagagctgttgttggatggcttaagataaaagccgcaatgagatgggggttcttcatcaggaggaaagctgctgagaggcgagcacaaattgtagagcttgatgatgatgatgaagatggcgaatagtgtataaaaggaagtgtacagttagattcagtggatctgtggatgtgtgtgttttatgaagcaggagacttctaatatgcttgattgatgataactcatttagacagtagcattcttaagaactgattctacagtcttagatatgtgattcaacaagtagaatttctgtatggtccttttatttgatgatactcgagttactatctgtaaggcttttgttccacgaaacttt

SEQ ID NO: 90363 - protein, 647 aa, Arabidopsis thaliana
  peptide (1)..(647): Ceres Seq. ID no. 12723628
  misc_feature (13)..(458): Homolog of NCBI NO: 30687005 NR Description: calmodulin-binding protein [Arabidopsis thaliana]
  misc_feature (460)..(647): Homolog of NCBI NO: 30687005 NR Description: calmodulin-binding protein [Arabidopsis thaliana]
  misc_feature (105)..(642): Homolog of NCBI NO: 7489107 NR Description: calmodulin-binding protein TCB60 - common tobacco
  misc_feature (101)..(572): Homolog of NCBI NO: 7484830 NR Description: calmodulin-binding protein homolog F14M19.80 -
  misc_feature (59)..(483): Homolog of NCBI NO: 25354646 NR Description: probable calmodulin-binding protein [imported] -
  misc_feature (1)..(60): Homolog of NCBI NO: 25354646 NR Description: probable calmodulin-binding protein [imported] -
  misc_feature (7)..(427): Homolog of NCBI NO: 22329041 NR Description: calmodulin-binding protein; protein id:
  misc_feature (458)..(640): Homolog of NCBI NO: 22329041 NR Description: calmodulin-binding protein; protein id:
  misc_feature (106)..(436): Homolog of NCBI NO: 15224117 NR Description: calmodulin-binding protein; protein id:
  misc_feature (455)..(640): Homolog of NCBI NO: 15224117 NR Description: calmodulin-binding protein; protein id:
MMDSGNNNMNRAKRNLDGNDDDQPERKRPAFASVIVEALKVDSLQKLCSSLEPILRRVVSEELERALAKLGPARLTGSSGSSPKRIEGPDGRKLQLHFKSRLSLPLFTGGKVEGEQGAVIHVVLIDANTGRAVVYGPEASAKLHIVVLEGDFNTEDDEDWTQEEFESHVVKERSGKRPLLTGEVYVTLKEGVGTLGELVFTDNSSWIRSRKFRLGLRVVSGCCDGMRIREAKTEAFVVKDHRGELYKKHYPPALNDDVWRLDKIGKDGAFHKKLTAEGINTVEDFLRVMVKDSPKLRTILGSGMSNKMWDALVEHAKTCVQSSKLYIYYAEDSRNVGVVFNNIYELSGLISGDQYFSADSLTDSQKVYVEGLVKKAYENWNLVIEYDGKSLLDLKQPQRLSITHTNLENYSTAAIDHPMQMVAGHSSSMPPNQSPVLSDFAIGGYDQTLATRYHSHPQLLNSNPRAQFEVASCSTSQDQFMGNLHQTQSTINNQHMNGLALGPSQSSTSGYQNINPSSVHQADLNHLEDWSNPRERGPDDFFSEEEIRLRSHEMLESEDMQQFLRLFSMGGGGNGSATHLPEDGYTFPSFLHTPMQGYDEDRGRSGRAVVGWLKIKAAMRWGFFIRRKAAERRAQIVELDDDDEDGE

SEQ ID NO: 90364 - protein, 646 aa, Arabidopsis thaliana
  peptide (1)..(646): Ceres Seq. ID no. 12723629
  misc_feature (12)..(457): Homolog of NCBI NO: 30687005 NR Description: calmodulin-binding protein [Arabidopsis thaliana]
  misc_feature (459)..(646): Homolog of NCBI NO: 30687005 NR Description: calmodulin-binding protein [Arabidopsis thaliana]
  misc_feature (104)..(641): Homolog of NCBI NO: 7489107 NR Description: calmodulin-binding protein TCB60 - common tobacco
  misc_feature (100)..(571): Homolog of NCBI NO: 7484830 NR Description: calmodulin-binding protein homolog F14M19.80 -
  misc_feature (58)..(482): Homolog of NCBI NO: 25354646 NR Description: probable calmodulin-binding protein [imported] -
  misc_feature (1)..(59): Homolog of NCBI NO: 25354646 NR Description: probable calmodulin-binding protein [imported] -
  misc_feature (6)..(426): Homolog of NCBI NO: 22329041 NR Description: calmodulin-binding protein; protein id:
  misc_feature (457)..(639): Homolog of NCBI NO: 22329041 NR Description: calmodulin-binding protein; protein id:
  misc_feature (105)..(435): Homolog of NCBI NO: 15224117 NR Description: calmodulin-binding protein; protein id:
  misc_feature (454)..(639): Homolog of NCBI NO: 15224117 NR Description: calmodulin-binding protein; protein id:
MDSGNNNMNRAKRNLDGNDDDQPERKRPAFASVIVEALKVDSLQKLCSSLEPILRRVVSEELERALAKLGPARLTGSSGSSPKRIEGPDGRKLQLHFKSRLSLPLFTGGKVEGEQGAVIHVVLIDANTGRAVVYGPEASAKLHIVVLEGDFNTEDDEDWTQEEFESHVVKERSGKRPLLTGEVYVTLKEGVGTLGELVFTDNSSWIRSRKFRLGLRVVSGCCDGMRIREAKTEAFVVKDHRGELYKKHYPPALNDDVWRLDKIGKDGAFHKKLTAEGINTVEDFLRVMVKDSPKLRTILGSGMSNKMWDALVEHAKTCVQSSKLYIYYAEDSRNVGVVFNNIYELSGLISGDQYFSADSLTDSQKVYVEGLVKKAYENWNLVIEYDGKSLLDLKQPQRLSITHTNLENYSTAAIDHPMQMVAGHSSSMPPNQSPVLSDFAIGGYDQTLATRYHSHPQLLNSNPRAQFEVASCSTSQDQFMGNLHQTQSTINNQHMNGLALGPSQSSTSGYQNINPSSVHQADLNHLEDWSNPRERGPDDFFSEEEIRLRSHEMLESEDMQQFLRLFSMGGGGNGSATHLPEDGYTFPSFLHTPMQGYDEDRGRSGRAVVGWLKIKAAMRWGFFIRRKAAERRAQIVELDDDDEDGE

SEQ ID NO: 90365 - protein, 639 aa, Arabidopsis thaliana
  peptide (1)..(639): Ceres Seq. ID no. 12723630
  misc_feature (5)..(450): Homolog of NCBI NO: 30687005 NR Description: calmodulin-binding protein [Arabidopsis thaliana]
  misc_feature (452)..(639): Homolog of NCBI NO: 30687005 NR Description: calmodulin-binding protein [Arabidopsis thaliana]
  misc_feature (97)..(634): Homolog of NCBI NO: 7489107 NR Description: calmodulin-binding protein TCB60 - common tobacco
  misc_feature (93)..(564): Homolog of NCBI NO: 7484830 NR Description: calmodulin-binding protein homolog F14M19.80 -
  misc_feature (51)..(475): Homolog of NCBI NO: 25354646 NR Description: probable calmodulin-binding protein [imported] -
  misc_feature (1)..(52): Homolog of NCBI NO: 25354646 NR Description: probable calmodulin-binding protein [imported] -
  misc_feature (1)..(419): Homolog of NCBI NO: 22329041 NR Description: calmodulin-binding protein; protein id:
  misc_feature (450)..(632): Homolog of NCBI NO: 22329041 NR Description: calmodulin-binding protein; protein id:
  misc_feature (98)..(428): Homolog of NCBI NO: 15224117 NR Description: calmodulin-binding protein; protein id:
  misc_feature (447)..(632): Homolog of NCBI NO: 15224117 NR Description: calmodulin-binding protein; protein id:
MNRAKRNLDGNDDDQPERKRPAFASVIVEALKVDSLQKLCSSLEPILRRVVSEELERALAKLGPARLTGSSGSSPKRIEGPDGRKLQLHFKSRLSLPLFTGGKVEGEQGAVIHVVLIDANTGRAVVYGPEASAKLHIVVLEGDFNTEDDEDWTQEEFESHVVKERSGKRPLLTGEVYVTLKEGVGTLGELVFTDNSSWIRSRKFRLGLRVVSGCCDGMRIREAKTEAFVVKDHRGELYKKHYPPALNDDVWRLDKIGKDGAFHKKLTAEGINTVEDFLRVMVKDSPKLRTILGSGMSNKMWDALVEHAKTCVQSSKLYIYYAEDSRNVGVVFNNIYELSGLISGDQYFSADSLTDSQKVYVEGLVKKAYENWNLVIEYDGKSLLDLKQPQRLSITHTNLENYSTAAIDHPMQMVAGHSSSMPPNQSPVLSDFAIGGYDQTLATRYHSHPQLLNSNPRAQFEVASCSTSQDQFMGNLHQTQSTINNQHMNGLALGPSQSSTSGYQNINPSSVHQADLNHLEDWSNPRERGPDDFFSEEEIRLRSHEMLESEDMQQFLRLFSMGGGGNGSATHLPEDGYTFPSFLHTPMQGYDEDRGRSGRAVVGWLKIKAAMRWGFFIRRKAAERRAQIVELDDDDEDGE

SEQ ID NO: 90366 - DNA, 3165 bp, Arabidopsis thaliana
  misc_feature (1)..(3165): Ceres Seq. ID no. 12723631
  misc_feature: MA Experiment ID: 20000166 Result: Up-regulated in Transcription
  misc_feature: MA Experiment 20000166 PARAMETER Experiment Name: At_100uM_ABA_P Parameter: Age (day) Value: 14
  misc_feature: MA Experiment 20000166 PARAMETER Experiment Name: At_100uM_ABA_P Parameter: Organism Value: A. thaliana
  misc_feature: MA Experiment 20000166 PARAMETER Experiment Name: At_100uM_ABA_P Parameter: Plant Line Value: WS
  misc_feature: MA Experiment 20000166 PARAMETER Experiment Name: At_100uM_ABA_P Parameter: Timepoint (hr) Value: 1
  misc_feature: MA Experiment 20000166 PARAMETER Experiment Name: At_100uM_ABA_P Parameter: Tissue Value: Aerial
  misc_feature: MA Experiment 20000166 PARAMETER Experiment Name: At_100uM_ABA_P Parameter: Treatment Value: 100uM ABA vs. No Treatment
  misc_feature: MA Experiment ID: 20000173 Result: Up-regulated in Transcription
  misc_feature: MA Experiment 20000173 PARAMETER Experiment Name: At_42deg_Heat_P Parameter: Age (day) Value: 14
  misc_feature: MA Experiment 20000173 PARAMETER Experiment Name: At_42deg_Heat_P Parameter: Organism Value: A. thaliana
  misc_feature: MA Experiment 20000173 PARAMETER Experiment Name: At_42deg_Heat_P Parameter: Plant Line Value: WS
  misc_feature: MA Experiment 20000173 PARAMETER Experiment Name: At_42deg_Heat_P Parameter: Temperature (deg C) Value: 42 vs. 22
  misc_feature: MA Experiment 20000173 PARAMETER Experiment Name: At_42deg_Heat_P Parameter: Timepoint (hr) Value: 6
  misc_feature: MA Experiment 20000173 PARAMETER Experiment Name: At_42deg_Heat_P Parameter: Tissue Value: Aerial
  misc_feature: MA Experiment ID: 20000180 Result: Up-regulated in Transcription
  misc_feature: MA Experiment 20000180 PARAMETER Experiment Name: At_Germinating_Seeds_P Parameter: Age (hr) Value: 24 vs. 0
  misc_feature: MA Experiment 20000180 PARAMETER Experiment Name: At_Germinating_Seeds_P Parameter: Tissue Value: Germinating Seeds
  misc_feature: MA Experiment ID: 20000264 Result: Up-regulated in Transcription
  misc_feature: MA Experiment 20000264 PARAMETER Experiment Name: At_Open_Flower_P Parameter: Age (day) Value: 21
  misc_feature: MA Experiment 20000264 PARAMETER Experiment Name: At_Open_Flower_P Parameter: Plant Line Value: WS
  misc_feature: MA Experiment 20000264 PARAMETER Experiment Name: At_Open_Flower_P Parameter: Tissue Value: Open Flower vs. Whole Plant
  misc_feature: MA Experiment ID: 20000267 Result: Up-regulated in Transcription
  misc_feature: MA Experiment 20000267 PARAMETER Experiment Name: At_Drought_P Parameter: Age (day) Value: 7
  misc_feature: MA Experiment 20000267 PARAMETER Experiment Name: At_Drought_P Parameter: Organism Value: A. thaliana
  misc_feature: MA Experiment 20000267 PARAMETER Experiment Name: At_Drought_P Parameter: Plant Line Value: WS
  misc_feature: MA Experiment 20000267 PARAMETER Experiment Name: At_Drought_P Parameter: Timepoint (hr) Value: 6
  misc_feature: MA Experiment 20000267 PARAMETER Experiment Name: At_Drought_P Parameter: Tissue Value: Whole Plant
  misc_feature: MA Experiment 20000267 PARAMETER Experiment Name: At_Drought_P Parameter: Treatment Value: Drought vs. No Drought
  misc_feature: MA Experiment ID: 20000436 Result: Up-regulated in Transcription
  misc_feature: MA Experiment 20000436 PARAMETER Experiment Name: At_Drought_P Parameter: Age (day) Value: 7
  misc_feature: MA Experiment 20000436 PARAMETER Experiment Name: At_Drought_P Parameter: Organism Value: A. thaliana
  misc_feature: MA Experiment 20000436 PARAMETER Experiment Name: At_Drought_P Parameter: Plant Line Value: WS
  misc_feature: MA Experiment 20000436 PARAMETER Experiment Name: At_Drought_P Parameter: Timepoint (hr) Value: 12
  misc_feature: MA Experiment 20000436 PARAMETER Experiment Name: At_Drought_P Parameter: Tissue Value: Whole Plant
  misc_feature: MA Experiment 20000436 PARAMETER Experiment Name: At_Drought_P Parameter: Treatment Value: Drought vs. No Drought
  misc_feature: MA Experiment ID: 20000437 Result: Up-regulated in Transcription
  misc_feature: MA Experiment 20000437 PARAMETER Experiment Name: At_Drought_P Parameter: Age (day) Value: 8
  misc_feature: MA Experiment 20000437 PARAMETER Experiment Name: At_Drought_P Parameter: Organism Value: A. thaliana
  misc_feature: MA Experiment 20000437 PARAMETER Experiment Name: At_Drought_P Parameter: Plant Line Value: WS
  misc_feature: MA Experiment 20000437 PARAMETER Experiment Name: At_Drought_P Parameter: Timepoint (hr) Value: 24
  misc_feature: MA Experiment 20000437 PARAMETER Experiment Name: At_Drought_P Parameter: Tissue Value: Whole Plant
  misc_feature: MA Experiment 20000437 PARAMETER Experiment Name: At_Drought_P Parameter: Treatment Value: Drought vs. No Drought
  misc_feature: MA Experiment ID: 20000438 Result: Up-regulated in Transcription
  misc_feature: MA Experiment 20000438 PARAMETER Experiment Name: At_Shoots__P Parameter: Age (day) Value: 14
  misc_feature: MA Experiment 20000438 PARAMETER Experiment Name: At_Shoots__P Parameter: Tissue Value: Shoots vs. Whole Plant
  misc_feature: MA Experiment ID: 20000573 Result: Down-regulated in Transcription
  misc_feature: MA Experiment 20000573 PARAMETER Experiment Name: At_100uM_ABA_Mutants__P Parameter: Organism Value: A. thaliana
  misc_feature: MA Experiment 20000573 PARAMETER Experiment Name: At_100uM_ABA_Mutants__P Parameter: Plant Line Value: CS22 vs. Ler wt
  misc_feature: MA Experiment 20000573 PARAMETER Experiment Name: At_100uM_ABA_Mutants__P Parameter: Timepoint (hr) Value: N/A
  misc_feature: MA Experiment 20000573 PARAMETER Experiment Name: At_100uM_ABA_Mutants__P Parameter: Tissue Value: Whole Plant
  misc_feature: MA Experiment 20000573 PARAMETER Experiment Name: At_100uM_ABA_Mutants__P Parameter: Treatment Value: None
  misc_feature: MA Experiment ID: 20000574 Result: Down-regulated in Transcription
  misc_feature: MA Experiment 20000574 PARAMETER Experiment Name: At_100uM_ABA_Mutants__P Parameter: Organism Value: A. thaliana
  misc_feature: MA Experiment 20000574 PARAMETER Experiment Name: At_100uM_ABA_Mutants__P Parameter: Plant Line Value: CS23 vs. Ler wt
  misc_feature: MA Experiment 20000574 PARAMETER Experiment Name: At_100uM_ABA_Mutants__P Parameter: Timepoint (hr) Value: N/A
  misc_feature: MA Experiment 20000574 PARAMETER Experiment Name: At_100uM_ABA_Mutants__P Parameter: Tissue Value: Whole Plant
  misc_feature: MA Experiment 20000574 PARAMETER Experiment Name: At_100uM_ABA_Mutants__P Parameter: Treatment Value: None
  misc_feature: MA Experiment ID: 20000794 Result: Up-regulated in Transcription
  misc_feature: MA Experiment 20000794 PARAMETER Experiment Name: At_Petals_P Parameter: Age (day) Value: 23-25 days
  misc_feature: MA Experiment 20000794 PARAMETER Experiment Name: At_Petals_P Parameter: Plant Line Value: WS
  misc_feature: MA Experiment 20000794 PARAMETER Experiment Name: At_Petals_P Parameter: Tissue Value: Petals vs. Whole plant
  misc_feature: MA Experiment ID: 20001248 Result: Down-regulated in Transcription
  misc_feature: MA Experiment 20001248 PARAMETER Experiment Name: At_Far-red-induction_P Parameter: Age (day) Value: 7
  misc_feature: MA Experiment 20001248 PARAMETER Experiment Name: At_Far-red-induction_P Parameter: Light Value: Far-red vs. White
  misc_feature: MA Experiment 20001248 PARAMETER Experiment Name: At_Far-red-induction_P Parameter: Organism Value: A. thaliana
  misc_feature: MA Experiment 20001248 PARAMETER Experiment Name: At_Far-red-induction_P Parameter: Plant Line Value: Columbia
  misc_feature: MA Experiment 20001248 PARAMETER Experiment Name: At_Far-red-induction_P Parameter: Timepoint (hr) Value: 4
  misc_feature: MA Experiment 20001248 PARAMETER Experiment Name: At_Far-red-induction_P Parameter: Tissue Value: Whole Plant
  misc_feature: MA Experiment ID: 20001905 Result: Up-regulated in Transcription
  misc_feature: MA Experiment 20001905 PARAMETER Experiment Name: At_Drought_Reproduction_P Parameter: Age (day) Value: 40
  misc_feature: MA Experiment 20001905 PARAMETER Experiment Name: At_Drought_Reproduction_P Parameter: Organism Value: A. thaliana
  misc_feature: MA Experiment 20001905 PARAMETER Experiment Name: At_Drought_Reproduction_P Parameter: Plant Line Value: WS
  misc_feature: MA Experiment 20001905 PARAMETER Experiment Name: At_Drought_Reproduction_P Parameter: Timepoint (day) Value: 10
  misc_feature: MA Experiment 20001905 PARAMETER Experiment Name: At_Drought_Reproduction_P Parameter: Tissue Value: Rosettes
  misc_feature: MA Experiment 20001905 PARAMETER Experiment Name: At_Drought_Reproduction_P Parameter: Treatment Value: Drought vs. No Drought
  misc_feature: MA Experiment ID: 20001911 Result: Up-regulated in Transcription
  misc_feature: MA Experiment 20001911 PARAMETER Experiment Name: At_Drought_Reproduction_P Parameter: Age (day) Value: 40
  misc_feature: MA Experiment 20001911 PARAMETER Experiment Name: At_Drought_Reproduction_P Parameter: Organism Value: A. thaliana
  misc_feature: MA Experiment 20001911 PARAMETER Experiment Name: At_Drought_Reproduction_P Parameter: Plant Line Value: WS
  misc_feature: MA Experiment 20001911 PARAMETER Experiment Name: At_Drought_Reproduction_P Parameter: Timepoint (day) Value: 10
  misc_feature: MA Experiment 20001911 PARAMETER Experiment Name: At_Drought_Reproduction_P Parameter: Tissue Value: Flowers
  misc_feature: MA Experiment 20001911 PARAMETER Experiment Name: At_Drought_Reproduction_P Parameter: Treatment Value: Drought vs. No Drought
atggattcaggttctgtgaactcatctgtcactagtctagtgtcgagtttgaacgatgagccgcatcgtgttaaattcctgtgtagcttcttagggagtatattgcctcgtcctcaggatgggaaattgaggtatgttggtggagagacgaggattgtgagtgtgaatagagatattaggtatgaggagttgatgagtaagatgagagagctttatgatggtgcagcagtgttgaagtatcagcagcctgatgaggatcttgatgctttggtctcggttgtgaatgatgatgatgtgacgaatatgatggaggagtatgataagttaggttcaggagatgggtttactaggcttaggatctttctgttttctactcctgagcaggatggttctttgcattatgtggagcgtgatgatcagagggaatctgagaggagatatgttgatgctcttaataatttgatcgaagggacagactttagaaagttgcagcagtatcctgattcacctcgtttcaatctcgttgatgatttttcgatggtggaaccgatgctgaatcagctgagcattgagactggtggtggtagccagaggggcaacgagatacctactgcgcagtatagtaatcttcaccagctcaggattcctcgtgtgggttcggggcagatgcttgcacagaggtatggtgaagtagaaggtacatggagtcctttctattctcctcggcaccatggacatcatgatcccagaacttttcaggaatttccatcttcgccttcttctgctcgttatcgaatgccatatggggaaattcctgataagggattggatagaatgcctgaggagtatgttaggccgcaagcaagtcaccatcctttttacgagcaccaggcacacattcctgacagtgtggtgtgggtcccagctggagcaatgccacctgagagtaaaggagggtttcctgggaatgttcttcacggtggtccaggtggctatgaaggtggtaatggatgcgagaactgtcgtgtaccgtatcataggaaccatcagcttttagagcaatctaatataggcaacaatggatttccaccggttcattgtgcacattgtccaccaaacagggaaagtttcctgcttaacacagacccaaagcctactcatcatggagcttatccaaatgagacttttggacctgatagaggatggatggttcaacaacaggtgaatcctaaccctccaaggattgaggaaggaaggtcacatatttctaatgttggaagaccgaacgatcattacactcccgattatcctgtgtcgaactatcctcttggtcaacgagctggacatgaaatttccaatgaagggtttcatgataaaccacttggtggcattcccctgaattcggccaaccgttctgctgaggaacgtgggtttcattatgggaataatctctatcctccaggacctgatagtatccactcagcaggtcatagccatatgcaccaccctcaaccaaatatttggcagaacgtttcaaatcctatagctggccctccaggcttgcccatgcaaattaatggcacagtcaatcagaccgttatcaggaatccgatagaaactgctcctaggtattctactggaatggagaatcaaggtgttttggttggttctccgcaaaggatttcaggctttgatggaatgtcctcccttggccagccttcctaccctaatccccatttgcaagatagagccttccctttagacccaaattgggtgccatctgaaaacccaactgtacataatgaacatctacaggtgcgtgagcctctgcctgggccattattacagacaaacctcactgctgcaccaatcatgcagacaccagttatgcagacatctgtggaaagcaagcttgctcagggaggtgaacaatttaactatgttaatactggtatttcaaacggtgttccttaccaagataagcctcaacccttagctggaggaaagaaagatatggggaacctggtagaagttaatccttctgctgctactcttgaaggggcagagctatcagttgagcgtttgagtttcttgcctgagttaatggaatctgtgaagagggcggcacttgaaggagctgctgaggttaaagctcatccagaagaggccaaagatcaagtgaggccggagttggtggaaaatgaatcagagcatatgaatgctcaagacgaacctgagatagattctgatagtgataacccaaacaatttcaagattgaacaaacaaaggctgaggctgaagctaaatccaggggactacagtctataagaaacgatgatttggaggaaatccgagagttaggccatggaacatatggatctgtttaccatggaaaatggaaaggctcagatgttgcaataaagagaataaaagccagctgctttgcaggcaaaccttcggaaagggaacgtttgatagaagatttttggaaagaagccctgttattgagctcattgcatcatccaaatgttgtgtcgttctatgggatagttcgtgatggtcctgatggttctctagcaactgtcgcggagttcatggttaacggatctttgaaacagttcttgcagaagaaggatagaactattgatcgtcgcaaaagactcatcatagccatggatactgcatttgggatggagtatttgcacggaaagaacattgttcatttcgatttgaagtgtgagaatcttcttgtgaacatgagagatcctcagcgtcctatatgcaagattggtgatttggggttatcgaaggtgaaacagaagactctagtatcaggaggtgttcgtgggactttgccatggatggcacctgagctcttgagtgggaaaagcaacatggtctctgaaaagatcgatgtttactcgtttgggattgtaatgtgggaactactcactggtgaagaaccatacgcagacatgcattgtgcttccataattggaggtatagtgaacaacgcattgcgtccaaaaatcccacagtggtgtgatccagagtggaagggattgatggaaagttgctggacgtctgagccaacagagagaccatcctttactgaaatatcacagaagctcaggacaatggctgctgctatgaatttgaaataa

SEQ ID NO: 90367 - protein, 1054 aa, Arabidopsis thaliana
  peptide (1)..(1054): Ceres Seq. ID no. 12723632
  misc_feature (38)..(125): Pfam Name: PB1 domain Pfam Description: PB1 domain
  misc_feature (724)..(1050): Homolog of NCBI NO: 15219183 NR Description: putative Ser/Thr protein kinase; protein id:
  misc_feature (23)..(270): Homolog of NCBI NO: 15219183 NR Description: putative Ser/Thr protein kinase; protein id:
  misc_feature (735)..(1050): Homolog of NCBI NO: 15219417 NR Description: hypothetical protein; protein id: At1g79570.1
  misc_feature (23)..(158): Homolog of NCBI NO: 15219417 NR Description: hypothetical protein; protein id: At1g79570.1
  misc_feature (773)..(1054): Homolog of NCBI NO: 15232679 NR Description: protein kinase - like protein; protein id:
  misc_feature (7)..(155): Homolog of NCBI NO: 15232679 NR Description: protein kinase - like protein; protein id:
  misc_feature (766)..(1050): Homolog of NCBI NO: 15226883 NR Description: putative protein kinase; protein id: At2g35050.1
  misc_feature (12)..(154): Homolog of NCBI NO: 15226883 NR Description: putative protein kinase; protein id: At2g35050.1
  misc_feature (735)..(1054): Homolog of NCBI NO: 15219796 NR Description: putative Ser/Thr protein kinase; protein id:
  misc_feature (21)..(156): Homolog of NCBI NO: 15219796 NR Description: putative Ser/Thr protein kinase; protein id:
MDSGSVNSSVTSLVSSLNDEPHRVKFLCSFLGSILPRPQDGKLRYVGGETRIVSVNRDIRYEELMSKMRELYDGAAVLKYQQPDEDLDALVSVVNDDDVTNMMEEYDKLGSGDGFTRLRIFLFSTPEQDGSLHYVERDDQRESERRYVDALNNLIEGTDFRKLQQYPDSPRFNLVDDFSMVEPMLNQLSIETGGGSQRGNEIPTAQYSNLHQLRIPRVGSGQMLAQRYGEVEGTWSPFYSPRHHGHHDPRTFQEFPSSPSSARYRMPYGEIPDKGLDRMPEEYVRPQASHHPFYEHQAHIPDSVVWVPAGAMPPESKGGFPGNVLHGGPGGYEGGNGCENCRVPYHRNHQLLEQSNIGNNGFPPVHCAHCPPNRESFLLNTDPKPTHHGAYPNETFGPDRGWMVQQQVNPNPPRIEEGRSHISNVGRPNDHYTPDYPVSNYPLGQRAGHEISNEGFHDKPLGGIPLNSANRSAEERGFHYGNNLYPPGPDSIHSAGHSHMHHPQPNIWQNVSNPIAGPPGLPMQINGTVNQTVIRNPIETAPRYSTGMENQGVLVGSPQRISGFDGMSSLGQPSYPNPHLQDRAFPLDPNWVPSENPTVHNEHLQVREPLPGPLLQTNLTAAPIMQTPVMQTSVESKLAQGGEQFNYVNTGISNGVPYQDKPQPLAGGKKDMGNLVEVNPSAATLEGAELSVERLSFLPELMESVKRAALEGAAEVKAHPEEAKDQVRPELVENESEHMNAQDEPEIDSDSDNPNNFKIEQTKAEAEAKSRGLQSIRNDDLEEIRELGHGTYGSVYHGKWKGSDVAIKRIKASCFAGKPSERERLIEDFWKEALLLSSLHHPNVVSFYGIVRDGPDGSLATVAEFMVNGSLKQFLQKKDRTIDRRKRLIIAMDTAFGMEYLHGKNIVHFDLKCENLLVNMRDPQRPICKIGDLGLSKVKQKTLVSGGVRGTLPWMAPELLSGKSNMVSEKIDVYSFGIVMWELLTGEEPYADMHCASIIGGIVNNALRPKIPQWCDPEWKGLMESCWTSEPTERPSFTEISQKLRTMAAAMNLK

SEQ ID NO: 90368 - protein, 990 aa, Arabidopsis thaliana
  peptide (1)..(990): Ceres Seq. ID no. 12723633
  misc_feature (1)..(61): Pfam Name: PB1 domain Pfam Description: PB1 domain
  misc_feature (660)..(986): Homolog of NCBI NO: 15219183 NR Description: putative Ser/Thr protein kinase; protein id:
  misc_feature (1)..(206): Homolog of NCBI NO: 15219183 NR Description: putative Ser/Thr protein kinase; protein id:
  misc_feature (671)..(986): Homolog of NCBI NO: 15219417 NR Description: hypothetical protein; protein id: At1g79570.1
  misc_feature (1)..(94): Homolog of NCBI NO: 15219417 NR Description: hypothetical protein; protein id: At1g79570.1
  misc_feature (709)..(990): Homolog of NCBI NO: 15232679 NR Description: protein kinase - like protein; protein id:
  misc_feature (1)..(91): Homolog of NCBI NO: 15232679 NR Description: protein kinase - like protein; protein id:
  misc_feature (702)..(986): Homolog of NCBI NO: 15226883 NR Description: putative protein kinase; protein id: At2g35050.1
  misc_feature (1)..(90): Homolog of NCBI NO: 15226883 NR Description: putative protein kinase; protein id: At2g35050.1
  misc_feature (671)..(990): Homolog of NCBI NO: 15219796 NR Description: putative Ser/Thr protein kinase; protein id:
  misc_feature (1)..(92): Homolog of NCBI NO: 15219796 NR Description: putative Ser/Thr protein kinase; protein id:
MSKMRELYDGAAVLKYQQPDEDLDALVSVVNDDDVTNMMEEYDKLGSGDGFTRLRIFLFSTPEQDGSLHYVERDDQRESERRYVDALNNLIEGTDFRKLQQYPDSPRFNLVDDFSMVEPMLNQLSIETGGGSQRGNEIPTAQYSNLHQLRIPRVGSGQMLAQRYGEVEGTWSPFYSPRHHGHHDPRTFQEFPSSPSSARYRMPYGEIPDKGLDRMPEEYVRPQASHHPFYEHQAHIPDSVVWVPAGAMPPESKGGFPGNVLHGGPGGYEGGNGCENCRVPYHRNHQLLEQSNIGNNGFPPVHCAHCPPNRESFLLNTDPKPTHHGAYPNETFGPDRGWMVQQQVNPNPPRIEEGRSHISNVGRPNDHYTPDYPVSNYPLGQRAGHEISNEGFHDKPLGGIPLNSANRSAEERGFHYGNNLYPPGPDSIHSAGHSHMHHPQPNIWQNVSNPIAGPPGLPMQINGTVNQTVIRNPIETAPRYSTGMENQGVLVGSPQRISGFDGMSSLGQPSYPNPHLQDRAFPLDPNWVPSENPTVHNEHLQVREPLPGPLLQTNLTAAPIMQTPVMQTSVESKLAQGGEQFNYVNTGISNGVPYQDKPQPLAGGKKDMGNLVEVNPSAATLEGAELSVERLSFLPELMESVKRAALEGAAEVKAHPEEAKDQVRPELVENESEHMNAQDEPEIDSDSDNPNNFKIEQTKAEAEAKSRGLQSIRNDDLEEIRELGHGTYGSVYHGKWKGSDVAIKRIKASCFAGKPSERERLIEDFWKEALLLSSLHHPNVVSFYGIVRDGPDGSLATVAEFMVNGSLKQFLQKKDRTIDRRKRLIIAMDTAFGMEYLHGKNIVHFDLKCENLLVNMRDPQRPICKIGDLGLSKVKQKTLVSGGVRGTLPWMAPELLSGKSNMVSEKIDVYSFGIVMWELLTGEEPYADMHCASIIGGIVNNALRPKIPQWCDPEWKGLMESCWTSEPTERPSFTEISQKLRTMAAAMNLK

SEQ ID NO: 90369 - protein, 987 aa, Arabidopsis thaliana
  peptide (1)..(987): Ceres Seq. ID no. 12723634
  misc_feature (1)..(58): Pfam Name: PB1 domain Pfam Description: PB1 domain
  misc_feature (657)..(983): Homolog of NCBI NO: 15219183 NR Description: putative Ser/Thr protein kinase; protein id:
  misc_feature (1)..(203): Homolog of NCBI NO: 15219183 NR Description: putative Ser/Thr protein kinase; protein id:
  misc_feature (668)..(983): Homolog of NCBI NO: 15219417 NR Description: hypothetical protein; protein id: At1g79570.1
  misc_feature (1)..(91): Homolog of NCBI NO: 15219417 NR Description: hypothetical protein; protein id: At1g79570.1
  misc_feature (706)..(987): Homolog of NCBI NO: 15232679 NR Description: protein kinase - like protein; protein id:
  misc_feature (1)..(88): Homolog of NCBI NO: 15232679 NR Description: protein kinase - like protein; protein id:
  misc_feature (699)..(983): Homolog of NCBI NO: 15226883 NR Description: putative protein kinase; protein id: At2g35050.1
  misc_feature (1)..(87): Homolog of NCBI NO: 15226883 NR Description: putative protein kinase; protein id: At2g35050.1
  misc_feature (668)..(987): Homolog of NCBI NO: 15219796 NR Description: putative Ser/Thr protein kinase; protein id:
  misc_feature (1)..(89): Homolog of NCBI NO: 15219796 NR Description: putative Ser/Thr protein kinase; protein id:
MRELYDGAAVLKYQQPDEDLDALVSVVNDDDVTNMMEEYDKLGSGDGFTRLRIFLFSTPEQDGSLHYVERDDQRESERRYVDALNNLIEGTDFRKLQQYPDSPRFNLVDDFSMVEPMLNQLSIETGGGSQRGNEIPTAQYSNLHQLRIPRVGSGQMLAQRYGEVEGTWSPFYSPRHHGHHDPRTFQEFPSSPSSARYRMPYGEIPDKGLDRMPEEYVRPQASHHPFYEHQAHIPDSVVWVPAGAMPPESKGGFPGNVLHGGPGGYEGGNGCENCRVPYHRNHQLLEQSNIGNNGFPPVHCAHCPPNRESFLLNTDPKPTHHGAYPNETFGPDRGWMVQQQVNPNPPRIEEGRSHISNVGRPNDHYTPDYPVSNYPLGQRAGHEISNEGFHDKPLGGIPLNSANRSAEERGFHYGNNLYPPGPDSIHSAGHSHMHHPQPNIWQNVSNPIAGPPGLPMQINGTVNQTVIRNPIETAPRYSTGMENQGVLVGSPQRISGFDGMSSLGQPSYPNPHLQDRAFPLDPNWVPSENPTVHNEHLQVREPLPGPLLQTNLTAAPIMQTPVMQTSVESKLAQGGEQFNYVNTGISNGVPYQDKPQPLAGGKKDMGNLVEVNPSAATLEGAELSVERLSFLPELMESVKRAALEGAAEVKAHPEEAKDQVRPELVENESEHMNAQDEPEIDSDSDNPNNFKIEQTKAEAEAKSRGLQSIRNDDLEEIRELGHGTYGSVYHGKWKGSDVAIKRIKASCFAGKPSERERLIEDFWKEALLLSSLHHPNVVSFYGIVRDGPDGSLATVAEFMVNGSLKQFLQKKDRTIDRRKRLIIAMDTAFGMEYLHGKNIVHFDLKCENLLVNMRDPQRPICKIGDLGLSKVKQKTLVSGGVRGTLPWMAPELLSGKSNMVSEKIDVYSFGIVMWELLTGEEPYADMHCASIIGGIVNNALRPKIPQWCDPEWKGLMESCWTSEPTERPSFTEISQKLRTMAAAMNLK

SEQ ID NO: 90370 - DNA, 1179 bp, Arabidopsis thaliana
  misc_feature (1)..(1179): Ceres Seq. ID no. 12723635
  misc_feature: MA Experiment ID: 20000184 Result: Up-regulated in Transcription
  misc_feature: MA Experiment 20000184 PARAMETER Experiment Name: At_Shoots__P Parameter: Age (day) Value: 7
  misc_feature: MA Experiment 20000184 PARAMETER Experiment Name: At_Shoots__P Parameter: Tissue Value: Shoots vs. Whole Plant
  misc_feature: MA Experiment ID: 20000438 Result: Up-regulated in Transcription
  misc_feature: MA Experiment 20000438 PARAMETER Experiment Name: At_Shoots__P Parameter: Age (day) Value: 14
  misc_feature: MA Experiment 20000438 PARAMETER Experiment Name: At_Shoots__P Parameter: Tissue Value: Shoots vs. Whole Plant
  misc_feature: MA Experiment ID: 20000439 Result: Up-regulated in Transcription
  misc_feature: MA Experiment 20000439 PARAMETER Experiment Name: At_Roots__P Parameter: Age (day) Value: 14 vs. 21
  misc_feature: MA Experiment 20000439 PARAMETER Experiment Name: At_Roots__P Parameter: Organism Value: A. thaliana
  misc_feature: MA Experiment 20000439 PARAMETER Experiment Name: At_Roots__P Parameter: Tissue Value: Roots vs. Whole Plant
atgggaagagctccatgctgcgacaaggcaaacgtgaagaaaggaccatggtcaccggaagaagatgtgaagctcaaggattacatcgacaaatatggcactggtggcaactggatcgcactgcctcagaaaattgggctgaagagatgtggtaagagttgcagactgagatggcttaattacttaagaccaaacatcaaacatggtggtttttctgaggaagaagatagaatcatcttgagtctctacattagcattggaagccggtggtccataattgcagctcagcttcctggaaggactgacaatgatatcaagaattattggaacacaaaactgaagaagaaacttctaggaagacagaaacaaatgaatcgtcaagactccataaccgattctactgagaacaacctcagcaacaataacaacaataagagtcctcagaatctgagcaattcggcactggagaggctccagcttcacatgcagcttcagaatctacagagccctttctctagtttctacaacaaccctatcttgtggcccaagcttcatccattgctccagagcactacaactaatcaaaaccctaagcttgcatctcaagaaagcttccaccctttaggagttaacgttgatcatcagcacaacaataccaagctagctcagataaacaatggagcctcttctctctattcggagaacgtagagcaatcccaaaaccctgctcatgaatttcaacctaatttcggtttttcacaggaccttcgattagataatcataacatggactttatgaacagaggggtttctaaagaactgtttcaagtgggcaacgagtttgagctaacgaacggttcgagttggtggtcagaggaagtggaactagagaggaaaacgacgtcgtcgagttcttgggggtcagcttctgtgcttgatcagacaactgagggaatggttatgcttcaagattacgctcagatgagctaccacagtgtttaataagttatatcatgcatatatataaatgcgtaactatagggatggataatggattattgatggaatatgtattttattacggtcataagcttatagcatgttgatggtgaaaggggctttttcataatttgttttaaaatgtaacgagttgtggataataatgtaaatcgttaattc

SEQ ID NO: 90371 - protein, 333 aa, Arabidopsis thaliana
  peptide (1)..(333): Ceres Seq. ID no. 12723636
  misc_feature (14)..(62): Pfam Name: Myb-like DNA-binding domain Pfam Description: Myb-like DNA-binding domain
  misc_feature (1)..(333): Homolog of NCBI NO: 15242793 NR Description: myb family transcription factor; protein id: supported by cDNA: gi_3941447 [Arabidopsis thaliana]
  misc_feature (1)..(333): Homolog of NCBI NO: 11358686 NR Description: probable transcription factor MYB36 [imported] - thaliana >gi|3941448|gb|AAC83600.1| putative transcription factor
  misc_feature (1)..(239): Homolog of NCBI NO: 40253739 NR Description: putative P-type R2R3 Myb protein [Oryza sativa
  misc_feature (1)..(288): Homolog of NCBI NO: 18419456 NR Description: blind [Lycopersicon esculentum]
  misc_feature (1)..(127): Homolog of NCBI NO: 19073324 NR Description: typical P-type R2R3 Myb protein [Sorghum bicolor]
  misc_feature (1)..(127): Homolog of NCBI NO: 33773103 NR Description: P-type R2R3 Myb protein [Sorghum bicolor]
  misc_feature (1)..(123): Homolog of NCBI NO: 11273952 NR Description: myb-related transcription factor MYB68 [imported] Arabidopsis thaliana >gi|3941494|gb|AAC83623.1| putative
  misc_feature (1)..(123): Homolog of NCBI NO: 15239158 NR Description: myb DNA-binding protein (MYB68); protein id: supported by cDNA: gi_3941493 [Arabidopsis thaliana]
  misc_feature (1)..(312): Homolog of NCBI NO: 15229192 NR Description: myb family transcription factor(AtMYB84); protein
  misc_feature (1)..(157): Homolog of NCBI NO: 2832408 NR Description: R2R3-MYB transcription factor [Arabidopsis
MGRAPCCDKANVKKGPWSPEEDVKLKDYIDKYGTGGNWIALPQKIGLKRCGKSCRLRWLNYLRPNIKHGGFSEEEDRIILSLYISIGSRWSIIAAQLPGRTDNDIKNYWNTKLKKKLLGRQKQMNRQDSITDSTENNLSNNNNNKSPQNLSNSALERLQLHMQLQNLQSPFSSFYNNPILWPKLHPLLQSTTTNQNPKLASQESFHPLGVNVDHQHNNTKLAQINNGASSLYSENVEQSQNPAHEFQPNFGFSQDLRLDNHNMDFMNRGVSKELFQVGNEFELTNGSSWWSEEVELERKTTSSSSWGSASVLDQTTEGMVMLQDYAQMSYHSV

SEQ ID NO: 90372 - protein, 210 aa, Arabidopsis thaliana
  peptide (1)..(210): Ceres Seq. ID no. 12723637
  misc_feature (1)..(210): Homolog of NCBI NO: 15242793 NR Description: myb family transcription factor; protein id: supported by cDNA: gi_3941447 [Arabidopsis thaliana]
  misc_feature (1)..(210): Homolog of NCBI NO: 11358686 NR Description: probable transcription factor MYB36 [imported] - thaliana >gi|3941448|gb|AAC83600.1| putative transcription factor
  misc_feature (1)..(116): Homolog of NCBI NO: 40253739 NR Description: putative P-type R2R3 Myb protein [Oryza sativa
  misc_feature (1)..(165): Homolog of NCBI NO: 18419456 NR Description: blind [Lycopersicon esculentum]
  misc_feature (1)..(189): Homolog of NCBI NO: 15229192 NR Description: myb family transcription factor(AtMYB84); protein
  misc_feature (1)..(34): Homolog of NCBI NO: 2832408 NR Description: R2R3-MYB transcription factor [Arabidopsis
  misc_feature (1)..(32): Homolog of NCBI NO: 15228049 NR Description: light-regulated myb protein, putative; protein At2g36890.1 [Arabidopsis thaliana] >gi|25294087|pir||H84785
  misc_feature (1)..(31): Homolog of NCBI NO: 15237193 NR Description: myb family transcription factor; protein id:
  misc_feature (1)..(126): Homolog of NCBI NO: 30575840 NR Description: MYB1 [Boea crassifolia]
  misc_feature (1)..(127): Homolog of NCBI NO: 15234593 NR Description: myb DNA-binding protein; protein id: At4g05100.1,
MNRQDSITDSTENNLSNNNNNKSPQNLSNSALERLQLHMQLQNLQSPFSSFYNNPILWPKLHPLLQSTTTNQNPKLASQESFHPLGVNVDHQHNNTKLAQINNGASSLYSENVEQSQNPAHEFQPNFGFSQDLRLDNHNMDFMNRGVSKELFQVGNEFELTNGSSWWSEEVELERKTTSSSSWGSASVLDQTTEGMVMLQDYAQMSYHSV

SEQ ID NO: 90373 - protein, 172 aa, Arabidopsis thaliana
  peptide (1)..(172): Ceres Seq. ID no. 12723638
  misc_feature (1)..(172): Homolog of NCBI NO: 15242793 NR Description: myb family transcription factor; protein id: supported by cDNA: gi_3941447 [Arabidopsis thaliana]
  misc_feature (1)..(172): Homolog of NCBI NO: 11358686 NR Description: probable transcription factor MYB36 [imported] - thaliana >gi|3941448|gb|AAC83600.1| putative transcription factor
  misc_feature (1)..(78): Homolog of NCBI NO: 40253739 NR Description: putative P-type R2R3 Myb protein [Oryza sativa
  misc_feature (1)..(127): Homolog of NCBI NO: 18419456 NR Description: blind [Lycopersicon esculentum]
  misc_feature (1)..(151): Homolog of NCBI NO: 15229192 NR Description: myb family transcription factor(AtMYB84); protein
  misc_feature (1)..(88): Homolog of NCBI NO: 30575840 NR Description: MYB1 [Boea crassifolia]
  misc_feature (1)..(89): Homolog of NCBI NO: 15234593 NR Description: myb DNA-binding protein; protein id: At4g05100.1,
  misc_feature (1)..(84): Homolog of NCBI NO: 15228529 NR Description: myb family transcription factor; protein id: supported by cDNA: 33139., supported by cDNA: gi_19698862, by cDNA: gi_3941437, supported by cDNA: gi_9965736 [Arabidopsis
  misc_feature (1)..(84): Homolog of NCBI NO: 21592842 NR Description: MYB family transcription factor (hsr1), putative
  misc_feature (1)..(62): Homolog of NCBI NO: 15228203 NR Description: putative transcription factor MYB94; protein id:
MQLQNLQSPFSSFYNNPILWPKLHPLLQSTTTNQNPKLASQESFHPLGVNVDHQHNNTKLAQINNGASSLYSENVEQSQNPAHEFQPNFGFSQDLRLDNHNMDFMNRGVSKELFQVGNEFELTNGSSWWSEEVELERKTTSSSSWGSASVLDQTTEGMVMLQDYAQMSYHSV

SEQ ID NO: 90374 - DNA, 1251 bp, Arabidopsis thaliana
  misc_feature (1)..(1251): Ceres Seq. ID no. 12723643
  misc_feature: MA Experiment ID: 20000235 Result: Up-regulated in Transcription
  misc_feature: MA Experiment 20000235 PARAMETER Experiment Name: At_Siliques_P Parameter: Age (day) Value: 21
  misc_feature: MA Experiment 20000235 PARAMETER Experiment Name: At_Siliques_P Parameter: Organism Value: A. thaliana
  misc_feature: MA Experiment 20000235 PARAMETER Experiment Name: At_Siliques_P Parameter: Plant Line Value: WS
  misc_feature: MA Experiment 20000235 PARAMETER Experiment Name: At_Siliques_P Parameter: Tissue Value: 5-10mm Siliques vs. Whole Plant
  misc_feature: MA Experiment ID: 20001450 Result: Up-regulated in Transcription
  misc_feature: MA Experiment 20001450 PARAMETER Experiment Name: At_Far-red-induction_P Parameter: Age (day) Value: 7
  misc_feature: MA Experiment 20001450 PARAMETER Experiment Name: At_Far-red-induction_P Parameter: Light Value: Far-red vs. White
  misc_feature: MA Experiment 20001450 PARAMETER Experiment Name: At_Far-red-induction_P Parameter: Organism Value: A. thaliana
  misc_feature: MA Experiment 20001450 PARAMETER Experiment Name: At_Far-red-induction_P Parameter: Plant Line Value: Columbia
  misc_feature: MA Experiment 20001450 PARAMETER Experiment Name: At_Far-red-induction_P Parameter: Timepoint (hr) Value: 8
  misc_feature: MA Experiment 20001450 PARAMETER Experiment Name: At_Far-red-induction_P Parameter: Tissue Value: Whole Plant
atgtttttcttagacataaatagtgagaagtattcaccacgtagtgtactaaacactttatcaagagattcacttagctcttcaggcgatgatgcttcaagcttcaatggttcaatggtctcttctagcttcgcttcgccttcagacaaaccgaagcataagtcaatctctccttacaaattcatatcttctcttatcatgaattctcctctgaggaaatggagaggaagtgagactaagaacaagcccaaacctcagcctctaattcaatgcttcacttacaacgagatttcaaaggccacaaatgattttcaccaagggaatatagtaggcataggaggctactctgaagtgtacagaggagatttatgggatggaagaagaatagcagtgaagagattagccaaggagagtggtgacatgaacaaggagaaagagtttcttacggaacttggcatcataagtcatgtctctcatcccaacactgctcttctcttaggttgttgtgttgagaaaggtctttatcttgtcttcagattctccgagaatggaaccttgtactctgcgctgcacgagaatgagaatgggtcgttagattggcctgtacggtacaaaattgcggttggagttgctcgagggcttcattatcttcacaaacgctgcaaccaccggatcattcaccgcgacattaaatcttccaatgttttacttggacctgattacgaaccgcagataactgattttggattggccaaatggttgcctaacaaatggactcaccatgcggttataccggttgaaggaacgtttggttatctagctccagagtccttaatgcaaggaaccatcgacgagaaaaccgacatctacgcattcggcattctccttctagagatcataactggtcgaagaccggttaatcccactcagaaacacattctcttatgggcaaagccggcgatggagacaggtaacacaagtgagttggttgatccgaaattgcaagataagtacgacgaccaacagatgaacaagctagtccttacagcttcacattgtgttcaacaatctccgatattacgaccaaccatgactcaggtattggagttgcttacaaatgggaacgaggctgagattgcaaagagctggagaatgcctaaggatatgactaatgacgatgatgataataatgaatgggatgattattctatgattttcggatatgatgttccttcagattcttctttttaa

SEQ ID NO: 90375 - protein, 416 aa, Arabidopsis thaliana
  peptide (1)..(416): Ceres Seq. ID no. 12723644
  misc_feature (1)..(416): Homolog of NCBI NO: 15242821 NR Description: putative protein; protein id: At5g57670.1 thaliana] >gi|9759263|dbj|BAB09584.1| contains similarity to
  misc_feature (76)..(395): Homolog of NCBI NO: 40253745 NR Description: SERK1 protein-like [Oryza sativa (japonica
  misc_feature (86)..(388): Homolog of NCBI NO: 15224251 NR Description: putative protein kinase; protein id: At2g18890.1
  misc_feature (83)..(367): Homolog of NCBI NO: 38343967 NR Description: OSJNBb0022F16.6 [Oryza sativa (japonica
  misc_feature (86)..(381): Homolog of NCBI NO: 30687061 NR Description: protein kinase family [Arabidopsis thaliana] putative protein kinase [Arabidopsis thaliana]
  misc_feature (86)..(376): Homolog of NCBI NO: 22330852 NR Description: putative serine/threonine protein kinase; protein At3g05140.1, supported by cDNA: gi_19698986 [Arabidopsis >gi|19698987|gb|AAL91229.1| putative serine/threonine protein
  misc_feature (86)..(376): Homolog of NCBI NO: 26452369 NR Description: unknown protein [Arabidopsis thaliana]
  misc_feature (86)..(376): Homolog of NCBI NO: 30698132 NR Description: protein kinase, putative [Arabidopsis thaliana]
  misc_feature (92)..(375): Homolog of NCBI NO: 15239245 NR Description: serine/threonine protein kinase-like; protein id: [Arabidopsis thaliana] >gi|9758799|dbj|BAB09252.1|
  misc_feature (86)..(371): Homolog of NCBI NO: 15810235 NR Description: putative Pto kinase interactor [Arabidopsis
MFFLDINSEKYSPRSVLNTLSRDSLSSSGDDASSFNGSMVSSSFASPSDKPKHKSISPYKFISSLIMNSPLRKWRGSETKNKPKPQPLIQCFTYNEISKATNDFHQGNIVGIGGYSEVYRGDLWDGRRIAVKRLAKESGDMNKEKEFLTELGIISHVSHPNTALLLGCCVEKGLYLVFRFSENGTLYSALHENENGSLDWPVRYKIAVGVARGLHYLHKRCNHRIIHRDIKSSNVLLGPDYEPQITDFGLAKWLPNKWTHHAVIPVEGTFGYLAPESLMQGTIDEKTDIYAFGILLLEIITGRRPVNPTQKHILLWAKPAMETGNTSELVDPKLQDKYDDQQMNKLVLTASHCVQQSPILRPTMTQVLELLTNGNEAEIAKSWRMPKDMTNDDDDNNEWDDYSMIFGYDVPSDSSF

SEQ ID NO: 90376 - protein, 378 aa, Arabidopsis thaliana
  peptide (1)..(378): Ceres Seq. ID no. 12723645
  misc_feature (1)..(378): Homolog of NCBI NO: 15242821 NR Description: putative protein; protein id: At5g57670.1 thaliana] >gi|9759263|dbj|BAB09584.1| contains similarity to
  misc_feature (38)..(357): Homolog of NCBI NO: 40253745 NR Description: SERK1 protein-like [Oryza sativa (japonica
  misc_feature (48)..(350): Homolog of NCBI NO: 15224251 NR Description: putative protein kinase; protein id: At2g18890.1
  misc_feature (45)..(329): Homolog of NCBI NO: 38343967 NR Description: OSJNBb0022F16.6 [Oryza sativa (japonica
  misc_feature (48)..(343): Homolog of NCBI NO: 30687061 NR Description: protein kinase family [Arabidopsis thaliana] putative protein kinase [Arabidopsis thaliana]
  misc_feature (48)..(338): Homolog of NCBI NO: 22330852 NR Description: putative serine/threonine protein kinase; protein At3g05140.1, supported by cDNA: gi_19698986 [Arabidopsis >gi|19698987|gb|AAL91229.1| putative serine/threonine protein
  misc_feature (48)..(338): Homolog of NCBI NO: 26452369 NR Description: unknown protein [Arabidopsis thaliana]
  misc_feature (48)..(338): Homolog of NCBI NO: 30698132 NR Description: protein kinase, putative [Arabidopsis thaliana]
  misc_feature (54)..(337): Homolog of NCBI NO: 15239245 NR Description: serine/threonine protein kinase-like; protein id: [Arabidopsis thaliana] >gi|9758799|dbj|BAB09252.1|
  misc_feature (48)..(333): Homolog of NCBI NO: 15810235 NR Description: putative Pto kinase interactor [Arabidopsis
MVSSSFASPSDKPKHKSISPYKFISSLIMNSPLRKWRGSETKNKPKPQPLIQCFTYNEISKATNDFHQGNIVGIGGYSEVYRGDLWDGRRIAVKRLAKESGDMNKEKEFLTELGIISHVSHPNTALLLGCCVEKGLYLVFRFSENGTLYSALHENENGSLDWPVRYKIAVGVARGLHYLHKRCNHRIIHRDIKSSNVLLGPDYEPQITDFGLAKWLPNKWTHHAVIPVEGTFGYLAPESLMQGTIDEKTDIYAFGILLLEIITGRRPVNPTQKHILLWAKPAMETGNTSELVDPKLQDKYDDQQMNKLVLTASHCVQQSPILRPTMTQVLELLTNGNEAEIAKSWRMPKDMTNDDDDNNEWDDYSMIFGYDVPSDSSF

SEQ ID NO: 90377 - protein, 350 aa, Arabidopsis thaliana
  peptide (1)..(350): Ceres Seq. ID no. 12723646
  misc_feature (1)..(350): Homolog of NCBI NO: 15242821 NR Description: putative protein; protein id: At5g57670.1 thaliana] >gi|9759263|dbj|BAB09584.1| contains similarity to
  misc_feature (10)..(329): Homolog of NCBI NO: 40253745 NR Description: SERK1 protein-like [Oryza sativa (japonica
  misc_feature (20)..(322): Homolog of NCBI NO: 15224251 NR Description: putative protein kinase; protein id: At2g18890.1
  misc_feature (17)..(301): Homolog of NCBI NO: 38343967 NR Description: OSJNBb0022F16.6 [Oryza sativa (japonica
  misc_feature (20)..(315): Homolog of NCBI NO: 30687061 NR Description: protein kinase family [Arabidopsis thaliana] putative protein kinase [Arabidopsis thaliana]
  misc_feature (20)..(310): Homolog of NCBI NO: 22330852 NR Description: putative serine/threonine protein kinase; protein At3g05140.1, supported by cDNA: gi_19698986 [Arabidopsis >gi|19698987|gb|AAL91229.1| putative serine/threonine protein
  misc_feature (20)..(310): Homolog of NCBI NO: 26452369 NR Description: unknown protein [Arabidopsis thaliana]
  misc_feature (20)..(310): Homolog of NCBI NO: 30698132 NR Description: protein kinase, putative [Arabidopsis thaliana]
  misc_feature (26)..(309): Homolog of NCBI NO: 15239245 NR Description: serine/threonine protein kinase-like; protein id: [Arabidopsis thaliana] >gi|9758799|dbj|BAB09252.1|
  misc_feature (20)..(305): Homolog of NCBI NO: 15810235 NR Description: putative Pto kinase interactor [Arabidopsis
MNSPLRKWRGSETKNKPKPQPLIQCFTYNEISKATNDFHQGNIVGIGGYSEVYRGDLWDGRRIAVKRLAKESGDMNKEKEFLTELGIISHVSHPNTALLLGCCVEKGLYLVFRFSENGTLYSALHENENGSLDWPVRYKIAVGVARGLHYLHKRCNHRIIHRDIKSSNVLLGPDYEPQITDFGLAKWLPNKWTHHAVIPVEGTFGYLAPESLMQGTIDEKTDIYAFGILLLEIITGRRPVNPTQKHILLWAKPAMETGNTSELVDPKLQDKYDDQQMNKLVLTASHCVQQSPILRPTMTQVLELLTNGNEAEIAKSWRMPKDMTNDDDDNNEWDDYSMIFGYDVPSDSSF

SEQ ID NO: 90378 - DNA, 1499 bp, Arabidopsis thaliana
  misc_feature (1)..(1499): Ceres Seq. ID no. 12723660
  misc_feature: MA Experiment ID: 20000185 Result: Up-regulated in Transcription
  misc_feature: MA Experiment 20000185 PARAMETER Experiment Name: At_Roots__P Parameter: Age (day) Value: 7 vs. 21
  misc_feature: MA Experiment 20000185 PARAMETER Experiment Name: At_Roots__P Parameter: Organism Value: A. thaliana
  misc_feature: MA Experiment 20000185 PARAMETER Experiment Name: At_Roots__P Parameter: Tissue Value: Roots vs. Whole Plant
  misc_feature: MA Experiment ID: 20000264 Result: Up-regulated in Transcription
  misc_feature: MA Experiment 20000264 PARAMETER Experiment Name: At_Open_Flower_P Parameter: Age (day) Value: 21
  misc_feature: MA Experiment 20000264 PARAMETER Experiment Name: At_Open_Flower_P Parameter: Plant Line Value: WS
  misc_feature: MA Experiment 20000264 PARAMETER Experiment Name: At_Open_Flower_P Parameter: Tissue Value: Open Flower vs. Whole Plant
  misc_feature: MA Experiment ID: 20000286 Result: Up-regulated in Transcription
  misc_feature: MA Experiment 20000286 PARAMETER Experiment Name: At_Open_Flower_P Parameter: Age (day) Value: 21
  misc_feature: MA Experiment 20000286 PARAMETER Experiment Name: At_Open_Flower_P Parameter: Plant Line Value: WS
  misc_feature: MA Experiment 20000286 PARAMETER Experiment Name: At_Open_Flower_P Parameter: Tissue Value: Half Open vs. Whole Plant
  misc_feature: MA Experiment ID: 20000439 Result: Up-regulated in Transcription
  misc_feature: MA Experiment 20000439 PARAMETER Experiment Name: At_Roots__P Parameter: Age (day) Value: 14 vs. 21
  misc_feature: MA Experiment 20000439 PARAMETER Experiment Name: At_Roots__P Parameter: Organism Value: A. thaliana
  misc_feature: MA Experiment 20000439 PARAMETER Experiment Name: At_Roots__P Parameter: Tissue Value: Roots vs. Whole Plant
  misc_feature: MA Experiment ID: 20000495 Result: Up-regulated in Transcription
  misc_feature: MA Experiment 20000495 PARAMETER Experiment Name: At_Guard_Cells_P Parameter: Harvest Date Value: 8/2/2002
  misc_feature: MA Experiment 20000495 PARAMETER Experiment Name: At_Guard_Cells_P Parameter: Organism Value: A. thaliana
  misc_feature: MA Experiment 20000495 PARAMETER Experiment Name: At_Guard_Cells_P Parameter: Tissue Value: Guard Cells vs. Leaves
  misc_feature: MA Experiment ID: 20000794 Result: Up-regulated in Transcription
  misc_feature: MA Experiment 20000794 PARAMETER Experiment Name: At_Petals_P Parameter: Age (day) Value: 23-25 days
  misc_feature: MA Experiment 20000794 PARAMETER Experiment Name: At_Petals_P Parameter: Plant Line Value: WS
  misc_feature: MA Experiment 20000794 PARAMETER Experiment Name: At_Petals_P Parameter: Tissue Value: Petals vs. Whole plant
attgccttttagtgatcgtggatcaaatgaagattcgggtgaagcaagctacgatcgtgaagccagctgaagaaacacccacacacaatctatggctttccaatttagacttgattcaagtgagacttcacatgggcactctctacttctacaaaccttgttcctcctccgatcgtcccaacactcaatccctcatcgaagctctgagcaaggttcttgtcttcttttatcctgccgctgggagactccaaaagaatacgaatgggaggttagaggttcaatgtaatggagaaggagttttgtttgtagaggctgaaagtgattctactgttcaagacattggcttactcactcaaagtttggatctttctcaacttgtacctaccgttgactatgcaggagatatctcctcctatcctcttcttctctttcaggttacttatttcaaatgtggaacgatctgtgttggaagttcaatacaccatacattcggagaagctacttctcttgggtatatcatggaagcatggtctctaactgctaggggacttttagttaagctaacaccgttcttagaccgcactgttcttcatgcacgtaaccctccctcctctgtttttccgcacactgagtaccaatcacccccatttcacaatcatccgatgaaatccctggcttacagatcaaatccggaatctgattctgctattgccactctcaagctcacacgtctccaactgaaagctcttaaagctagggcagagattgctgatagtaagttcagtacatatgaagttctggtggcgcatacctggcgttgtgcttcttttgcaaatgaagacttaagtgaagaacattcgacgaggttgcatataataattgatgggaggccgagactacaaccaaagcttccgcaaggatacattgggaacactctctttcacgctcgaccggtatcaccgttgggtgctttccacagagagagtttcagtgaaacagtggagagagttcatagagaaataaggaaaatggacaacgagtacttgagatcagcgattgactacttggagagacatcctgatctcgaccaattagttcctggtgaaggtaatacaatcttcagctgcgcagcaaacttctgcatcgtcagtctaatcaaacagaccgcgtacgaaatggatttcggatggggaaaagcttactacaagagagcttcacatttaaatgaagggaagggatttgtaactgggaacccagacgaagaagggagcatgatgctaaccatgtgcttgaagaagactcagcttagtaagtttcgaaagctattttatgagtttctcaatgtctccgcactgtgagacaatcagaagccttattttttacttttcacaagtcccacatcgttaacttaaaattgtactagcatttggccctgctatgcagggacaacattgttttaaattatatctgctacaactcttaactaagatttttaaaat

SEQ ID NO: 90379 - protein, 451 aa, Arabidopsis thaliana
  peptide (1)..(451): Ceres Seq. ID no. 12723661
  misc_feature (9)..(445): Pfam Name: Transferase family Pfam Description: Transferase family
  misc_feature (9)..(451): Homolog of NCBI NO: 15242883 NR Description: N-hydroxycinnamoyl/benzoyltransferase; protein At5g57840.1, supported by cDNA: gi_15294251 [Arabidopsis
  misc_feature (7)..(445): Homolog of NCBI NO: 6469032 NR Description: N-hydroxycinnamoyl/benzoyltransferase [Ipomoea
  misc_feature (9)..(445): Homolog of NCBI NO: 40644899 NR Description: hydroxycinnamoyl CoA quinate transferase
  misc_feature (9)..(444): Homolog of NCBI NO: 40644084 NR Description: hydroxycinnamoyl CoA quinate transferase
  misc_feature (9)..(445): Homolog of NCBI NO: 27475616 NR Description: hydroxycinnamoyl transferase [Nicotiana tabacum]
  misc_feature (9)..(444): Homolog of NCBI NO: 15239747 NR Description: anthranilate N-benzoyltransferase; protein id: supported by cDNA: 114130. [Arabidopsis thaliana]
  misc_feature (9)..(444): Homolog of NCBI NO: 21536883 NR Description: anthranilate N-benzoyltransferase [Arabidopsis
  misc_feature (9)..(444): Homolog of NCBI NO: 38345030 NR Description: OSJNBa0029H02.14 [Oryza sativa (japonica
  misc_feature (9)..(445): Homolog of NCBI NO: 7484689 NR Description: anthranilate N-benzoyltransferase (EC 2.3.1.144)
  misc_feature (9)..(445): Homolog of NCBI NO: 7484692 NR Description: anthranilate N-benzoyltransferase (EC 2.3.1.144)
CLLVIVDQMKIRVKQATIVKPAEETPTHNLWLSNLDLIQVRLHMGTLYFYKPCSSSDRPNTQSLIEALSKVLVFFYPAAGRLQKNTNGRLEVQCNGEGVLFVEAESDSTVQDIGLLTQSLDLSQLVPTVDYAGDISSYPLLLFQVTYFKCGTICVGSSIHHTFGEATSLGYIMEAWSLTARGLLVKLTPFLDRTVLHARNPPSSVFPHTEYQSPPFHNHPMKSLAYRSNPESDSAIATLKLTRLQLKALKARAEIADSKFSTYEVLVAHTWRCASFANEDLSEEHSTRLHIIIDGRPRLQPKLPQGYIGNTLFHARPVSPLGAFHRESFSETVERVHREIRKMDNEYLRSAIDYLERHPDLDQLVPGEGNTIFSCAANFCIVSLIKQTAYEMDFGWGKAYYKRASHLNEGKGFVTGNPDEEGSMMLTMCLKKTQLSKFRKLFYEFLNVSAL

SEQ ID NO: 90380 - protein, 443 aa, Arabidopsis thaliana
  peptide (1)..(443): Ceres Seq. ID no. 12723662
  misc_feature (1)..(437): Pfam Name: Transferase family Pfam Description: Transferase family
  misc_feature (1)..(443): Homolog of NCBI NO: 15242883 NR Description: N-hydroxycinnamoyl/benzoyltransferase; protein At5g57840.1, supported by cDNA: gi_15294251 [Arabidopsis
  misc_feature (1)..(437): Homolog of NCBI NO: 6469032 NR Description: N-hydroxycinnamoyl/benzoyltransferase [Ipomoea
  misc_feature (1)..(437): Homolog of NCBI NO: 40644899 NR Description: hydroxycinnamoyl CoA quinate transferase
  misc_feature (1)..(436): Homolog of NCBI NO: 40644084 NR Description: hydroxycinnamoyl CoA quinate transferase
  misc_feature (1)..(437): Homolog of NCBI NO: 27475616 NR Description: hydroxycinnamoyl transferase [Nicotiana tabacum]
  misc_feature (1)..(436): Homolog of NCBI NO: 15239747 NR Description: anthranilate N-benzoyltransferase; protein id: supported by cDNA: 114130. [Arabidopsis thaliana]
  misc_feature (1)..(436): Homolog of NCBI NO: 21536883 NR Description: anthranilate N-benzoyltransferase [Arabidopsis
  misc_feature (1)..(436): Homolog of NCBI NO: 38345030 NR Description: OSJNBa0029H02.14 [Oryza sativa (japonica
  misc_feature (1)..(437): Homolog of NCBI NO: 7484689 NR Description: anthranilate N-benzoyltransferase (EC 2.3.1.144)
  misc_feature (1)..(437): Homolog of NCBI NO: 7484692 NR Description: anthranilate N-benzoyltransferase (EC 2.3.1.144)
MKIRVKQATIVKPAEETPTHNLWLSNLDLIQVRLHMGTLYFYKPCSSSDRPNTQSLIEALSKVLVFFYPAAGRLQKNTNGRLEVQCNGEGVLFVEAESDSTVQDIGLLTQSLDLSQLVPTVDYAGDISSYPLLLFQVTYFKCGTICVGSSIHHTFGEATSLGYIMEAWSLTARGLLVKLTPFLDRTVLHARNPPSSVFPHTEYQSPPFHNHPMKSLAYRSNPESDSAIATLKLTRLQLKALKARAEIADSKFSTYEVLVAHTWRCASFANEDLSEEHSTRLHIIIDGRPRLQPKLPQGYIGNTLFHARPVSPLGAFHRESFSETVERVHREIRKMDNEYLRSAIDYLERHPDLDQLVPGEGNTIFSCAANFCIVSLIKQTAYEMDFGWGKAYYKRASHLNEGKGFVTGNPDEEGSMMLTMCLKKTQLSKFRKLFYEFLNVSAL

SEQ ID NO: 90381 - protein, 408 aa, Arabidopsis thaliana
  peptide (1)..(408): Ceres Seq. ID no. 12723663
  misc_feature (1)..(402): Pfam Name: Transferase family Pfam Description: Transferase family
  misc_feature (1)..(408): Homolog of NCBI NO: 15242883 NR Description: N-hydroxycinnamoyl/benzoyltransferase; protein At5g57840.1, supported by cDNA: gi_15294251 [Arabidopsis
  misc_feature (1)..(402): Homolog of NCBI NO: 6469032 NR Description: N-hydroxycinnamoyl/benzoyltransferase [Ipomoea
  misc_feature (1)..(402): Homolog of NCBI NO: 40644899 NR Description: hydroxycinnamoyl CoA quinate transferase
  misc_feature (1)..(401): Homolog of NCBI NO: 40644084 NR Description: hydroxycinnamoyl CoA quinate transferase
  misc_feature (1)..(402): Homolog of NCBI NO: 27475616 NR Description: hydroxycinnamoyl transferase [Nicotiana tabacum]
  misc_feature (1)..(401): Homolog of NCBI NO: 15239747 NR Description: anthranilate N-benzoyltransferase; protein id: supported by cDNA: 114130. [Arabidopsis thaliana]
  misc_feature (1)..(401): Homolog of NCBI NO: 21536883 NR Description: anthranilate N-benzoyltransferase [Arabidopsis
  misc_feature (1)..(401): Homolog of NCBI NO: 38345030 NR Description: OSJNBa0029H02.14 [Oryza sativa (japonica
  misc_feature (1)..(402): Homolog of NCBI NO: 7484689 NR Description: anthranilate N-benzoyltransferase (EC 2.3.1.144)
  misc_feature (1)..(402): Homolog of NCBI NO: 7484692 NR Description: anthranilate N-benzoyltransferase (EC 2.3.1.144)
MGTLYFYKPCSSSDRPNTQSLIEALSKVLVFFYPAAGRLQKNTNGRLEVQCNGEGVLFVEAESDSTVQDIGLLTQSLDLSQLVPTVDYAGDISSYPLLLFQVTYFKCGTICVGSSIHHTFGEATSLGYIMEAWSLTARGLLVKLTPFLDRTVLHARNPPSSVFPHTEYQSPPFHNHPMKSLAYRSNPESDSAIATLKLTRLQLKALKARAEIADSKFSTYEVLVAHTWRCASFANEDLSEEHSTRLHIIIDGRPRLQPKLPQGYIGNTLFHARPVSPLGAFHRESFSETVERVHREIRKMDNEYLRSAIDYLERHPDLDQLVPGEGNTIFSCAANFCIVSLIKQTAYEMDFGWGKAYYKRASHLNEGKGFVTGNPDEEGSMMLTMCLKKTQLSKFRKLFYEFLNVSAL

SEQ ID NO: 90382 - DNA, 1341 bp, Arabidopsis thaliana
  misc_feature (1)..(1341): Ceres Seq. ID no. 12723664
  misc_feature: MA Experiment ID: 20000180 Result: Up-regulated in Transcription
  misc_feature: MA Experiment 20000180 PARAMETER Experiment Name: At_Germinating_Seeds_P Parameter: Age (hr) Value: 24 vs. 0
  misc_feature: MA Experiment 20000180 PARAMETER Experiment Name: At_Germinating_Seeds_P Parameter: Tissue Value: Germinating Seeds
  misc_feature: MA Experiment ID: 20000185 Result: Down-regulated in Transcription
  misc_feature: MA Experiment 20000185 PARAMETER Experiment Name: At_Roots__P Parameter: Age (day) Value: 7 vs. 21
  misc_feature: MA Experiment 20000185 PARAMETER Experiment Name: At_Roots__P Parameter: Organism Value: A. thaliana
  misc_feature: MA Experiment 20000185 PARAMETER Experiment Name: At_Roots__P Parameter: Tissue Value: Roots vs. Whole Plant
  misc_feature: MA Experiment ID: 20000214 Result: Down-regulated in Transcription
  misc_feature: MA Experiment 20000214 PARAMETER Experiment Name: At_4deg_Cold_P Parameter: Timepoint (hr) Value: 6
atgatctctctctctctattcttttgagtcccaaaccccatggcaggtttgtcgctggagtttacagttaacacttggaatctcaggtctctctctcaagttccatgtcctttaagacatggctttcgattcccgcgtcggttgacacgaagaagaacgattctcatgtgttctgattcaagctctcagtcgtggaatgttcctgttttatctagctatgaggttggtgagaggctaaaactagcaagaggaggacaacagttcttggccatgtactcaagtgttgttgatggaattacaaccgatccagcagcgatggttcttccattggatgatcacatggttcaccgtggtcatggagtctttgacactgccctgatcatcaatggatacctttatgaattggatcagcaccttgaccgtatcttgcgatctgcatcaatggctaagatcccacttccattcgatcgagaaactattaaaagaattctcattcaaaccgtgagcgtttctggatgtagagatggatctctaagatactggctctctgcagggccaggggatttcctcctatctccatctcaatgtctcaaaccaactctctatgccattgttataaaaacgaacttcgccattaacccaataggtgtcaaggtagtgacctcgtccatccccataaagcctccagagtttgccacggtgaaaagtgttaactacctccctaacgtactctcacaaatggaagctgaggccaaaggagcttatgcaggtatttgggtgtgtaaagatgggtttattgcagaaggcccgaacatgaatgtggcgtttgttgttaatggtggtaaggagcttgtgatgccgcggtttgataacgttttgagcggatgtacagcaaagagaacacttacactcgctgaacagcttgtaagcaaggggattcttaaaactgtgaaagtaatggatgtgacagtcgaagatggaaagaaagcagatgagatgatgcttattggtagtggaattccgatcagacctgtgattcaatgggatgaagaatttattggtgaaggaaaagaaggtcctatagcaaaggcgcttcttgatctgttacttgaagatatgagatctggtccaccttccgttcgtgttcttgttccttactgagccaatcactctctttgttcatcaaagacaataagctgtggcttttttgtaaagctttgctgttattgtaagttgagtttatcatggggtttttaggtatctgtctttgtaaagatttctctttatcacttttgaattatgattgtacccattctcaacaattcatggagtggttgcgtc

SEQ ID NO: 90383 - protein, 373 aa, Arabidopsis thaliana
  peptide (1)..(373): Ceres Seq. ID no. 12723665
  misc_feature (1)..(373): Homolog of NCBI NO: 22327924 NR Description: branched-chain amino acid aminotransferase-like protein id: At5g57850.1, supported by cDNA: gi_20466633
  misc_feature (78)..(373): Homolog of NCBI NO: 9758354 NR Description: branched-chain amino acid aminotransferase-like
  misc_feature (78)..(373): Homolog of NCBI NO: 34904468 NR Description: putative branched-chain amino acid
  misc_feature (74)..(360): Homolog of NCBI NO: 23474241 NR Description: hypothetical protein [Desulfovibrio desulfuricans
  misc_feature (99)..(365): Homolog of NCBI NO: 20095063 NR Description: Branched-chain amino acid aminotransferase
  misc_feature (83)..(354): Homolog of NCBI NO: 20807414 NR Description: Branched-chain amino acid
  misc_feature (99)..(362): Homolog of NCBI NO: 15669197 NR Description: branched-chain amino acid aminotransferase (ilvE)
  misc_feature (99)..(354): Homolog of NCBI NO: 11498538 NR Description: branched-chain amino acid aminotransferase (ilvE)
  misc_feature (83)..(365): Homolog of NCBI NO: 21227147 NR Description: Branched-chain amino acid aminotransferase
  misc_feature (83)..(348): Homolog of NCBI NO: 23051040 NR Description: hypothetical protein [Methanosarcina barkeri]
MAGLSLEFTVNTWNLRSLSQVPCPLRHGFRFPRRLTRRRTILMCSDSSSQSWNVPVLSSYEVGERLKLARGGQQFLAMYSSVVDGITTDPAAMVLPLDDHMVHRGHGVFDTALIINGYLYELDQHLDRILRSASMAKIPLPFDRETIKRILIQTVSVSGCRDGSLRYWLSAGPGDFLLSPSQCLKPTLYAIVIKTNFAINPIGVKVVTSSIPIKPPEFATVKSVNYLPNVLSQMEAEAKGAYAGIWVCKDGFIAEGPNMNVAFVVNGGKELVMPRFDNVLSGCTAKRTLTLAEQLVSKGILKTVKVMDVTVEDGKKADEMMLIGSGIPIRPVIQWDEEFIGEGKEGPIAKALLDLLLEDMRSGPPSVRVLVPY

SEQ ID NO: 90384 - protein, 331 aa, Arabidopsis thaliana
  peptide (1)..(331): Ceres Seq. ID no. 12723666
  misc_feature (1)..(331): Homolog of NCBI NO: 22327924 NR Description: branched-chain amino acid aminotransferase-like protein id: At5g57850.1, supported by cDNA: gi_20466633
  misc_feature (36)..(331): Homolog of NCBI NO: 9758354 NR Description: branched-chain amino acid aminotransferase-like
  misc_feature (36)..(331): Homolog of NCBI NO: 34904468 NR Description: putative branched-chain amino acid
  misc_feature (32)..(318): Homolog of NCBI NO: 23474241 NR Description: hypothetical protein [Desulfovibrio desulfuricans
  misc_feature (57)..(323): Homolog of NCBI NO: 20095063 NR Description: Branched-chain amino acid aminotransferase
  misc_feature (41)..(312): Homolog of NCBI NO: 20807414 NR Description: Branched-chain amino acid
  misc_feature (57)..(320): Homolog of NCBI NO: 15669197 NR Description: branched-chain amino acid aminotransferase (ilvE)
  misc_feature (57)..(312): Homolog of NCBI NO: 11498538 NR Description: branched-chain amino acid aminotransferase (ilvE)
  misc_feature (41)..(323): Homolog of NCBI NO: 21227147 NR Description: Branched-chain amino acid aminotransferase
  misc_feature (41)..(306): Homolog of NCBI NO: 23051040 NR Description: hypothetical protein [Methanosarcina barkeri]
MCSDSSSQSWNVPVLSSYEVGERLKLARGGQQFLAMYSSVVDGITTDPAAMVLPLDDHMVHRGHGVFDTALIINGYLYELDQHLDRILRSASMAKIPLPFDRETIKRILIQTVSVSGCRDGSLRYWLSAGPGDFLLSPSQCLKPTLYAIVIKTNFAINPIGVKVVTSSIPIKPPEFATVKSVNYLPNVLSQMEAEAKGAYAGIWVCKDGFIAEGPNMNVAFVVNGGKELVMPRFDNVLSGCTAKRTLTLAEQLVSKGILKTVKVMDVTVEDGKKADEMMLIGSGIPIRPVIQWDEEFIGEGKEGPIAKALLDLLLEDMRSGPPSVRVLVPY

SEQ ID NO: 90385 - protein, 296 aa, Arabidopsis thaliana
  peptide (1)..(296): Ceres Seq. ID no. 12723667
  misc_feature (1)..(296): Homolog of NCBI NO: 22327924 NR Description: branched-chain amino acid aminotransferase-like protein id: At5g57850.1, supported by cDNA: gi_20466633
  misc_feature (1)..(296): Homolog of NCBI NO: 9758354 NR Description: branched-chain amino acid aminotransferase-like
  misc_feature (1)..(296): Homolog of NCBI NO: 34904468 NR Description: putative branched-chain amino acid
  misc_feature (1)..(283): Homolog of NCBI NO: 23474241 NR Description: hypothetical protein [Desulfovibrio desulfuricans
  misc_feature (22)..(288): Homolog of NCBI NO: 20095063 NR Description: Branched-chain amino acid aminotransferase
  misc_feature (6)..(277): Homolog of NCBI NO: 20807414 NR Description: Branched-chain amino acid
  misc_feature (22)..(285): Homolog of NCBI NO: 15669197 NR Description: branched-chain amino acid aminotransferase (ilvE)
  misc_feature (22)..(277): Homolog of NCBI NO: 11498538 NR Description: branched-chain amino acid aminotransferase (ilvE)
  misc_feature (6)..(288): Homolog of NCBI NO: 21227147 NR Description: Branched-chain amino acid aminotransferase
  misc_feature (6)..(271): Homolog of NCBI NO: 23051040 NR Description: hypothetical protein [Methanosarcina barkeri]
MYSSVVDGITTDPAAMVLPLDDHMVHRGHGVFDTALIINGYLYELDQHLDRILRSASMAKIPLPFDRETIKRILIQTVSVSGCRDGSLRYWLSAGPGDFLLSPSQCLKPTLYAIVIKTNFAINPIGVKVVTSSIPIKPPEFATVKSVNYLPNVLSQMEAEAKGAYAGIWVCKDGFIAEGPNMNVAFVVNGGKELVMPRFDNVLSGCTAKRTLTLAEQLVSKGILKTVKVMDVTVEDGKKADEMMLIGSGIPIRPVIQWDEEFIGEGKEGPIAKALLDLLLEDMRSGPPSVRVLVPY

SEQ ID NO: 90386 - DNA, 1398 bp, Arabidopsis thaliana
  misc_feature (1)..(1398): Ceres Seq. ID no. 12723702
  misc_feature: MA Experiment ID: 20000184 Result: Up-regulated in Transcription
  misc_feature: MA Experiment 20000184 PARAMETER Experiment Name: At_Shoots__P Parameter: Age (day) Value: 7
  misc_feature: MA Experiment 20000184 PARAMETER Experiment Name: At_Shoots__P Parameter: Tissue Value: Shoots vs. Whole Plant
atggctcgtcggctgtttctcctcctcctcgccgtcacggcagggttgagcttgacgggaacaaccgtcagagcagttggcataaattgggggacagaagcgtcgcaccctcttccgccttcaaaggttgtagagcttctgaaatcaaacggcattgtcaaagtgaagctcttcgatgccgacccaaaagttctccgagctctctctggttctaatattggtgtcactatcggaatccaaaattcgatgctcaagagcttgaatgcatccgtaaaggtagcagagagctgggtacatgacaatgtcactcgttacttcaacgttggagaagagccatttctccagagctatggcaatcagtataagccttttgtgattggggcagctatgaatatccaaaatgctttagttaaggcgaacttggcaaatgaagtgaaggttgtagtcccctcaagctttgattcctttctttctgaatctggtcgaccttcttcaggacactttagggctgacctcaacaagacgatgattgaactcctctcctttctcacaaagcaccactctcctttttttgtgacaatctctcctttcctaagctttcaccagaacaagaacatctcccttgactttagcctctttaaagaaacagcaaaggctcacaaagacggacgtaaaacctacagaaacagctttgatctaagctatgacacacttgtctctgcattgttcacaattgggttttcggaggtggatatcgttgtgtcaaagatcggttggcctacagatggagcagaaaatgcaacatcactgactgctgaggcgttctttaaaggactgatagttcacttggagaaaaagacggcctctctcccgcgtcctcctgttgaaacctacattgaaagtctcttggacgaagatcagagaaacttatctgctgggaactttgagaggcactggggagtgttcactttcgacggtcaagccaaatacaatttcagtttcaaccataagaatcaggtaaacgcgcagaatgttcagtaccttcctcctaagtggtgtgtggtgaacaataacaaggacttgtcaaacgcgtcagcaagagcattagaagcgtgtgctgttgcggactgtacatcgatacttcctggcgggtcgtgttcaggcatcagatggccaggcaacgtttcatacgcgttcaatagcttgtaccagcaaaatgatcacagtgcagaaagctgcaactttggtggacttggtttgatcactactgttgatccttctgaggataattgccggttctcgattcaacttgacacttctcattcatcttcgcaaactccaaatttctttcagagctggcctctcctcttattgttcctactgtccggactcttttaa

SEQ ID NO: 90387 - protein, 465 aa, Arabidopsis thaliana
  peptide (1)..(465): Ceres Seq. ID no. 12723703
  misc_feature (26)..(334): Pfam Name: Glycosyl hydrolases family 17 Pfam Description: Glycosyl hydrolases family 17
  misc_feature (1)..(465): Homolog of NCBI NO: 30697080 NR Description: glycosyl hydrolase family 17 [Arabidopsis
  misc_feature (25)..(444): Homolog of NCBI NO: 38423964 NR Description: putative glycosyl hydrolase [Oryza sativa
  misc_feature (25)..(447): Homolog of NCBI NO: 7488109 NR Description: probable glucanase - Arabidopsis thaliana glucanase like protein [Arabidopsis thaliana]
  misc_feature (25)..(447): Homolog of NCBI NO: 30683955 NR Description: glycosyl hydrolase family 17 [Arabidopsis >gi|26449937|dbj|BAC42089.1| unknown protein [Arabidopsis
  misc_feature (5)..(447): Homolog of NCBI NO: 37223500 NR Description: beta-1,3-glucanase, acidic [Coffea arabica]
  misc_feature (8)..(437): Homolog of NCBI NO: 30060382 NR Description: putative glucan endo-1,3-beta-glucosidase
  misc_feature (4)..(447): Homolog of NCBI NO: 15230097 NR Description: glycosyl hydrolase family 17; protein id:
  misc_feature (7)..(458): Homolog of NCBI NO: 22327934 NR Description: glycosyl hydrolase family 17; protein id:
  misc_feature (108)..(464): Homolog of NCBI NO: 7486246 NR Description: hypothetical protein F27F23.24 - Arabidopsis
  misc_feature (9)..(117): Homolog of NCBI NO: 7486246 NR Description: hypothetical protein F27F23.24 - Arabidopsis
MARRLFLLLLAVTAGLSLTGTTVRAVGINWGTEASHPLPPSKVVELLKSNGIVKVKLFDADPKVLRALSGSNIGVTIGIQNSMLKSLNASVKVAESWVHDNVTRYFNVGEEPFLQSYGNQYKPFVIGAAMNIQNALVKANLANEVKVVVPSSFDSFLSESGRPSSGHFRADLNKTMIELLSFLTKHHSPFFVTISPFLSFHQNKNISLDFSLFKETAKAHKDGRKTYRNSFDLSYDTLVSALFTIGFSEVDIVVSKIGWPTDGAENATSLTAEAFFKGLIVHLEKKTASLPRPPVETYIESLLDEDQRNLSAGNFERHWGVFTFDGQAKYNFSFNHKNQVNAQNVQYLPPKWCVVNNNKDLSNASARALEACAVADCTSILPGGSCSGIRWPGNVSYAFNSLYQQNDHSAESCNFGGLGLITTVDPSEDNCRFSIQLDTSHSSSQTPNFFQSWPLLLLFLLSGLF

SEQ ID NO: 90388 - protein, 383 aa, Arabidopsis thaliana
  peptide (1)..(383): Ceres Seq. ID no. 12723704
  misc_feature (1)..(252): Pfam Name: Glycosyl hydrolases family 17 Pfam Description: Glycosyl hydrolases family 17
  misc_feature (1)..(383): Homolog of NCBI NO: 30697080 NR Description: glycosyl hydrolase family 17 [Arabidopsis
  misc_feature (1)..(362): Homolog of NCBI NO: 38423964 NR Description: putative glycosyl hydrolase [Oryza sativa
  misc_feature (1)..(365): Homolog of NCBI NO: 7488109 NR Description: probable glucanase - Arabidopsis thaliana glucanase like protein [Arabidopsis thaliana]
  misc_feature (1)..(365): Homolog of NCBI NO: 30683955 NR Description: glycosyl hydrolase family 17 [Arabidopsis >gi|26449937|dbj|BAC42089.1| unknown protein [Arabidopsis
  misc_feature (1)..(365): Homolog of NCBI NO: 37223500 NR Description: beta-1,3-glucanase, acidic [Coffea arabica]
  misc_feature (1)..(355): Homolog of NCBI NO: 30060382 NR Description: putative glucan endo-1,3-beta-glucosidase
  misc_feature (1)..(365): Homolog of NCBI NO: 15230097 NR Description: glycosyl hydrolase family 17; protein id:
  misc_feature (1)..(376): Homolog of NCBI NO: 22327934 NR Description: glycosyl hydrolase family 17; protein id:
  misc_feature (26)..(382): Homolog of NCBI NO: 7486246 NR Description: hypothetical protein F27F23.24 - Arabidopsis
  misc_feature (1)..(35): Homolog of NCBI NO: 7486246 NR Description: hypothetical protein F27F23.24 - Arabidopsis
MLKSLNASVKVAESWVHDNVTRYFNVGEEPFLQSYGNQYKPFVIGAAMNIQNALVKANLANEVKVVVPSSFDSFLSESGRPSSGHFRADLNKTMIELLSFLTKHHSPFFVTISPFLSFHQNKNISLDFSLFKETAKAHKDGRKTYRNSFDLSYDTLVSALFTIGFSEVDIVVSKIGWPTDGAENATSLTAEAFFKGLIVHLEKKTASLPRPPVETYIESLLDEDQRNLSAGNFERHWGVFTFDGQAKYNFSFNHKNQVNAQNVQYLPPKWCVVNNNKDLSNASARALEACAVADCTSILPGGSCSGIRWPGNVSYAFNSLYQQNDHSAESCNFGGLGLITTVDPSEDNCRFSIQLDTSHSSSQTPNFFQSWPLLLLFLLSGLF

SEQ ID NO: 90389 - protein, 336 aa, Arabidopsis thaliana
  peptide (1)..(336): Ceres Seq. ID no. 12723705
  misc_feature (1)..(205): Pfam Name: Glycosyl hydrolases family 17 Pfam Description: Glycosyl hydrolases family 17
  misc_feature (1)..(336): Homolog of NCBI NO: 30697080 NR Description: glycosyl hydrolase family 17 [Arabidopsis
  misc_feature (1)..(315): Homolog of NCBI NO: 38423964 NR Description: putative glycosyl hydrolase [Oryza sativa
  misc_feature (1)..(318): Homolog of NCBI NO: 7488109 NR Description: probable glucanase - Arabidopsis thaliana glucanase like protein [Arabidopsis thaliana]
  misc_feature (1)..(318): Homolog of NCBI NO: 30683955 NR Description: glycosyl hydrolase family 17 [Arabidopsis >gi|26449937|dbj|BAC42089.1| unknown protein [Arabidopsis
  misc_feature (1)..(318): Homolog of NCBI NO: 37223500 NR Description: beta-1,3-glucanase, acidic [Coffea arabica]
  misc_feature (1)..(308): Homolog of NCBI NO: 30060382 NR Description: putative glucan endo-1,3-beta-glucosidase
  misc_feature (1)..(318): Homolog of NCBI NO: 15230097 NR Description: glycosyl hydrolase family 17; protein id:
  misc_feature (1)..(329): Homolog of NCBI NO: 22327934 NR Description: glycosyl hydrolase family 17; protein id:
  misc_feature (1)..(335): Homolog of NCBI NO: 7486246 NR Description: hypothetical protein F27F23.24 - Arabidopsis
  misc_feature (1)..(329): Homolog of NCBI NO: 16604491 NR Description: AT5g58090/k21l19_70 [Arabidopsis thaliana]
MNIQNALVKANLANEVKVVVPSSFDSFLSESGRPSSGHFRADLNKTMIELLSFLTKHHSPFFVTISPFLSFHQNKNISLDFSLFKETAKAHKDGRKTYRNSFDLSYDTLVSALFTIGFSEVDIVVSKIGWPTDGAENATSLTAEAFFKGLIVHLEKKTASLPRPPVETYIESLLDEDQRNLSAGNFERHWGVFTFDGQAKYNFSFNHKNQVNAQNVQYLPPKWCVVNNNKDLSNASARALEACAVADCTSILPGGSCSGIRWPGNVSYAFNSLYQQNDHSAESCNFGGLGLITTVDPSEDNCRFSIQLDTSHSSSQTPNFFQSWPLLLLFLLSGLF

SEQ ID NO: 90390 - DNA, 3157 bp, Arabidopsis thaliana
  misc_feature (1)..(3157): Ceres Seq. ID no. 12723709
  misc_feature: MA Experiment ID: 20000184 Result: Down-regulated in Transcription
  misc_feature: MA Experiment 20000184 PARAMETER Experiment Name: At_Shoots__P Parameter: Age (day) Value: 7
  misc_feature: MA Experiment 20000184 PARAMETER Experiment Name: At_Shoots__P Parameter: Tissue Value: Shoots vs. Whole Plant
  misc_feature: MA Experiment ID: 20000227 Result: Down-regulated in Transcription
  misc_feature: MA Experiment 20000227 PARAMETER Experiment Name: At_Root-Tips-vs-Tops_P Parameter: Tissue Value: Root Tips vs. Root Tops
  misc_feature: MA Experiment ID: 20000496 Result: Up-regulated in Transcription
  misc_feature: MA Experiment 20000496 PARAMETER Experiment Name: At_Guard_Cells_P Parameter: Harvest Date Value: 7/19/2002
  misc_feature: MA Experiment 20000496 PARAMETER Experiment Name: At_Guard_Cells_P Parameter: Organism Value: Canola
  misc_feature: MA Experiment 20000496 PARAMETER Experiment Name: At_Guard_Cells_P Parameter: Tissue Value: Guard Cells vs. Leaves
  misc_feature: MA Experiment ID: 20000794 Result: Up-regulated in Transcription
  misc_feature: MA Experiment 20000794 PARAMETER Experiment Name: At_Petals_P Parameter: Age (day) Value: 23-25 days
  misc_feature: MA Experiment 20000794 PARAMETER Experiment Name: At_Petals_P Parameter: Plant Line Value: WS
  misc_feature: MA Experiment 20000794 PARAMETER Experiment Name: At_Petals_P Parameter: Tissue Value: Petals vs. Whole plant
  misc_feature: MA Experiment ID: 20001451 Result: Up-regulated in Transcription
  misc_feature: MA Experiment 20001451 PARAMETER Experiment Name: At_Far-red-induction_P Parameter: Age (day) Value: 7
  misc_feature: MA Experiment 20001451 PARAMETER Experiment Name: At_Far-red-induction_P Parameter: Light Value: Far-red vs. White
  misc_feature: MA Experiment 20001451 PARAMETER Experiment Name: At_Far-red-induction_P Parameter: Organism Value: A. thaliana
  misc_feature: MA Experiment 20001451 PARAMETER Experiment Name: At_Far-red-induction_P Parameter: Plant Line Value: Columbia
  misc_feature: MA Experiment 20001451 PARAMETER Experiment Name: At_Far-red-induction_P Parameter: Timepoint (hr) Value: 24
  misc_feature: MA Experiment 20001451 PARAMETER Experiment Name: At_Far-red-induction_P Parameter: Tissue Value: Whole Plant
aactttaccatcatcgtcgttgttctttcccgaagcggatctcttcgtctgtgtgatcggaggatctgcaagagttccttacccatacaaactcagagagagactgagagatattcgttacgcaatttattatggcttctgtaagcaaatcgaatcatctcgaagaagatgatgatgctgaagaagaggtgcaacatttcgatgatttcactctagcttcttcctgggaaaggttcatctcagacattgaagcaacttgtcgtcaatggttagctgatggtcccaaaaacctggtggaaaagggtgctgttgcagtggaggattcaaagaatctgtttacggtcaaacacgaacttaagaatgttgcaaagagctattgtatggagttctactttcaaattgataataatggtagccaacaagctggaattggtaattggaacagtaattcacatgatctccagctttgctttggggtgaaggattttctgttgattgctccacaaagtgccagtggggtgcttcttgatacaccagagtctagcaagcttctgagtgcggttgctattgctttgtctaactgtggcagcttgtggccagcctttgtccctgtgcatgacccttcacgcaaagcatatattggaatccagaatatgggcactgtttttactagaagatttgaagcagatcgtgttggcagccaagttcccgtgaaactcatgcacctggaagggctatatgagttgtttgtttctaagtttgtttattcaggagtggacttctcgatgcatactttcagagtccattttatgatgaggctaacataccaaaccttcccatatgacgaggaggatgaggaaattgatacggatgaggttatgggtgacaaatcagacactgcagaacactatggttctgagtcacgcaataaggtgctctgggatgatgactgtccttggagtgagtggtactctgctgaagatccactaagaggattcgaattggtggtcacatgggctgacaggactgtagaaagcacacttgagatggctgaacttgaaaatgcctcaccccatgatgctgagaagtggattttacacccaatcctctcgccatatctgggtgatccttcacatggcaaaagaattgattttgcttcccaactactttgcttggttgaagcattggattcgtctttctcagctcagtttatggaggattttgtgtcagtggaaaatccaagctccgaaaatttaaagacctcagtggtcatccctcctccgtcagttcttgatcgggtgattaaagatctctttcgtgaggggtctaaactcccagattttacaaaaggcgaacacaggctttctcgagctcttaaggctgcaccgcttgaatctctttttacacaattctgtttgcactcactgtggtttggcaattgcaatatccgtgccattgcctttctctggatagagtttgtccgtgaagttcgatggtgttgggaagagacacagccgttgccgaaaatgccaattgacggttctattgatttgtccagttgtttgatcaaccaaaagttacacttgcttgcaatttgcatcgaaaaaaaacgtgaaatgaatgaagagttcctagactgtataggaagtgatgacagttcagacgcttctgtttctatggaggaacaccacaaggtcgacaagagaagaaatacatcctcggaagaagaactgcggaggaaacgtgacagctcaattgcagaagatacatctaagcaactcagatttgagcggaaaactgaacgcacaaattctgtgaaccaaagcccaacagatgccatcaggagaggttcagctggaccagtggggacgatgatgctcctgaagtcacgtcagcaactccatgccccatttacccaggacccacctcttatgactgaagacatgcatgaagaaagactccaggctgttgaggcgtttggtgattcccttaacgttcctggccaattggagaaagacatcttattatctgacatgtcagcattcaaagcggcaaacccagatgcagtgtttgaggactttatcagatggcattcacctggagattgggagagctttgaacctaaaaccactgaaccatcagcaggccccagcaccgaaggctcgaaagatgaatggcctcctcgtggccgcctttctcaacggatgtctgatcaaggaaacttgtggagaaaaagttggaatgatgcacccgctttgccagccgatgaccaaaagcctctcctagacccgaaccgagagggagagaagattgttcattacctggaaacagtacggcctcatcagcttcttgagcaaatggtctgcacagccttcagaggatcagctgacactcttaaccagacaaacgtcggtaacatgagacaaatgacctctaaattggagcaactctacctcatcatgaaatttactttgggggctctacaacgaaacaatcttccggataaagcaaagaccgtcaaagacctgaaacgtctctgcatggtctttgaaaacgtggagaagttggtagcggttgcggcatctattcacagaaagttcctggacgcatcacgccttgctcaagtaatattcagcgacttctatggcgtttatgctccaacaatgggaatgagcgcaaatgatgaagagaacaaaagcaggacggagatggaagtaagtagacaggaagtgagtttaagagaaagacaagtggtgtcgaatctgttctcgcctccatcggctaaccagtcttggagaaaagtgctcagtatgggaaatcttctaaacggacacgaacctattctcagggagatcattttctccaccggagacgatgtcaacaacggaatccattacgcggcagctgctgatgtggcggccacaagtgaccggaagggagaagaaatcgagacacaccgaatgtatgtgtctggaacatctaacgatctccgggttgggctctctgttacttcctgcgattgattttttttttttcattttaatttaaccatacgatacaacacatttgttctgtaatagaaaattagcaaatgaagttctgcttgaacaaatttctaagcgtaaatttttgcattaatagacaacgattgatttgc

SEQ ID NO: 90391 - protein, 963 aa, Arabidopsis thaliana
  peptide (1)..(963): Ceres Seq. ID no. 12723710
  misc_feature (787)..(963): Homolog of NCBI NO: 10177028 NR Description: gene_id:MQJ2.12~unknown protein [Arabidopsis
  misc_feature (635)..(762): Homolog of NCBI NO: 10177028 NR Description: gene_id:MQJ2.12~unknown protein [Arabidopsis
  misc_feature (368)..(823): Homolog of NCBI NO: 26345344 NR Description: unnamed protein product [Mus musculus]
  misc_feature (107)..(209): Homolog of NCBI NO: 26345344 NR Description: unnamed protein product [Mus musculus]
  misc_feature (13)..(58): Homolog of NCBI NO: 26345344 NR Description: unnamed protein product [Mus musculus]
  misc_feature (368)..(823): Homolog of NCBI NO: 28374414 NR Description: similar to RIKEN cDNA 4732493F09 gene [Mus
  misc_feature (107)..(209): Homolog of NCBI NO: 28374414 NR Description: similar to RIKEN cDNA 4732493F09 gene [Mus
  misc_feature (13)..(58): Homolog of NCBI NO: 28374414 NR Description: similar to RIKEN cDNA 4732493F09 gene [Mus
  misc_feature (368)..(823): Homolog of NCBI NO: 30520087 NR Description: RIKEN cDNA 4732493F09 gene [Mus musculus]
  misc_feature (107)..(209): Homolog of NCBI NO: 30520087 NR Description: RIKEN cDNA 4732493F09 gene [Mus musculus]
MASVSKSNHLEEDDDAEEEVQHFDDFTLASSWERFISDIEATCRQWLADGPKNLVEKGAVAVEDSKNLFTVKHELKNVAKSYCMEFYFQIDNNGSQQAGIGNWNSNSHDLQLCFGVKDFLLIAPQSASGVLLDTPESSKLLSAVAIALSNCGSLWPAFVPVHDPSRKAYIGIQNMGTVFTRRFEADRVGSQVPVKLMHLEGLYELFVSKFVYSGVDFSMHTFRVHFMMRLTYQTFPYDEEDEEIDTDEVMGDKSDTAEHYGSESRNKVLWDDDCPWSEWYSAEDPLRGFELVVTWADRTVESTLEMAELENASPHDAEKWILHPILSPYLGDPSHGKRIDFASQLLCLVEALDSSFSAQFMEDFVSVENPSSENLKTSVVIPPPSVLDRVIKDLFREGSKLPDFTKGEHRLSRALKAAPLESLFTQFCLHSLWFGNCNIRAIAFLWIEFVREVRWCWEETQPLPKMPIDGSIDLSSCLINQKLHLLAICIEKKREMNEEFLDCIGSDDSSDASVSMEEHHKVDKRRNTSSEEELRRKRDSSIAEDTSKQLRFERKTERTNSVNQSPTDAIRRGSAGPVGTMMLLKSRQQLHAPFTQDPPLMTEDMHEERLQAVEAFGDSLNVPGQLEKDILLSDMSAFKAANPDAVFEDFIRWHSPGDWESFEPKTTEPSAGPSTEGSKDEWPPRGRLSQRMSDQGNLWRKSWNDAPALPADDQKPLLDPNREGEKIVHYLETVRPHQLLEQMVCTAFRGSADTLNQTNVGNMRQMTSKLEQLYLIMKFTLGALQRNNLPDKAKTVKDLKRLCMVFENVEKLVAVAASIHRKFLDASRLAQVIFSDFYGVYAPTMGMSANDEENKSRTEMEVSRQEVSLRERQVVSNLFSPPSANQSWRKVLSMGNLLNGHEPILREIIFSTGDDVNNGIHYAAAADVAATSDRKGEEIETHRMYVSGTSNDLRVGLSVTSCD

SEQ ID NO: 90392 - protein, 880 aa, Arabidopsis thaliana
  peptide (1)..(880): Ceres Seq. ID no. 12723711
  misc_feature (704)..(880): Homolog of NCBI NO: 10177028 NR Description: gene_id:MQJ2.12~unknown protein [Arabidopsis
  misc_feature (552)..(679): Homolog of NCBI NO: 10177028 NR Description: gene_id:MQJ2.12~unknown protein [Arabidopsis
  misc_feature (285)..(740): Homolog of NCBI NO: 26345344 NR Description: unnamed protein product [Mus musculus]
  misc_feature (24)..(126): Homolog of NCBI NO: 26345344 NR Description: unnamed protein product [Mus musculus]
  misc_feature (285)..(740): Homolog of NCBI NO: 28374414 NR Description: similar to RIKEN cDNA 4732493F09 gene [Mus
  misc_feature (24)..(126): Homolog of NCBI NO: 28374414 NR Description: similar to RIKEN cDNA 4732493F09 gene [Mus
  misc_feature (285)..(740): Homolog of NCBI NO: 30520087 NR Description: RIKEN cDNA 4732493F09 gene [Mus musculus]
  misc_feature (24)..(126): Homolog of NCBI NO: 30520087 NR Description: RIKEN cDNA 4732493F09 gene [Mus musculus]
  misc_feature (285)..(740): Homolog of NCBI NO: 26345242 NR Description: unnamed protein product [Mus musculus]
  misc_feature (31)..(126): Homolog of NCBI NO: 26345242 NR Description: unnamed protein product [Mus musculus]
MEFYFQIDNNGSQQAGIGNWNSNSHDLQLCFGVKDFLLIAPQSASGVLLDTPESSKLLSAVAIALSNCGSLWPAFVPVHDPSRKAYIGIQNMGTVFTRRFEADRVGSQVPVKLMHLEGLYELFVSKFVYSGVDFSMHTFRVHFMMRLTYQTFPYDEEDEEIDTDEVMGDKSDTAEHYGSESRNKVLWDDDCPWSEWYSAEDPLRGFELVVTWADRTVESTLEMAELENASPHDAEKWILHPILSPYLGDPSHGKRIDFASQLLCLVEALDSSFSAQFMEDFVSVENPSSENLKTSVVIPPPSVLDRVIKDLFREGSKLPDFTKGEHRLSRALKAAPLESLFTQFCLHSLWFGNCNIRAIAFLWIEFVREVRWCWEETQPLPKMPIDGSIDLSSCLINQKLHLLAICIEKKREMNEEFLDCIGSDDSSDASVSMEEHHKVDKRRNTSSEEELRRKRDSSIAEDTSKQLRFERKTERTNSVNQSPTDAIRRGSAGPVGTMMLLKSRQQLHAPFTQDPPLMTEDMHEERLQAVEAFGDSLNVPGQLEKDILLSDMSAFKAANPDAVFEDFIRWHSPGDWESFEPKTTEPSAGPSTEGSKDEWPPRGRLSQRMSDQGNLWRKSWNDAPALPADDQKPLLDPNREGEKIVHYLETVRPHQLLEQMVCTAFRGSADTLNQTNVGNMRQMTSKLEQLYLIMKFTLGALQRNNLPDKAKTVKDLKRLCMVFENVEKLVAVAASIHRKFLDASRLAQVIFSDFYGVYAPTMGMSANDEENKSRTEMEVSRQEVSLRERQVVSNLFSPPSANQSWRKVLSMGNLLNGHEPILREIIFSTGDDVNNGIHYAAAADVAATSDRKGEEIETHRMYVSGTSNDLRVGLSVTSCD

SEQ ID NO: 90393 - protein, 789 aa, Arabidopsis thaliana
  peptide (1)..(789): Ceres Seq. ID no. 12723712
  misc_feature (613)..(789): Homolog of NCBI NO: 10177028 NR Description: gene_id:MQJ2.12~unknown protein [Arabidopsis
  misc_feature (461)..(588): Homolog of NCBI NO: 10177028 NR Description: gene_id:MQJ2.12~unknown protein [Arabidopsis
  misc_feature (194)..(649): Homolog of NCBI NO: 26345344 NR Description: unnamed protein product [Mus musculus]
  misc_feature (1)..(35): Homolog of NCBI NO: 26345344 NR Description: unnamed protein product [Mus musculus]
  misc_feature (194)..(649): Homolog of NCBI NO: 28374414 NR Description: similar to RIKEN cDNA 4732493F09 gene [Mus
  misc_feature (1)..(35): Homolog of NCBI NO: 28374414 NR Description: similar to RIKEN cDNA 4732493F09 gene [Mus
  misc_feature (194)..(649): Homolog of NCBI NO: 30520087 NR Description: RIKEN cDNA 4732493F09 gene [Mus musculus]
  misc_feature (1)..(35): Homolog of NCBI NO: 30520087 NR Description: RIKEN cDNA 4732493F09 gene [Mus musculus]
  misc_feature (194)..(649): Homolog of NCBI NO: 26345242 NR Description: unnamed protein product [Mus musculus]
  misc_feature (1)..(35): Homolog of NCBI NO: 26345242 NR Description: unnamed protein product [Mus musculus]
MGTVFTRRFEADRVGSQVPVKLMHLEGLYELFVSKFVYSGVDFSMHTFRVHFMMRLTYQTFPYDEEDEEIDTDEVMGDKSDTAEHYGSESRNKVLWDDDCPWSEWYSAEDPLRGFELVVTWADRTVESTLEMAELENASPHDAEKWILHPILSPYLGDPSHGKRIDFASQLLCLVEALDSSFSAQFMEDFVSVENPSSENLKTSVVIPPPSVLDRVIKDLFREGSKLPDFTKGEHRLSRALKAAPLESLFTQFCLHSLWFGNCNIRAIAFLWIEFVREVRWCWEETQPLPKMPIDGSIDLSSCLINQKLHLLAICIEKKREMNEEFLDCIGSDDSSDASVSMEEHHKVDKRRNTSSEEELRRKRDSSIAEDTSKQLRFERKTERTNSVNQSPTDAIRRGSAGPVGTMMLLKSRQQLHAPFTQDPPLMTEDMHEERLQAVEAFGDSLNVPGQLEKDILLSDMSAFKAANPDAVFEDFIRWHSPGDWESFEPKTTEPSAGPSTEGSKDEWPPRGRLSQRMSDQGNLWRKSWNDAPALPADDQKPLLDPNREGEKIVHYLETVRPHQLLEQMVCTAFRGSADTLNQTNVGNMRQMTSKLEQLYLIMKFTLGALQRNNLPDKAKTVKDLKRLCMVFENVEKLVAVAASIHRKFLDASRLAQVIFSDFYGVYAPTMGMSANDEENKSRTEMEVSRQEVSLRERQVVSNLFSPPSANQSWRKVLSMGNLLNGHEPILREIIFSTGDDVNNGIHYAAAADVAATSDRKGEEIETHRMYVSGTSNDLRVGLSVTSCD

SEQ ID NO: 90394 - DNA, 2497 bp, Arabidopsis thaliana
  misc_feature (1)..(2497): Ceres Seq. ID no. 12723720
  misc_feature: MA Experiment ID: 20000182 Result: Up-regulated in Transcription
  misc_feature: MA Experiment 20000182 PARAMETER Experiment Name: At_2mM_SA_P Parameter: Age (day) Value: 14
  misc_feature: MA Experiment 20000182 PARAMETER Experiment Name: At_2mM_SA_P Parameter: Organism Value: A. thaliana
  misc_feature: MA Experiment 20000182 PARAMETER Experiment Name: At_2mM_SA_P Parameter: Plant Line Value: WS
  misc_feature: MA Experiment 20000182 PARAMETER Experiment Name: At_2mM_SA_P Parameter: Timepoint (hr) Value: 6
  misc_feature: MA Experiment 20000182 PARAMETER Experiment Name: At_2mM_SA_P Parameter: Tissue Value: Aerial
  misc_feature: MA Experiment 20000182 PARAMETER Experiment Name: At_2mM_SA_P Parameter: Treatment Value: 2mM SA vs. No Treatment
  misc_feature: MA Experiment ID: 20000185 Result: Up-regulated in Transcription
  misc_feature: MA Experiment 20000185 PARAMETER Experiment Name: At_Roots__P Parameter: Age (day) Value: 7 vs. 21
  misc_feature: MA Experiment 20000185 PARAMETER Experiment Name: At_Roots__P Parameter: Organism Value: A. thaliana
  misc_feature: MA Experiment 20000185 PARAMETER Experiment Name: At_Roots__P Parameter: Tissue Value: Roots vs. Whole Plant
  misc_feature: MA Experiment ID: 20000227 Result: Down-regulated in Transcription
  misc_feature: MA Experiment 20000227 PARAMETER Experiment Name: At_Root-Tips-vs-Tops_P Parameter: Tissue Value: Root Tips vs. Root Tops
  misc_feature: MA Experiment ID: 20000438 Result: Down-regulated in Transcription
  misc_feature: MA Experiment 20000438 PARAMETER Experiment Name: At_Shoots__P Parameter: Age (day) Value: 14
  misc_feature: MA Experiment 20000438 PARAMETER Experiment Name: At_Shoots__P Parameter: Tissue Value: Shoots vs. Whole Plant
  misc_feature: MA Experiment ID: 20000445 Result: Up-regulated in Transcription
  misc_feature: MA Experiment 20000445 PARAMETER Experiment Name: At_100uM_NAA__P Parameter: Age (day) Value: 14
  misc_feature: MA Experiment 20000445 PARAMETER Experiment Name: At_100uM_NAA__P Parameter: Organism Value: A. thaliana
  misc_feature: MA Experiment 20000445 PARAMETER Experiment Name: At_100uM_NAA__P Parameter: Plant Line Value: WS
  misc_feature: MA Experiment 20000445 PARAMETER Experiment Name: At_100uM_NAA__P Parameter: Timepoint (hr) Value: 6
  misc_feature: MA Experiment 20000445 PARAMETER Experiment Name: At_100uM_NAA__P Parameter: Tissue Value: Aerial
  misc_feature: MA Experiment 20000445 PARAMETER Experiment Name: At_100uM_NAA__P Parameter: Treatment Value: 100uM NAA vs. No Treatment
  misc_feature: MA Experiment ID: 20001557 Result: Up-regulated in Transcription
  misc_feature: MA Experiment 20001557 PARAMETER Experiment Name: At_Drought_Soil_Dry_P Parameter: Age (day) Value: 27
  misc_feature: MA Experiment 20001557 PARAMETER Experiment Name: At_Drought_Soil_Dry_P Parameter: Organism Value: A. thaliana
  misc_feature: MA Experiment 20001557 PARAMETER Experiment Name: At_Drought_Soil_Dry_P Parameter: Plant Line Value: WS
  misc_feature: MA Experiment 20001557 PARAMETER Experiment Name: At_Drought_Soil_Dry_P Parameter: Post Timepoint (hr) Value: 3
  misc_feature: MA Experiment 20001557 PARAMETER Experiment Name: At_Drought_Soil_Dry_P Parameter: Post-Treatment Value: Re-Water vs. No Drought
  misc_feature: MA Experiment 20001557 PARAMETER Experiment Name: At_Drought_Soil_Dry_P Parameter: Timepoint (day) Value: 13
  misc_feature: MA Experiment 20001557 PARAMETER Experiment Name: At_Drought_Soil_Dry_P Parameter: Treatment Value: Drought vs. No Drought
  misc_feature: MA Experiment ID: 20001757 Result: Down-regulated in Transcription
  misc_feature: MA Experiment 20001757 PARAMETER Experiment Name: At_50mM_NH4NO3_L-to-H_P Parameter: Timepoint (hr) Value: 6
  misc_feature: MA Experiment 20001757 PARAMETER Experiment Name: At_50mM_NH4NO3_L-to-H_P Parameter: Tissue Value: Leaf
  misc_feature: MA Experiment 20001757 PARAMETER Experiment Name: At_50mM_NH4NO3_L-to-H_P Parameter: Treatment Value: 50mM NH4NO3 vs 100mM Mannitol
  misc_feature: MA Experiment ID: 20001905 Result: Up-regulated in Transcription
  misc_feature: MA Experiment 20001905 PARAMETER Experiment Name: At_Drought_Reproduction_P Parameter: Age (day) Value: 40
  misc_feature: MA Experiment 20001905 PARAMETER Experiment Name: At_Drought_Reproduction_P Parameter: Organism Value: A. thaliana
  misc_feature: MA Experiment 20001905 PARAMETER Experiment Name: At_Drought_Reproduction_P Parameter: Plant Line Value: WS
  misc_feature: MA Experiment 20001905 PARAMETER Experiment Name: At_Drought_Reproduction_P Parameter: Timepoint (day) Value: 10
  misc_feature: MA Experiment 20001905 PARAMETER Experiment Name: At_Drought_Reproduction_P Parameter: Tissue Value: Rosettes
  misc_feature: MA Experiment 20001905 PARAMETER Experiment Name: At_Drought_Reproduction_P Parameter: Treatment Value: Drought vs. No Drought
attttgaccttaagaagaaagtgacaaggagaggaagaagaagaaaaaaaacataatttgaggaagaagaaaaaaaattcggatttgttttttcaataaattgactaattgagtactcgtttaaaggaagtgaagagcggttttttggtagtggtggtcgagaaaagagagagtttgtctctgtgactcagagtgaaatcaatagagcgggaaaagattgttgcttttttttgccatgggagttgatgagctgtctcacctcaaattctctcttctgctagaatcatcagcctgcaatgatttgtccggttttaagtctctagttgaagaagaaggtcttgagagcattgatggctctggtttgtggtatgggaggagattaggatcaaagaagatgggttttgaggagaggacgcctcttatgattgctgccttgtttggaagcaaagaggttgttgattacatcattagtactggtcttgttgacgtgaaccgctcttgtggctctgatggtgccacggctcttcactgtgcggtctctggcttgtctgccaatagccttgagattgttactcttctgctgaagggctctgcgaatccggattcttgtgatgcttatggtaacaagcctggagatgtgattttcccttgtttgagtccggtttttagcgcgaggatgaaggttttggagcgtttgttgaaaggaaatgatgatttgaatgaagttaatgggcaagaagaaagcgagccagaggttgaggttgaggttgaggtttcgcctcctcgggggtctgagaggaaggagtatccggttgatccaacgcttcctgatatcaagaacggtgtatatgggacggatgagttccggatgtatgctttcaagatcaagccgtgctctagagcatactctcacgactggacggaatgtccctttgttcatccgggtgagaacgcaaggaggcgtgatccgaggaagtaccattatagttgtgtcccttgtcctgaattccggaaggggtcttgttccagaggtgatacttgcgagtatgctcatggtatctttgagtgctggcttcacccggctcagtaccggactcgtctctgcaaggacgagacgaattgctcgagaagagtttgtttctttgcccacaaacccgaggagctgcgtcctttgtacccttcaactggatcaggtgttccgtccccgcggtcttccttctcatcttgcaattcctcgaccgctttcgacatgggaccgattagtccgcttcctatcggagcaacaaccacacctcctttgagtcctaacggtgtatcctctccaataggtggaggaaaaacgtggatgaactggcctaacataacccctcctgcattgcagcttccagggagcagattgaaatctgcattgaatgcaagagaaatcgatttctctgaagagatgcaaagtcttacttctccaactacatggaacaacacgccaatgtcatctccattctccggaaagggcatgaacaggcttgcaggaggagcaatgagcccggtgaatagtctcagtgatatgtttgggacagaggataatacatcgggtttgcagatccgacgcagcgtcattaacccgcagctgcattccaacagtctttcttcatcacctgtgggagccaattctctgttttcgatggattcctccgcagtcttggcttcaagagcggctgaatttgctaaacagcgaagccaaagcttcatagaacgcaacaacggactgaatcaccatcccgcaatctcttccatgactacaacttgtttaaacgattggggctcattggatgggaagcttgactggagcgtccaaggagacgagctacagaagctcagaaaatccacttctttccgtctcagagccggtggcatggaatcaagactgcctaacgaagggactgggctcgaagagccagatgtctcatgggtggagccgctggtgaaagagccacaggagacaagactagctccggtttggatggagcaatcatacatggagacagaacagaccgtggcttgaatcaaaagttttgaactttcattaaccgttccacaagaagcaaagtcagaaagattccgagaggtcgatgctaatctatttcattttatttgtttaatgctttgttatttttctttagaataaaaagaaaaaattcttaggggacaaaagagagttcgtttgtctctctctctgtctccaaagaaaaacagaggtgaaaaaaggtttcaaaacctaagaaaccttgaattacctcacctcacttccttgattctttactattcacaatgagtaatcgatttttttttttcttggtaacactctcacgctgaatatatatgttttttagtaataatataattggaatacagaaatgtatttacacttgtgaagttagggaaagtgttgtaattgtttcttctaagagttgatctaagatgtttgagactatatcttcgc

SEQ ID NO: 90395 - protein, 607 aa, Arabidopsis thaliana
  peptide (1)..(607): Ceres Seq. ID no. 12723721
  misc_feature (92)..(127): Pfam Name: Ankyrin repeat Pfam Description: Ankyrin repeat
  misc_feature (13)..(473): Homolog of NCBI NO: 11357692 NR Description: hypothetical protein F27K19.160 - Arabidopsis >gi|7573493|emb|CAB87852.1| putative protein [Arabidopsis
  misc_feature (13)..(473): Homolog of NCBI NO: 18410398 NR Description: putative protein; protein id: At3g55980.1, by cDNA: gi_15810486 [Arabidopsis thaliana]
  misc_feature (1)..(404): Homolog of NCBI NO: 15225637 NR Description: putative CCCH-type zinc finger protein; protein At2g40140.1, supported by cDNA: gi_20260233 [Arabidopsis
  misc_feature (186)..(490): Homolog of NCBI NO: 20466590 NR Description: zinc finger transcription factor-like protein
  misc_feature (3)..(186): Homolog of NCBI NO: 20466590 NR Description: zinc finger transcription factor-like protein
  misc_feature (186)..(490): Homolog of NCBI NO: 15239917 NR Description: zinc finger transcription factor -like protein; id: At5g12850.1, supported by cDNA: gi_20466589 [Arabidopsis
  misc_feature (5)..(186): Homolog of NCBI NO: 15239917 NR Description: zinc finger transcription factor -like protein; id: At5g12850.1, supported by cDNA: gi_20466589 [Arabidopsis
  misc_feature (186)..(447): Homolog of NCBI NO: 28273376 NR Description: unknown protein [Oryza sativa (japonica
  misc_feature (11)..(155): Homolog of NCBI NO: 28273376 NR Description: unknown protein [Oryza sativa (japonica
  misc_feature (10)..(586): Homolog of NCBI NO: 34899832 NR Description: OJ1092_A07.25 [Oryza sativa (japonica
MGVDELSHLKFSLLLESSACNDLSGFKSLVEEEGLESIDGSGLWYGRRLGSKKMGFEERTPLMIAALFGSKEVVDYIISTGLVDVNRSCGSDGATALHCAVSGLSANSLEIVTLLLKGSANPDSCDAYGNKPGDVIFPCLSPVFSARMKVLERLLKGNDDLNEVNGQEESEPEVEVEVEVSPPRGSERKEYPVDPTLPDIKNGVYGTDEFRMYAFKIKPCSRAYSHDWTECPFVHPGENARRRDPRKYHYSCVPCPEFRKGSCSRGDTCEYAHGIFECWLHPAQYRTRLCKDETNCSRRVCFFAHKPEELRPLYPSTGSGVPSPRSSFSSCNSSTAFDMGPISPLPIGATTTPPLSPNGVSSPIGGGKTWMNWPNITPPALQLPGSRLKSALNAREIDFSEEMQSLTSPTTWNNTPMSSPFSGKGMNRLAGGAMSPVNSLSDMFGTEDNTSGLQIRRSVINPQLHSNSLSSSPVGANSLFSMDSSAVLASRAAEFAKQRSQSFIERNNGLNHHPAISSMTTTCLNDWGSLDGKLDWSVQGDELQKLRKSTSFRLRAGGMESRLPNEGTGLEEPDVSWVEPLVKEPQETRLAPVWMEQSYMETEQTVA

SEQ ID NO: 90396 - protein, 554 aa, Arabidopsis thaliana
  peptide (1)..(554): Ceres Seq. ID no. 12723722
  misc_feature (39)..(74): Pfam Name: Ankyrin repeat Pfam Description: Ankyrin repeat
  misc_feature (1)..(420): Homolog of NCBI NO: 11357692 NR Description: hypothetical protein F27K19.160 - Arabidopsis >gi|7573493|emb|CAB87852.1| putative protein [Arabidopsis
  misc_feature (1)..(420): Homolog of NCBI NO: 18410398 NR Description: putative protein; protein id: At3g55980.1, by cDNA: gi_15810486 [Arabidopsis thaliana]
  misc_feature (1)..(351): Homolog of NCBI NO: 15225637 NR Description: putative CCCH-type zinc finger protein; protein At2g40140.1, supported by cDNA: gi_20260233 [Arabidopsis
  misc_feature (133)..(437): Homolog of NCBI NO: 20466590 NR Description: zinc finger transcription factor-like protein
  misc_feature (1)..(133): Homolog of NCBI NO: 20466590 NR Description: zinc finger transcription factor-like protein
  misc_feature (133)..(437): Homolog of NCBI NO: 15239917 NR Description: zinc finger transcription factor -like protein; id: At5g12850.1, supported by cDNA: gi_20466589 [Arabidopsis
  misc_feature (1)..(133): Homolog of NCBI NO: 15239917 NR Description: zinc finger transcription factor -like protein; id: At5g12850.1, supported by cDNA: gi_20466589 [Arabidopsis
  misc_feature (133)..(394): Homolog of NCBI NO: 28273376 NR Description: unknown protein [Oryza sativa (japonica
  misc_feature (1)..(102): Homolog of NCBI NO: 28273376 NR Description: unknown protein [Oryza sativa (japonica
  misc_feature (1)..(533): Homolog of NCBI NO: 34899832 NR Description: OJ1092_A07.25 [Oryza sativa (japonica
MGFEERTPLMIAALFGSKEVVDYIISTGLVDVNRSCGSDGATALHCAVSGLSANSLEIVTLLLKGSANPDSCDAYGNKPGDVIFPCLSPVFSARMKVLERLLKGNDDLNEVNGQEESEPEVEVEVEVSPPRGSERKEYPVDPTLPDIKNGVYGTDEFRMYAFKIKPCSRAYSHDWTECPFVHPGENARRRDPRKYHYSCVPCPEFRKGSCSRGDTCEYAHGIFECWLHPAQYRTRLCKDETNCSRRVCFFAHKPEELRPLYPSTGSGVPSPRSSFSSCNSSTAFDMGPISPLPIGATTTPPLSPNGVSSPIGGGKTWMNWPNITPPALQLPGSRLKSALNAREIDFSEEMQSLTSPTTWNNTPMSSPFSGKGMNRLAGGAMSPVNSLSDMFGTEDNTSGLQIRRSVINPQLHSNSLSSSPVGANSLFSMDSSAVLASRAAEFAKQRSQSFIERNNGLNHHPAISSMTTTCLNDWGSLDGKLDWSVQGDELQKLRKSTSFRLRAGGMESRLPNEGTGLEEPDVSWVEPLVKEPQETRLAPVWMEQSYMETEQTVA

SEQ ID NO: 90397 - protein, 545 aa, Arabidopsis thaliana
  peptide (1)..(545): Ceres Seq. ID no. 12723723
  misc_feature (30)..(65): Pfam Name: Ankyrin repeat Pfam Description: Ankyrin repeat
  misc_feature (1)..(411): Homolog of NCBI NO: 11357692 NR Description: hypothetical protein F27K19.160 - Arabidopsis >gi|7573493|emb|CAB87852.1| putative protein [Arabidopsis
  misc_feature (1)..(411): Homolog of NCBI NO: 18410398 NR Description: putative protein; protein id: At3g55980.1, by cDNA: gi_15810486 [Arabidopsis thaliana]
  misc_feature (1)..(342): Homolog of NCBI NO: 15225637 NR Description: putative CCCH-type zinc finger protein; protein At2g40140.1, supported by cDNA: gi_20260233 [Arabidopsis
  misc_feature (124)..(428): Homolog of NCBI NO: 20466590 NR Description: zinc finger transcription factor-like protein
  misc_feature (1)..(124): Homolog of NCBI NO: 20466590 NR Description: zinc finger transcription factor-like protein
  misc_feature (124)..(428): Homolog of NCBI NO: 15239917 NR Description: zinc finger transcription factor -like protein; id: At5g12850.1, supported by cDNA: gi_20466589 [Arabidopsis
  misc_feature (1)..(124): Homolog of NCBI NO: 15239917 NR Description: zinc finger transcription factor -like protein; id: At5g12850.1, supported by cDNA: gi_20466589 [Arabidopsis
  misc_feature (124)..(385): Homolog of NCBI NO: 28273376 NR Description: unknown protein [Oryza sativa (japonica
  misc_feature (1)..(93): Homolog of NCBI NO: 28273376 NR Description: unknown protein [Oryza sativa (japonica
  misc_feature (1)..(524): Homolog of NCBI NO: 34899832 NR Description: OJ1092_A07.25 [Oryza sativa (japonica
MIAALFGSKEVVDYIISTGLVDVNRSCGSDGATALHCAVSGLSANSLEIVTLLLKGSANPDSCDAYGNKPGDVIFPCLSPVFSARMKVLERLLKGNDDLNEVNGQEESEPEVEVEVEVSPPRGSERKEYPVDPTLPDIKNGVYGTDEFRMYAFKIKPCSRAYSHDWTECPFVHPGENARRRDPRKYHYSCVPCPEFRKGSCSRGDTCEYAHGIFECWLHPAQYRTRLCKDETNCSRRVCFFAHKPEELRPLYPSTGSGVPSPRSSFSSCNSSTAFDMGPISPLPIGATTTPPLSPNGVSSPIGGGKTWMNWPNITPPALQLPGSRLKSALNAREIDFSEEMQSLTSPTTWNNTPMSSPFSGKGMNRLAGGAMSPVNSLSDMFGTEDNTSGLQIRRSVINPQLHSNSLSSSPVGANSLFSMDSSAVLASRAAEFAKQRSQSFIERNNGLNHHPAISSMTTTCLNDWGSLDGKLDWSVQGDELQKLRKSTSFRLRAGGMESRLPNEGTGLEEPDVSWVEPLVKEPQETRLAPVWMEQSYMETEQTVA

SEQ ID NO: 90398 - DNA, 1487 bp, Arabidopsis thaliana
  misc_feature (1)..(1487): Ceres Seq. ID no. 12723756
  misc_feature: MA Experiment ID: 108434 Result: Up-regulated in Transcription
  misc_feature: MA Experiment 108434 PARAMETER Experiment Name: At_Root_Tips_cDNA_P Parameter: Tissue Value: Root Tips
  misc_feature: MA Experiment ID: 20000234 Result: Up-regulated in Transcription
  misc_feature: MA Experiment 20000234 PARAMETER Experiment Name: At_Siliques_P Parameter: Age (day) Value: 21
  misc_feature: MA Experiment 20000234 PARAMETER Experiment Name: At_Siliques_P Parameter: Organism Value: A. thaliana
  misc_feature: MA Experiment 20000234 PARAMETER Experiment Name: At_Siliques_P Parameter: Plant Line Value: WS
  misc_feature: MA Experiment 20000234 PARAMETER Experiment Name: At_Siliques_P Parameter: Tissue Value: Less Than 5mm Siliques vs. Whole Plant
  misc_feature: MA Experiment ID: 20000495 Result: Up-regulated in Transcription
  misc_feature: MA Experiment 20000495 PARAMETER Experiment Name: At_Guard_Cells_P Parameter: Harvest Date Value: 8/2/2002
  misc_feature: MA Experiment 20000495 PARAMETER Experiment Name: At_Guard_Cells_P Parameter: Organism Value: A. thaliana
  misc_feature: MA Experiment 20000495 PARAMETER Experiment Name: At_Guard_Cells_P Parameter: Tissue Value: Guard Cells vs. Leaves
ccgtcttcaccgtttccttccacgcctccgccggcaagctagttttctgactggagttccatcgtggacgccgtaatccctctttttcgtactggtaaattcttttcaatagattatctttgtgatttatatatcaagtctacaatctaaatcggagacgagattcggaaacctcactatcgattccaaacttcaattcagattatcttcctaaaaatgaagattcttacactcgtaatgcttttatgctactcgttcgtctcttctaccggagatacgactatccacacaaacaattgggctgttttggtctgcacttctcgcttctggtttaactaccggcacatggccaatactctgtccctctataggacagtcaagagacttggaataccagatgagaggatcattcttatgctggctgatgatatggcctgtaatgctagaaatgaatatcctgctcaagttttcaacaatgaaaaccacaaacttaacctctatggagataacgttgaggtagattatcgtggatatgaggtaacagttgaaaatttcttacgggttttgactgggcgtcatgagaatgctgttccaaggtcaaagcgtctcctcagtgatgagggtagccatatactactgtacatgactgggcatggaggtgatgaatttttgaagtttcaagatgcagaagaactccagagtcacgatttagcagatgctgtaaaacaaatgaaagagaagcgtagattcaaggagctgatgataatggttgatacttgccaagctgccactctctttaatcagcttcaatctcctggtgttttggctattggtagcagtctaaaaggagagaactcatattcccatcacctggattcagatattggtgtatctgttgtagatcggtttacatattacactcttgcattctttgagaggctcaatatatatgacaatgcatcacttaacagtttatttaggtcctacgatccgagactgctaatgtctactgcctactaccggactgatctttaccaaccacatctggtggaggtaccggtcacaaatttcttcggttcagttatggagaccattcatactgattcagcttacaaagctttctcaagtaaaatctccgaaagaaagatcaattctgagatgccattcaatcaactttccgaacacgatcttaaagaagagcttgagaatacaaacataccaaacgatgagttgatagctgagaagcaaaaatgcccatattcacaaatgcgggcagacctccacgagaaagtggagaagcttgaaaatgtcgatacagtggttaacctcagcatagcagtgatggtactcgctgtaatggtctcatcatctttactacgatgaagaactgatataatcatctgcacttcacttaatctatgtagtctgattcactgttgcagcttcacacccattttgtaattttttgcacaatgctataaaaaaaa

SEQ ID NO: 90399 - protein, 388 aa, Arabidopsis thaliana
  peptide (1)..(388): Ceres Seq. ID no. 12723757
  misc_feature (2)..(327): Pfam Name: Peptidase C13 family Pfam Description: Peptidase C13 family
  misc_feature (1)..(388): Homolog of NCBI NO: 18390936 NR Description: putative GPI-anchor transamidase (U32517); id: At1g08750.1, supported by cDNA: 120167. [Arabidopsis
  misc_feature (1)..(388): Homolog of NCBI NO: 21537105 NR Description: putative GPI-anchor transamidase [Arabidopsis
  misc_feature (1)..(342): Homolog of NCBI NO: 7485988 NR Description: hypothetical protein F22O13.26 - Arabidopsis
  misc_feature (1)..(342): Homolog of NCBI NO: 9802563 NR Description: F22O13.24 [Arabidopsis thaliana]
  misc_feature (14)..(329): Homolog of NCBI NO: 24639234 NR Description: CG4406-PA [Drosophila melanogaster]
  misc_feature (14)..(296): Homolog of NCBI NO: 7511896 NR Description: hypothetical protein 133E12.3 - fruit fly melanogaster) >gi|2661523|emb|CAA15687.1| version:''084'',
  misc_feature (24)..(383): Homolog of NCBI NO: 6320538 NR Description: Protein involved in the attachment of
  misc_feature (24)..(345): Homolog of NCBI NO: 1518259 NR Description: gpi8 [Homo sapiens]
  misc_feature (24)..(345): Homolog of NCBI NO: 23199983 NR Description: phosphatidylinositol glycan, class K precursor
  misc_feature (1)..(306): Homolog of NCBI NO: 29788753 NR Description: phosphatidylinositol glycan, class K [Mus >gi|26346805|dbj|BAC37051.1| unnamed protein product [Mus >gi|26349979|dbj|BAC38629.1| unnamed protein product [Mus
MKILTLVMLLCYSFVSSTGDTTIHTNNWAVLVCTSRFWFNYRHMANTLSLYRTVKRLGIPDERIILMLADDMACNARNEYPAQVFNNENHKLNLYGDNVEVDYRGYEVTVENFLRVLTGRHENAVPRSKRLLSDEGSHILLYMTGHGGDEFLKFQDAEELQSHDLADAVKQMKEKRRFKELMIMVDTCQAATLFNQLQSPGVLAIGSSLKGENSYSHHLDSDIGVSVVDRFTYYTLAFFERLNIYDNASLNSLFRSYDPRLLMSTAYYRTDLYQPHLVEVPVTNFFGSVMETIHTDSAYKAFSSKISERKINSEMPFNQLSEHDLKEELENTNIPNDELIAEKQKCPYSQMRADLHEKVEKLENVDTVVNLSIAVMVLAVMVSSSLLR

SEQ ID NO: 90400 - protein, 381 aa, Arabidopsis thaliana
  peptide (1)..(381): Ceres Seq. ID no. 12723758
  misc_feature (1)..(320): Pfam Name: Peptidase C13 family Pfam Description: Peptidase C13 family
  misc_feature (1)..(381): Homolog of NCBI NO: 18390936 NR Description: putative GPI-anchor transamidase (U32517); id: At1g08750.1, supported by cDNA: 120167. [Arabidopsis
  misc_feature (1)..(381): Homolog of NCBI NO: 21537105 NR Description: putative GPI-anchor transamidase [Arabidopsis
  misc_feature (1)..(335): Homolog of NCBI NO: 7485988 NR Description: hypothetical protein F22O13.26 - Arabidopsis
  misc_feature (1)..(335): Homolog of NCBI NO: 9802563 NR Description: F22O13.24 [Arabidopsis thaliana]
  misc_feature (7)..(322): Homolog of NCBI NO: 24639234 NR Description: CG4406-PA [Drosophila melanogaster]
  misc_feature (7)..(289): Homolog of NCBI NO: 7511896 NR Description: hypothetical protein 133E12.3 - fruit fly melanogaster) >gi|2661523|emb|CAA15687.1| version:''084'',
  misc_feature (17)..(376): Homolog of NCBI NO: 6320538 NR Description: Protein involved in the attachment of
  misc_feature (17)..(338): Homolog of NCBI NO: 1518259 NR Description: gpi8 [Homo sapiens]
  misc_feature (17)..(338): Homolog of NCBI NO: 23199983 NR Description: phosphatidylinositol glycan, class K precursor
  misc_feature (1)..(299): Homolog of NCBI NO: 29788753 NR Description: phosphatidylinositol glycan, class K [Mus >gi|26346805|dbj|BAC37051.1| unnamed protein product [Mus >gi|26349979|dbj|BAC38629.1| unnamed protein product [Mus
MLLCYSFVSSTGDTTIHTNNWAVLVCTSRFWFNYRHMANTLSLYRTVKRLGIPDERIILMLADDMACNARNEYPAQVFNNENHKLNLYGDNVEVDYRGYEVTVENFLRVLTGRHENAVPRSKRLLSDEGSHILLYMTGHGGDEFLKFQDAEELQSHDLADAVKQMKEKRRFKELMIMVDTCQAATLFNQLQSPGVLAIGSSLKGENSYSHHLDSDIGVSVVDRFTYYTLAFFERLNIYDNASLNSLFRSYDPRLLMSTAYYRTDLYQPHLVEVPVTNFFGSVMETIHTDSAYKAFSSKISERKINSEMPFNQLSEHDLKEELENTNIPNDELIAEKQKCPYSQMRADLHEKVEKLENVDTVVNLSIAVMVLAVMVSSSLLR

SEQ ID NO: 90401 - protein, 345 aa, Arabidopsis thaliana
  peptide (1)..(345): Ceres Seq. ID no. 12723759
  misc_feature (1)..(284): Pfam Name: Peptidase C13 family Pfam Description: Peptidase C13 family
  misc_feature (1)..(345): Homolog of NCBI NO: 18390936 NR Description: putative GPI-anchor transamidase (U32517); id: At1g08750.1, supported by cDNA: 120167. [Arabidopsis
  misc_feature (1)..(345): Homolog of NCBI NO: 21537105 NR Description: putative GPI-anchor transamidase [Arabidopsis
  misc_feature (1)..(299): Homolog of NCBI NO: 7485988 NR Description: hypothetical protein F22O13.26 - Arabidopsis
  misc_feature (1)..(299): Homolog of NCBI NO: 9802563 NR Description: F22O13.24 [Arabidopsis thaliana]
  misc_feature (1)..(286): Homolog of NCBI NO: 24639234 NR Description: CG4406-PA [Drosophila melanogaster]
  misc_feature (1)..(253): Homolog of NCBI NO: 7511896 NR Description: hypothetical protein 133E12.3 - fruit fly melanogaster) >gi|2661523|emb|CAA15687.1| version:''084'',
  misc_feature (1)..(340): Homolog of NCBI NO: 6320538 NR Description: Protein involved in the attachment of
  misc_feature (1)..(302): Homolog of NCBI NO: 1518259 NR Description: gpi8 [Homo sapiens]
  misc_feature (1)..(302): Homolog of NCBI NO: 23199983 NR Description: phosphatidylinositol glycan, class K precursor
  misc_feature (1)..(263): Homolog of NCBI NO: 29788753 NR Description: phosphatidylinositol glycan, class K [Mus >gi|26346805|dbj|BAC37051.1| unnamed protein product [Mus >gi|26349979|dbj|BAC38629.1| unnamed protein product [Mus
MANTLSLYRTVKRLGIPDERIILMLADDMACNARNEYPAQVFNNENHKLNLYGDNVEVDYRGYEVTVENFLRVLTGRHENAVPRSKRLLSDEGSHILLYMTGHGGDEFLKFQDAEELQSHDLADAVKQMKEKRRFKELMIMVDTCQAATLFNQLQSPGVLAIGSSLKGENSYSHHLDSDIGVSVVDRFTYYTLAFFERLNIYDNASLNSLFRSYDPRLLMSTAYYRTDLYQPHLVEVPVTNFFGSVMETIHTDSAYKAFSSKISERKINSEMPFNQLSEHDLKEELENTNIPNDELIAEKQKCPYSQMRADLHEKVEKLENVDTVVNLSIAVMVLAVMVSSSLLR

SEQ ID NO: 90402 - DNA, 1240 bp, Arabidopsis thaliana
  misc_feature (1)..(1240): Ceres Seq. ID no. 12723764
  misc_feature: MA Experiment ID: 108577 Result: Down-regulated in Transcription
  misc_feature: MA Experiment 108577 PARAMETER Experiment Name: At_42deg_Heat_cDNA_P Parameter: Temperature (deg C) Value: 42 vs. 22
  misc_feature: MA Experiment 108577 PARAMETER Experiment Name: At_42deg_Heat_cDNA_P Parameter: Timepoint (hr) Value: 6
  misc_feature: MA Experiment 108577 PARAMETER Experiment Name: At_42deg_Heat_cDNA_P Parameter: Tissue Value: Aerial
  misc_feature: MA Experiment ID: 108579 Result: Down-regulated in Transcription
  misc_feature: MA Experiment 108579 PARAMETER Experiment Name: At_4deg_Cold_cDNA_P Parameter: Temperature (deg C) Value: 4 vs. 22
  misc_feature: MA Experiment 108579 PARAMETER Experiment Name: At_4deg_Cold_cDNA_P Parameter: Timepoint (hr) Value: 6
  misc_feature: MA Experiment 108579 PARAMETER Experiment Name: At_4deg_Cold_cDNA_P Parameter: Tissue Value: Aerial
  misc_feature: MA Experiment ID: 20000173 Result: Down-regulated in Transcription
  misc_feature: MA Experiment 20000173 PARAMETER Experiment Name: At_42deg_Heat_P Parameter: Age (day) Value: 14
  misc_feature: MA Experiment 20000173 PARAMETER Experiment Name: At_42deg_Heat_P Parameter: Organism Value: A. thaliana
  misc_feature: MA Experiment 20000173 PARAMETER Experiment Name: At_42deg_Heat_P Parameter: Plant Line Value: WS
  misc_feature: MA Experiment 20000173 PARAMETER Experiment Name: At_42deg_Heat_P Parameter: Temperature (deg C) Value: 42 vs. 22
  misc_feature: MA Experiment 20000173 PARAMETER Experiment Name: At_42deg_Heat_P Parameter: Timepoint (hr) Value: 6
  misc_feature: MA Experiment 20000173 PARAMETER Experiment Name: At_42deg_Heat_P Parameter: Tissue Value: Aerial
  misc_feature: MA Experiment ID: 20000184 Result: Down-regulated in Transcription
  misc_feature: MA Experiment 20000184 PARAMETER Experiment Name: At_Shoots__P Parameter: Age (day) Value: 7
  misc_feature: MA Experiment 20000184 PARAMETER Experiment Name: At_Shoots__P Parameter: Tissue Value: Shoots vs. Whole Plant
  misc_feature: MA Experiment ID: 20000185 Result: Down-regulated in Transcription
  misc_feature: MA Experiment 20000185 PARAMETER Experiment Name: At_Roots__P Parameter: Age (day) Value: 7 vs. 21
  misc_feature: MA Experiment 20000185 PARAMETER Experiment Name: At_Roots__P Parameter: Organism Value: A. thaliana
  misc_feature: MA Experiment 20000185 PARAMETER Experiment Name: At_Roots__P Parameter: Tissue Value: Roots vs. Whole Plant
  misc_feature: MA Experiment ID: 20000227 Result: Down-regulated in Transcription
  misc_feature: MA Experiment 20000227 PARAMETER Experiment Name: At_Root-Tips-vs-Tops_P Parameter: Tissue Value: Root Tips vs. Root Tops
  misc_feature: MA Experiment ID: 20000234 Result: Down-regulated in Transcription
  misc_feature: MA Experiment 20000234 PARAMETER Experiment Name: At_Siliques_P Parameter: Age (day) Value: 21
  misc_feature: MA Experiment 20000234 PARAMETER Experiment Name: At_Siliques_P Parameter: Organism Value: A. thaliana
  misc_feature: MA Experiment 20000234 PARAMETER Experiment Name: At_Siliques_P Parameter: Plant Line Value: WS
  misc_feature: MA Experiment 20000234 PARAMETER Experiment Name: At_Siliques_P Parameter: Tissue Value: Less Than 5mm Siliques vs. Whole Plant
  misc_feature: MA Experiment ID: 20000265 Result: Down-regulated in Transcription
  misc_feature: MA Experiment 20000265 PARAMETER Experiment Name: At_Open_Flower_P Parameter: Age (day) Value: 21
  misc_feature: MA Experiment 20000265 PARAMETER Experiment Name: At_Open_Flower_P Parameter: Plant Line Value: WS
  misc_feature: MA Experiment 20000265 PARAMETER Experiment Name: At_Open_Flower_P Parameter: Tissue Value: Closed Flower vs. Whole Plant
  misc_feature: MA Experiment ID: 20000286 Result: Down-regulated in Transcription
  misc_feature: MA Experiment 20000286 PARAMETER Experiment Name: At_Open_Flower_P Parameter: Age (day) Value: 21
  misc_feature: MA Experiment 20000286 PARAMETER Experiment Name: At_Open_Flower_P Parameter: Plant Line Value: WS
  misc_feature: MA Experiment 20000286 PARAMETER Experiment Name: At_Open_Flower_P Parameter: Tissue Value: Half Open vs. Whole Plant
  misc_feature: MA Experiment ID: 20000439 Result: Down-regulated in Transcription
  misc_feature: MA Experiment 20000439 PARAMETER Experiment Name: At_Roots__P Parameter: Age (day) Value: 14 vs. 21
  misc_feature: MA Experiment 20000439 PARAMETER Experiment Name: At_Roots__P Parameter: Organism Value: A. thaliana
  misc_feature: MA Experiment 20000439 PARAMETER Experiment Name: At_Roots__P Parameter: Tissue Value: Roots vs. Whole Plant
  misc_feature: MA Experiment ID: 20000451 Result: Down-regulated in Transcription
  misc_feature: MA Experiment 20000451 PARAMETER Experiment Name: At_CS6879_Shoots-Roots_P Parameter: Age (day) Value: 14
  misc_feature: MA Experiment 20000451 PARAMETER Experiment Name: At_CS6879_Shoots-Roots_P Parameter: Organism Value: A. thaliana
  misc_feature: MA Experiment 20000451 PARAMETER Experiment Name: At_CS6879_Shoots-Roots_P Parameter: Plant Line Value: CS6879 vs. WS
  misc_feature: MA Experiment 20000451 PARAMETER Experiment Name: At_CS6879_Shoots-Roots_P Parameter: Tissue Value: Roots
  misc_feature: MA Experiment ID: 20000496 Result: Down-regulated in Transcription
  misc_feature: MA Experiment 20000496 PARAMETER Experiment Name: At_Guard_Cells_P Parameter: Harvest Date Value: 7/19/2002
  misc_feature: MA Experiment 20000496 PARAMETER Experiment Name: At_Guard_Cells_P Parameter: Organism Value: Canola
  misc_feature: MA Experiment 20000496 PARAMETER Experiment Name: At_Guard_Cells_P Parameter: Tissue Value: Guard Cells vs. Leaves
  misc_feature: MA Experiment ID: 20001557 Result: Down-regulated in Transcription
  misc_feature: MA Experiment 20001557 PARAMETER Experiment Name: At_Drought_Soil_Dry_P Parameter: Age (day) Value: 27
  misc_feature: MA Experiment 20001557 PARAMETER Experiment Name: At_Drought_Soil_Dry_P Parameter: Organism Value: A. thaliana
  misc_feature: MA Experiment 20001557 PARAMETER Experiment Name: At_Drought_Soil_Dry_P Parameter: Plant Line Value: WS
  misc_feature: MA Experiment 20001557 PARAMETER Experiment Name: At_Drought_Soil_Dry_P Parameter: Post Timepoint (hr) Value: 3
  misc_feature: MA Experiment 20001557 PARAMETER Experiment Name: At_Drought_Soil_Dry_P Parameter: Post-Treatment Value: Re-Water vs. No Drought
  misc_feature: MA Experiment 20001557 PARAMETER Experiment Name: At_Drought_Soil_Dry_P Parameter: Timepoint (day) Value: 13
  misc_feature: MA Experiment 20001557 PARAMETER Experiment Name: At_Drought_Soil_Dry_P Parameter: Treatment Value: Drought vs. No Drought
  misc_feature: MA Experiment ID: 20001558 Result: Down-regulated in Transcription
  misc_feature: MA Experiment 20001558 PARAMETER Experiment Name: At_Drought_Soil_Dry_P Parameter: Age (day) Value: 27
  misc_feature: MA Experiment 20001558 PARAMETER Experiment Name: At_Drought_Soil_Dry_P Parameter: Organism Value: A. thaliana
  misc_feature: MA Experiment 20001558 PARAMETER Experiment Name: At_Drought_Soil_Dry_P Parameter: Plant Line Value: WS
  misc_feature: MA Experiment 20001558 PARAMETER Experiment Name: At_Drought_Soil_Dry_P Parameter: Post Timepoint (hr) Value: 6
  misc_feature: MA Experiment 20001558 PARAMETER Experiment Name: At_Drought_Soil_Dry_P Parameter: Post-Treatment Value: Re-Water vs. No Drought
  misc_feature: MA Experiment 20001558 PARAMETER Experiment Name: At_Drought_Soil_Dry_P Parameter: Timepoint (day) Value: 13
  misc_feature: MA Experiment 20001558 PARAMETER Experiment Name: At_Drought_Soil_Dry_P Parameter: Treatment Value: Drought vs. No Drought
  misc_feature: MA Experiment ID: 20001560 Result: Down-regulated in Transcription
  misc_feature: MA Experiment 20001560 PARAMETER Experiment Name: At_Drought_Soil_Dry_P Parameter: Age (day) Value: 28
  misc_feature: MA Experiment 20001560 PARAMETER Experiment Name: At_Drought_Soil_Dry_P Parameter: Organism Value: A. thaliana
  misc_feature: MA Experiment 20001560 PARAMETER Experiment Name: At_Drought_Soil_Dry_P Parameter: Plant Line Value: WS
  misc_feature: MA Experiment 20001560 PARAMETER Experiment Name: At_Drought_Soil_Dry_P Parameter: Post Timepoint (hr) Value: None
  misc_feature: MA Experiment 20001560 PARAMETER Experiment Name: At_Drought_Soil_Dry_P Parameter: Post-Treatment Value: None
  misc_feature: MA Experiment 20001560 PARAMETER Experiment Name: At_Drought_Soil_Dry_P Parameter: Timepoint (day) Value: 14
  misc_feature: MA Experiment 20001560 PARAMETER Experiment Name: At_Drought_Soil_Dry_P Parameter: Treatment Value: Drought vs. No Drought
  misc_feature: MA Experiment ID: 20001905 Result: Down-regulated in Transcription
  misc_feature: MA Experiment 20001905 PARAMETER Experiment Name: At_Drought_Reproduction_P Parameter: Age (day) Value: 40
  misc_feature: MA Experiment 20001905 PARAMETER Experiment Name: At_Drought_Reproduction_P Parameter: Organism Value: A. thaliana
  misc_feature: MA Experiment 20001905 PARAMETER Experiment Name: At_Drought_Reproduction_P Parameter: Plant Line Value: WS
  misc_feature: MA Experiment 20001905 PARAMETER Experiment Name: At_Drought_Reproduction_P Parameter: Timepoint (day) Value: 10
  misc_feature: MA Experiment 20001905 PARAMETER Experiment Name: At_Drought_Reproduction_P Parameter: Tissue Value: Rosettes
  misc_feature: MA Experiment 20001905 PARAMETER Experiment Name: At_Drought_Reproduction_P Parameter: Treatment Value: Drought vs. No Drought
  misc_feature: MA Experiment ID: 20001906 Result: Down-regulated in Transcription
  misc_feature: MA Experiment 20001906 PARAMETER Experiment Name: At_Drought_Reproduction_P Parameter: Age (day) Value: 35
  misc_feature: MA Experiment 20001906 PARAMETER Experiment Name: At_Drought_Reproduction_P Parameter: Organism Value: A. thaliana
  misc_feature: MA Experiment 20001906 PARAMETER Experiment Name: At_Drought_Reproduction_P Parameter: Plant Line Value: WS
  misc_feature: MA Experiment 20001906 PARAMETER Experiment Name: At_Drought_Reproduction_P Parameter: Timepoint (day) Value: 5
  misc_feature: MA Experiment 20001906 PARAMETER Experiment Name: At_Drought_Reproduction_P Parameter: Tissue Value: Siliques
  misc_feature: MA Experiment 20001906 PARAMETER Experiment Name: At_Drought_Reproduction_P Parameter: Treatment Value: Drought vs. No Drought
ctcagacaatgtggatctcagatgtttgctgtatttttggttggctcgctgtagcgtttgcacatgatattataatgcttaatactggacgactcttcttggggtttggggttggtctcattagttatgtggttcctgtgtatatagcagaaattacacccaaaacatttcgtggaggattttcttattccaatcagcttctacaatgtcttgggatttcactcatgttcttcaccggaaactttttccattggcgaacattagctcttttaagtgcaatcccaagtgctttccaagtgatatgtttattttttattcctgaatctcctagatggctggcgatgtatggtcaagatcaagagcttgaagtttcgttgaaaaaactaaggggagaaaatagtgatattctaaaggaagctgctgaaatcagagaaacagtggaaatatccagaaaagagtctcaaagtggaataagagacttgttccatatcggaaacgcacattcgttaatcattggattgggtttaatgctcttgcaacaattttgtgggagtgcggcgataagtgcttatgctgctcgaattttcgacaaagccggttttccaagcgacataggaacaaccatcctcgcagtgattctgataccgcaatctatagttgtcatgttaaccgttgaccgatggggacgccgaccacttcttatgatttcttctatcggaatgtgcatatgctcattttttattggcctttcatactaccttcagaagaatggtgaatttcagaagttatgttccgttatgttaatcgtcggtttagtgggttatgtctcatcctttggcattggcctaggtggattaccatgggttataatgtctgagatatttccggtgaatgtgaaaatcaccgccggtagccttgtaacgatgtcaaattggttttttaattggattatcatctatagttttaatttcatgatacagtggagcgcttccggaacatatttcatattttctggagtttctctggtgacgatcgtattcatatggacattggtgcctgagacgaaaggccgaacactcgaagagattcaaacatcattagtccgactttcgtaaaatctaagtatggattatacgtaatgttaagtctcttgaatagtctttttaaccgtatattaatgtttggttaaataagcgttttctctcactttgattaaatagtaataatggctatgatttta

SEQ ID NO: 90403 - protein, 370 aa, Arabidopsis thaliana
  peptide (1)..(370): Ceres Seq. ID no. 12723765
  misc_feature (2)..(143): Pfam Name: Sugar (and other) transporter Pfam Description: Sugar (and other) transporter
  misc_feature (2)..(143): Homolog of NCBI NO: 25407061 NR Description: hypothetical protein [imported] - Arabidopsis >gi|2342688|gb|AAB70414.1| Similar to Beta integral membrane
  misc_feature (271)..(370): Homolog of NCBI NO: 25407061 NR Description: hypothetical protein [imported] - Arabidopsis >gi|2342688|gb|AAB70414.1| Similar to Beta integral membrane
  misc_feature (2)..(367): Homolog of NCBI NO: 14585699 NR Description: sugar-porter family protein 1 [Arabidopsis
  misc_feature (2)..(367): Homolog of NCBI NO: 18421106 NR Description: sugar transporter-like protein; protein id: supported by cDNA: gi_14585698, supported by cDNA: gi_15294181
  misc_feature (1)..(206): Homolog of NCBI NO: 6686829 NR Description: putative sugar transporter [Arabidopsis thaliana]
  misc_feature (1)..(368): Homolog of NCBI NO: 18421108 NR Description: sugar transporter-like protein; protein id:
  misc_feature (2)..(369): Homolog of NCBI NO: 22330860 NR Description: sugar transporter, putative; protein id: supported by cDNA: gi_17380763, supported by cDNA: gi_20259596 thaliana] >gi|17380764|gb|AAL36212.1| putative sugar transporter
  misc_feature (2)..(366): Homolog of NCBI NO: 18390957 NR Description: putative sugar transport protein, ERD6; protein At1g08920.1, supported by cDNA: gi_14194108 [Arabidopsis >gi|14194109|gb|AAK56249.1|AF367260_1 At1g08920/F7G19_20
  misc_feature (2)..(366): Homolog of NCBI NO: 30680865 NR Description: sugar transporter, putative [Arabidopsis thaliana]
  misc_feature (2)..(366): Homolog of NCBI NO: 6686827 NR Description: putative sugar transporter [Arabidopsis thaliana]
QTMWISDVCCIFGWLAVAFAHDIIMLNTGRLFLGFGVGLISYVVPVYIAEITPKTFRGGFSYSNQLLQCLGISLMFFTGNFFHWRTLALLSAIPSAFQVICLFFIPESPRWLAMYGQDQELEVSLKKLRGENSDILKEAAEIRETVEISRKESQSGIRDLFHIGNAHSLIIGLGLMLLQQFCGSAAISAYAARIFDKAGFPSDIGTTILAVILIPQSIVVMLTVDRWGRRPLLMISSIGMCICSFFIGLSYYLQKNGEFQKLCSVMLIVGLVGYVSSFGIGLGGLPWVIMSEIFPVNVKITAGSLVTMSNWFFNWIIIYSFNFMIQWSASGTYFIFSGVSLVTIVFIWTLVPETKGRTLEEIQTSLVRLS

SEQ ID NO: 90404 - protein, 368 aa, Arabidopsis thaliana
  peptide (1)..(368): Ceres Seq. ID no. 12723766
  misc_feature (1)..(141): Pfam Name: Sugar (and other) transporter Pfam Description: Sugar (and other) transporter
  misc_feature (1)..(141): Homolog of NCBI NO: 25407061 NR Description: hypothetical protein [imported] - Arabidopsis >gi|2342688|gb|AAB70414.1| Similar to Beta integral membrane
  misc_feature (269)..(368): Homolog of NCBI NO: 25407061 NR Description: hypothetical protein [imported] - Arabidopsis >gi|2342688|gb|AAB70414.1| Similar to Beta integral membrane
  misc_feature (1)..(365): Homolog of NCBI NO: 14585699 NR Description: sugar-porter family protein 1 [Arabidopsis
  misc_feature (1)..(365): Homolog of NCBI NO: 18421106 NR Description: sugar transporter-like protein; protein id: supported by cDNA: gi_14585698, supported by cDNA: gi_15294181
  misc_feature (1)..(204): Homolog of NCBI NO: 6686829 NR Description: putative sugar transporter [Arabidopsis thaliana]
  misc_feature (1)..(366): Homolog of NCBI NO: 18421108 NR Description: sugar transporter-like protein; protein id:
  misc_feature (1)..(367): Homolog of NCBI NO: 22330860 NR Description: sugar transporter, putative; protein id: supported by cDNA: gi_17380763, supported by cDNA: gi_20259596 thaliana] >gi|17380764|gb|AAL36212.1| putative sugar transporter
  misc_feature (1)..(364): Homolog of NCBI NO: 18390957 NR Description: putative sugar transport protein, ERD6; protein At1g08920.1, supported by cDNA: gi_14194108 [Arabidopsis >gi|14194109|gb|AAK56249.1|AF367260_1 At1g08920/F7G19_20
  misc_feature (1)..(364): Homolog of NCBI NO: 30680865 NR Description: sugar transporter, putative [Arabidopsis thaliana]
  misc_feature (1)..(364): Homolog of NCBI NO: 6686827 NR Description: putative sugar transporter [Arabidopsis thaliana]
MWISDVCCIFGWLAVAFAHDIIMLNTGRLFLGFGVGLISYVVPVYIAEITPKTFRGGFSYSNQLLQCLGISLMFFTGNFFHWRTLALLSAIPSAFQVICLFFIPESPRWLAMYGQDQELEVSLKKLRGENSDILKEAAEIRETVEISRKESQSGIRDLFHIGNAHSLIIGLGLMLLQQFCGSAAISAYAARIFDKAGFPSDIGTTILAVILIPQSIVVMLTVDRWGRRPLLMISSIGMCICSFFIGLSYYLQKNGEFQKLCSVMLIVGLVGYVSSFGIGLGGLPWVIMSEIFPVNVKITAGSLVTMSNWFFNWIIIYSFNFMIQWSASGTYFIFSGVSLVTIVFIWTLVPETKGRTLEEIQTSLVRLS

SEQ ID NO: 90405 - protein, 346 aa, Arabidopsis thaliana
  peptide (1)..(346): Ceres Seq. ID no. 12723767
  misc_feature (1)..(119): Pfam Name: Sugar (and other) transporter Pfam Description: Sugar (and other) transporter
  misc_feature (1)..(119): Homolog of NCBI NO: 25407061 NR Description: hypothetical protein [imported] - Arabidopsis >gi|2342688|gb|AAB70414.1| Similar to Beta integral membrane
  misc_feature (247)..(346): Homolog of NCBI NO: 25407061 NR Description: hypothetical protein [imported] - Arabidopsis >gi|2342688|gb|AAB70414.1| Similar to Beta integral membrane
  misc_feature (1)..(343): Homolog of NCBI NO: 14585699 NR Description: sugar-porter family protein 1 [Arabidopsis
  misc_feature (1)..(343): Homolog of NCBI NO: 18421106 NR Description: sugar transporter-like protein; protein id: supported by cDNA: gi_14585698, supported by cDNA: gi_15294181
  misc_feature (1)..(182): Homolog of NCBI NO: 6686829 NR Description: putative sugar transporter [Arabidopsis thaliana]
  misc_feature (1)..(344): Homolog of NCBI NO: 18421108 NR Description: sugar transporter-like protein; protein id:
  misc_feature (1)..(345): Homolog of NCBI NO: 22330860 NR Description: sugar transporter, putative; protein id: supported by cDNA: gi_17380763, supported by cDNA: gi_20259596 thaliana] >gi|17380764|gb|AAL36212.1| putative sugar transporter
  misc_feature (1)..(342): Homolog of NCBI NO: 18390957 NR Description: putative sugar transport protein, ERD6; protein At1g08920.1, supported by cDNA: gi_14194108 [Arabidopsis >gi|14194109|gb|AAK56249.1|AF367260_1 At1g08920/F7G19_20
  misc_feature (1)..(342): Homolog of NCBI NO: 30680865 NR Description: sugar transporter, putative [Arabidopsis thaliana]
  misc_feature (1)..(342): Homolog of NCBI NO: 6686827 NR Description: putative sugar transporter [Arabidopsis thaliana]
MLNTGRLFLGFGVGLISYVVPVYIAEITPKTFRGGFSYSNQLLQCLGISLMFFTGNFFHWRTLALLSAIPSAFQVICLFFIPESPRWLAMYGQDQELEVSLKKLRGENSDILKEAAEIRETVEISRKESQSGIRDLFHIGNAHSLIIGLGLMLLQQFCGSAAISAYAARIFDKAGFPSDIGTTILAVILIPQSIVVMLTVDRWGRRPLLMISSIGMCICSFFIGLSYYLQKNGEFQKLCSVMLIVGLVGYVSSFGIGLGGLPWVIMSEIFPVNVKITAGSLVTMSNWFFNWIIIYSFNFMIQWSASGTYFIFSGVSLVTIVFIWTLVPETKGRTLEEIQTSLVRLS

SEQ ID NO: 90406 - DNA, 1532 bp, Arabidopsis thaliana
  misc_feature (1)..(1532): Ceres Seq. ID no. 12723776
  misc_feature: MA Experiment ID: 20000327 Result: Down-regulated in Transcription
  misc_feature: MA Experiment 20000327 PARAMETER Experiment Name: At_42deg_Heat_Sub_P Parameter: Age (day) Value: 14
  misc_feature: MA Experiment 20000327 PARAMETER Experiment Name: At_42deg_Heat_Sub_P Parameter: Organism Value: A. thaliana
  misc_feature: MA Experiment 20000327 PARAMETER Experiment Name: At_42deg_Heat_Sub_P Parameter: Plant Line Value: WS
  misc_feature: MA Experiment 20000327 PARAMETER Experiment Name: At_42deg_Heat_Sub_P Parameter: Temperature (deg C) Value: 42 vs. 22
  misc_feature: MA Experiment 20000327 PARAMETER Experiment Name: At_42deg_Heat_Sub_P Parameter: Timepoint (hr) Value: 1
  misc_feature: MA Experiment 20000327 PARAMETER Experiment Name: At_42deg_Heat_Sub_P Parameter: Tissue Value: Aerial
  misc_feature: MA Experiment ID: 20000328 Result: Down-regulated in Transcription
  misc_feature: MA Experiment 20000328 PARAMETER Experiment Name: At_42deg_Heat_Sub_P Parameter: Age (day) Value: 14
  misc_feature: MA Experiment 20000328 PARAMETER Experiment Name: At_42deg_Heat_Sub_P Parameter: Organism Value: A. thaliana
  misc_feature: MA Experiment 20000328 PARAMETER Experiment Name: At_42deg_Heat_Sub_P Parameter: Plant Line Value: WS
  misc_feature: MA Experiment 20000328 PARAMETER Experiment Name: At_42deg_Heat_Sub_P Parameter: Temperature (deg C) Value: 42 vs. 22
  misc_feature: MA Experiment 20000328 PARAMETER Experiment Name: At_42deg_Heat_Sub_P Parameter: Timepoint (hr) Value: 6
  misc_feature: MA Experiment 20000328 PARAMETER Experiment Name: At_42deg_Heat_Sub_P Parameter: Tissue Value: Aerial
  misc_feature: MA Experiment ID: 20000347 Result: Up-regulated in Transcription
  misc_feature: MA Experiment 20000347 PARAMETER Experiment Name: At_2mM_SA_Sub_P Parameter: Age (day) Value: 14
  misc_feature: MA Experiment 20000347 PARAMETER Experiment Name: At_2mM_SA_Sub_P Parameter: Organism Value: A. thaliana
  misc_feature: MA Experiment 20000347 PARAMETER Experiment Name: At_2mM_SA_Sub_P Parameter: Plant Line Value: WS
  misc_feature: MA Experiment 20000347 PARAMETER Experiment Name: At_2mM_SA_Sub_P Parameter: Timepoint (hr) Value: 6
  misc_feature: MA Experiment 20000347 PARAMETER Experiment Name: At_2mM_SA_Sub_P Parameter: Tissue Value: Aerial
  misc_feature: MA Experiment 20000347 PARAMETER Experiment Name: At_2mM_SA_Sub_P Parameter: Treatment Value: 2mM SA vs. No Treatment
  misc_feature: MA Experiment ID: 20000348 Result: Up-regulated in Transcription
  misc_feature: MA Experiment 20000348 PARAMETER Experiment Name: At_100uM_ABA_Sub_P Parameter: Age (day) Value: 14
  misc_feature: MA Experiment 20000348 PARAMETER Experiment Name: At_100uM_ABA_Sub_P Parameter: Organism Value: A. thaliana
  misc_feature: MA Experiment 20000348 PARAMETER Experiment Name: At_100uM_ABA_Sub_P Parameter: Plant Line Value: WS
  misc_feature: MA Experiment 20000348 PARAMETER Experiment Name: At_100uM_ABA_Sub_P Parameter: Timepoint (hr) Value: 1
  misc_feature: MA Experiment 20000348 PARAMETER Experiment Name: At_100uM_ABA_Sub_P Parameter: Tissue Value: Aerial
  misc_feature: MA Experiment 20000348 PARAMETER Experiment Name: At_100uM_ABA_Sub_P Parameter: Treatment Value: 100uM ABA vs. No Treatment
  misc_feature: MA Experiment ID: 20000349 Result: Up-regulated in Transcription
  misc_feature: MA Experiment 20000349 PARAMETER Experiment Name: At_100uM_ABA_Sub_P Parameter: Age (day) Value: 14
  misc_feature: MA Experiment 20000349 PARAMETER Experiment Name: At_100uM_ABA_Sub_P Parameter: Organism Value: A. thaliana
  misc_feature: MA Experiment 20000349 PARAMETER Experiment Name: At_100uM_ABA_Sub_P Parameter: Plant Line Value: WS
  misc_feature: MA Experiment 20000349 PARAMETER Experiment Name: At_100uM_ABA_Sub_P Parameter: Timepoint (hr) Value: 6
  misc_feature: MA Experiment 20000349 PARAMETER Experiment Name: At_100uM_ABA_Sub_P Parameter: Tissue Value: Aerial
  misc_feature: MA Experiment 20000349 PARAMETER Experiment Name: At_100uM_ABA_Sub_P Parameter: Treatment Value: 100uM ABA vs. No Treatment
  misc_feature: MA Experiment ID: 20000352 Result: Up-regulated in Transcription
  misc_feature: MA Experiment 20000352 PARAMETER Experiment Name: At_Drought_Sub_P Parameter: Age (day) Value: 7
  misc_feature: MA Experiment 20000352 PARAMETER Experiment Name: At_Drought_Sub_P Parameter: Organism Value: A. thaliana
  misc_feature: MA Experiment 20000352 PARAMETER Experiment Name: At_Drought_Sub_P Parameter: Plant Line Value: WS
  misc_feature: MA Experiment 20000352 PARAMETER Experiment Name: At_Drought_Sub_P Parameter: Timepoint (hr) Value: 6
  misc_feature: MA Experiment 20000352 PARAMETER Experiment Name: At_Drought_Sub_P Parameter: Tissue Value: Whole Plant
  misc_feature: MA Experiment 20000352 PARAMETER Experiment Name: At_Drought_Sub_P Parameter: Treatment Value: Drought vs. No Drought
  misc_feature: MA Experiment ID: 20000355 Result: Down-regulated in Transcription
  misc_feature: MA Experiment 20000355 PARAMETER Experiment Name: At_Siliques_Sub_P Parameter: Age (day) Value: 21
  misc_feature: MA Experiment 20000355 PARAMETER Experiment Name: At_Siliques_Sub_P Parameter: Organism Value: A. thaliana
  misc_feature: MA Experiment 20000355 PARAMETER Experiment Name: At_Siliques_Sub_P Parameter: Plant Line Value: WS
  misc_feature: MA Experiment 20000355 PARAMETER Experiment Name: At_Siliques_Sub_P Parameter: Tissue Value: Less Than 5mm Siliques vs. Whole Plant
  misc_feature: MA Experiment ID: 20000440 Result: Down-regulated in Transcription
  misc_feature: MA Experiment 20000440 PARAMETER Experiment Name: At_Closed-Flower__Sub_P Parameter: Tissue Value: Closed Flower vs. Whole Plant
gaagcctaccaaccacatgcacactaattctactcgccaaataaagtgaaaagagatggctgatggaggaaaggtggtctgcgtaaccggagcttccggttacatagcgtcttggatcgtcaagcttttgctcttccgtggctacaccatcaatgccaccgttcgagacccaagtttgaattccttcttctctctttcttttttcctcctgatttctccttagtaatatcgaagacaatccctctttgtcactcacttgaataatcaaagttatctagatgctttttagagatacaagtgacaattcagagaaaattaagaatattagctaagcaaatccaactatccaagagaaagtattttgtaggtacttggtacgattaagagttggttctatggccaaaaaagtatgtttttggtttcattctctaaaaggaagtatacattaacaaacgaaaattcaaatgaactcacatgtagtggatatagatggggtgaaactttggtcgatgtttagagccaaaaactaaataagcatttatgttatcttgaagtgcactttgacatatatgtgtttttctccagaagatcgaaagaaaacagatcaccttctagcacttgacggcgcaaaagaaagactcaaattattcaaagcagatcttctagatgaaggttcttttgagctcgcaattgatggatgcgagactgtcttccacactgcttcaccggttgcaatcactgtcaagactgatcctcaggttgagctgatcaatccagccgtcaatggtactattaacgtcctaagaacttgcactaaagtgtcttctgtcaagagggtcatcttaacatcgtccatggccgcagttcttgcgcctgagaccaagttgggaccaaacgatgtagtagacgaaaccttcttcactaatccaagttttgctgaggagagaaagcaatggtatgtactttctaagactttggccgaagatgcagcatggcgatttgccaaggacaatgagatcgacttgatcgtactgaatccgggacttgtgactggaccaatcttgcagccaactcttaatttctcggtagctgtgattgtggaacttatgaaaggcaagaatccttttaatactacacatcataggttcgtggacgtgagagatgttgctctagctcatgtaaaggcactcgagactccttcagccaatggcagatatatcattgatggtccggttgtgacaataaaagacattgaaaacgttttgcgcgaattctttcctgatttgtgtattgctgataggaatgaagacattactgagctgaattcagtgactttcaatgtgtgtctggataaagtgaaaagtttgggaataattgagttcactcctacagaaacaagccttagagacactgttcttagtctcaaggagaaatgtcttgtgtgatcttctttattgtttttggttacttgttattccttgcaggtctatatacatttcacaaattataattaagtcttacatgttatttaa

SEQ ID NO: 90407 - protein, 291 aa, Arabidopsis thaliana
  peptide (1)..(291): Ceres Seq. ID no. 12723777
  misc_feature (24)..(232): Pfam Name: NAD dependent epimerase/dehydratase family Pfam Description: NAD dependent epimerase/dehydratase family
  misc_feature (5)..(291): Homolog of NCBI NO: 15217530 NR Description: putative cinnamyl alcohol dehydrogenase; protein At1g09500.1, supported by cDNA: gi_15983385, supported by cDNA: [Arabidopsis thaliana] >gi|25284020|pir||E86228 hypothetical
  misc_feature (1)..(291): Homolog of NCBI NO: 30681183 NR Description: cinnamyl-alcohol dehydrogenase (CAD) family
  misc_feature (1)..(291): Homolog of NCBI NO: 16648726 NR Description: At1g09500/F14J9_16 [Arabidopsis thaliana]
  misc_feature (5)..(291): Homolog of NCBI NO: 15217531 NR Description: putative cinnamyl alcohol dehydrogenase; protein At1g09510.1 [Arabidopsis thaliana] >gi|25284021|pir||F86228
  misc_feature (5)..(291): Homolog of NCBI NO: 15217529 NR Description: putative cinnamyl alcohol dehydrogenase; protein At1g09490.1, supported by cDNA: 32366., supported by cDNA: [Arabidopsis thaliana] >gi|25284017|pir||D86228 hypothetical
  misc_feature (7)..(291): Homolog of NCBI NO: 15217528 NR Description: putative cinnamyl alcohol dehydrogenase; protein
  misc_feature (7)..(291): Homolog of NCBI NO: 25284016 NR Description: hypothetical protein [imported] - Arabidopsis >gi|3482923|gb|AAC33208.1| Highly similar to cinnamyl alcohol
  misc_feature (4)..(291): Homolog of NCBI NO: 30697406 NR Description: cinnamyl-alcohol dehydrogenase (CAD) family
  misc_feature (20)..(291): Homolog of NCBI NO: 12597772 NR Description: cinnamyl alcohol dehydrogenase, putative
  misc_feature (5)..(288): Homolog of NCBI NO: 15239741 NR Description: cinnamyl-alcohol dehydrogenase - like protein;
MCFSPEDRKKTDHLLALDGAKERLKLFKADLLDEGSFELAIDGCETVFHTASPVAITVKTDPQVELINPAVNGTINVLRTCTKVSSVKRVILTSSMAAVLAPETKLGPNDVVDETFFTNPSFAEERKQWYVLSKTLAEDAAWRFAKDNEIDLIVLNPGLVTGPILQPTLNFSVAVIVELMKGKNPFNTTHHRFVDVRDVALAHVKALETPSANGRYIIDGPVVTIKDIENVLREFFPDLCIADRNEDITELNSVTFNVCLDKVKSLGIIEFTPTETSLRDTVLSLKEKCLV

SEQ ID NO: 90408 - protein, 196 aa, Arabidopsis thaliana; identical to SEQ ID NO: 81331
  peptide (1)..(196): Ceres Seq. ID no. 12723778
  misc_feature (1)..(137): Pfam Name: NAD dependent epimerase/dehydratase family Pfam Description: NAD dependent epimerase/dehydratase family
  misc_feature (1)..(196): Homolog of NCBI NO: 15217530 NR Description: putative cinnamyl alcohol dehydrogenase; protein At1g09500.1, supported by cDNA: gi_15983385, supported by cDNA: [Arabidopsis thaliana] >gi|25284020|pir||E86228 hypothetical
  misc_feature (1)..(196): Homolog of NCBI NO: 30681183 NR Description: cinnamyl-alcohol dehydrogenase (CAD) family
  misc_feature (1)..(196): Homolog of NCBI NO: 16648726 NR Description: At1g09500/F14J9_16 [Arabidopsis thaliana]
  misc_feature (1)..(196): Homolog of NCBI NO: 15217531 NR Description: putative cinnamyl alcohol dehydrogenase; protein At1g09510.1 [Arabidopsis thaliana] >gi|25284021|pir||F86228
  misc_feature (1)..(196): Homolog of NCBI NO: 15217529 NR Description: putative cinnamyl alcohol dehydrogenase; protein At1g09490.1, supported by cDNA: 32366., supported by cDNA: [Arabidopsis thaliana] >gi|25284017|pir||D86228 hypothetical
  misc_feature (1)..(196): Homolog of NCBI NO: 15217528 NR Description: putative cinnamyl alcohol dehydrogenase; protein
  misc_feature (1)..(196): Homolog of NCBI NO: 25284016 NR Description: hypothetical protein [imported] - Arabidopsis >gi|3482923|gb|AAC33208.1| Highly similar to cinnamyl alcohol
  misc_feature (1)..(196): Homolog of NCBI NO: 30697406 NR Description: cinnamyl-alcohol dehydrogenase (CAD) family
  misc_feature (1)..(196): Homolog of NCBI NO: 12597772 NR Description: cinnamyl alcohol dehydrogenase, putative
  misc_feature (1)..(193): Homolog of NCBI NO: 15239741 NR Description: cinnamyl-alcohol dehydrogenase - like protein;

SEQ ID NO: 90409 - DNA, 1410 bp, Arabidopsis thaliana
  misc_feature (1)..(1410): Ceres Seq. ID no. 12723783
  misc_feature: MA Experiment ID: 108435 Result: Down-regulated in Transcription
  misc_feature: MA Experiment 108435 PARAMETER Experiment Name: At_stm_Mutants_cDNA_P Parameter: Plant Line Value: wt Landsburg vs stm
  misc_feature: MA Experiment 108435 PARAMETER Experiment Name: At_stm_Mutants_cDNA_P Parameter: Tissue Value: Shoot Apical Meristem Region
  misc_feature: MA Experiment ID: 108461 Result: Up-regulated in Transcription
  misc_feature: MA Experiment 108461 PARAMETER Experiment Name: At_Germinating_Seeds_cDNA_P Parameter: Age (day) Value: 1 vs. 0
  misc_feature: MA Experiment 108461 PARAMETER Experiment Name: At_Germinating_Seeds_cDNA_P Parameter: Tissue Value: Germinating Seeds
  misc_feature: MA Experiment ID: 108462 Result: Up-regulated in Transcription
  misc_feature: MA Experiment 108462 PARAMETER Experiment Name: At_Germinating_Seeds_cDNA_P Parameter: Age (day) Value: 2 vs. 0
  misc_feature: MA Experiment 108462 PARAMETER Experiment Name: At_Germinating_Seeds_cDNA_P Parameter: Tissue Value: Germinating Seeds
  misc_feature: MA Experiment ID: 108463 Result: Up-regulated in Transcription
  misc_feature: MA Experiment 108463 PARAMETER Experiment Name: At_Germinating_Seeds_cDNA_P Parameter: Age (day) Value: 3 vs. 0
  misc_feature: MA Experiment 108463 PARAMETER Experiment Name: At_Germinating_Seeds_cDNA_P Parameter: Tissue Value: Germinating Seeds
  misc_feature: MA Experiment ID: 108464 Result: Up-regulated in Transcription
  misc_feature: MA Experiment 108464 PARAMETER Experiment Name: At_Germinating_Seeds_cDNA_P Parameter: Age (day) Value: 4 vs. 0
  misc_feature: MA Experiment 108464 PARAMETER Experiment Name: At_Germinating_Seeds_cDNA_P Parameter: Tissue Value: Germinating Seeds
  misc_feature: MA Experiment ID: 108488 Result: Up-regulated in Transcription
  misc_feature: MA Experiment ID: 108577 Result: Up-regulated in Transcription
  misc_feature: MA Experiment 108577 PARAMETER Experiment Name: At_42deg_Heat_cDNA_P Parameter: Temperature (deg C) Value: 42 vs. 22
  misc_feature: MA Experiment 108577 PARAMETER Experiment Name: At_42deg_Heat_cDNA_P Parameter: Timepoint (hr) Value: 6
  misc_feature: MA Experiment 108577 PARAMETER Experiment Name: At_42deg_Heat_cDNA_P Parameter: Tissue Value: Aerial
  misc_feature: MA Experiment ID: 108595 Result: Down-regulated in Transcription
  misc_feature: MA Experiment 108595 PARAMETER Experiment Name: At_Ler-pi_Ovule_cDNA_P Parameter: Plant Line Value: null
  misc_feature: MA Experiment ID: 20000069 Result: Down-regulated in Transcription
  misc_feature: MA Experiment 20000069 PARAMETER Experiment Name: At_100uM_ABA_Mutants_cDNA_P Parameter: Plant Line Value: CS23
  misc_feature: MA Experiment 20000069 PARAMETER Experiment Name: At_100uM_ABA_Mutants_cDNA_P Parameter: Timepoint (hr) Value: 6
  misc_feature: MA Experiment 20000069 PARAMETER Experiment Name: At_100uM_ABA_Mutants_cDNA_P Parameter: Tissue Value: Aerial
  misc_feature: MA Experiment 20000069 PARAMETER Experiment Name: At_100uM_ABA_Mutants_cDNA_P Parameter: Treatment Value: 100uM ABA vs. No Treatment
  misc_feature: MA Experiment ID: 20000070 Result: Down-regulated in Transcription
  misc_feature: MA Experiment 20000070 PARAMETER Experiment Name: At_100uM_ABA_Mutants_cDNA_P Parameter: Plant Line Value: CS24
  misc_feature: MA Experiment 20000070 PARAMETER Experiment Name: At_100uM_ABA_Mutants_cDNA_P Parameter: Timepoint (hr) Value: 6
  misc_feature: MA Experiment 20000070 PARAMETER Experiment Name: At_100uM_ABA_Mutants_cDNA_P Parameter: Tissue Value: Aerial
  misc_feature: MA Experiment 20000070 PARAMETER Experiment Name: At_100uM_ABA_Mutants_cDNA_P Parameter: Treatment Value: 100uM ABA vs. No Treatment
  misc_feature: MA Experiment ID: 20000071 Result: Down-regulated in Transcription
  misc_feature: MA Experiment 20000071 PARAMETER Experiment Name: At_100uM_ABA_Mutants_cDNA_P Parameter: Plant Line Value: CS8104
  misc_feature: MA Experiment 20000071 PARAMETER Experiment Name: At_100uM_ABA_Mutants_cDNA_P Parameter: Timepoint (hr) Value: 6
  misc_feature: MA Experiment 20000071 PARAMETER Experiment Name: At_100uM_ABA_Mutants_cDNA_P Parameter: Tissue Value: Aerial
  misc_feature: MA Experiment 20000071 PARAMETER Experiment Name: At_100uM_ABA_Mutants_cDNA_P Parameter: Treatment Value: 100uM ABA vs. No Treatment
  misc_feature: MA Experiment ID: 20000072 Result: Down-regulated in Transcription
  misc_feature: MA Experiment 20000072 PARAMETER Experiment Name: At_100uM_ABA_Mutants_cDNA_P Parameter: Plant Line Value: CS8105
  misc_feature: MA Experiment 20000072 PARAMETER Experiment Name: At_100uM_ABA_Mutants_cDNA_P Parameter: Timepoint (hr) Value: 6
  misc_feature: MA Experiment 20000072 PARAMETER Experiment Name: At_100uM_ABA_Mutants_cDNA_P Parameter: Tissue Value: Aerial
  misc_feature: MA Experiment 20000072 PARAMETER Experiment Name: At_100uM_ABA_Mutants_cDNA_P Parameter: Treatment Value: 100uM ABA vs. No Treatment
  misc_feature: MA Experiment ID: 20000086 Result: Down-regulated in Transcription
  misc_feature: MA Experiment 20000086 PARAMETER Experiment Name: At_100uM_ABA_Mutants_cDNA_P Parameter: Plant Line Value: CS22
  misc_feature: MA Experiment 20000086 PARAMETER Experiment Name: At_100uM_ABA_Mutants_cDNA_P Parameter: Timepoint (hr) Value: 6
  misc_feature: MA Experiment 20000086 PARAMETER Experiment Name: At_100uM_ABA_Mutants_cDNA_P Parameter: Tissue Value: Aerial
  misc_feature: MA Experiment 20000086 PARAMETER Experiment Name: At_100uM_ABA_Mutants_cDNA_P Parameter: Treatment Value: 100uM ABA vs. No Treatment
  misc_feature: MA Experiment ID: 20000087 Result: Down-regulated in Transcription
  misc_feature: MA Experiment 20000087 PARAMETER Experiment Name: At_100uM_ABA_Mutants_cDNA_P Parameter: Plant Line Value: WS
  misc_feature: MA Experiment 20000087 PARAMETER Experiment Name: At_100uM_ABA_Mutants_cDNA_P Parameter: Timepoint (hr) Value: 6
  misc_feature: MA Experiment 20000087 PARAMETER Experiment Name: At_100uM_ABA_Mutants_cDNA_P Parameter: Tissue Value: Aerial
  misc_feature: MA Experiment 20000087 PARAMETER Experiment Name: At_100uM_ABA_Mutants_cDNA_P Parameter: Treatment Value: 100uM ABA vs. No Treatment
  misc_feature: MA Experiment ID: 20000088 Result: Down-regulated in Transcription
  misc_feature: MA Experiment 20000088 PARAMETER Experiment Name: At_100uM_ABA_Mutants_cDNA_P Parameter: Plant Line Value: Landsberg
  misc_feature: MA Experiment 20000088 PARAMETER Experiment Name: At_100uM_ABA_Mutants_cDNA_P Parameter: Timepoint (hr) Value: 6
  misc_feature: MA Experiment 20000088 PARAMETER Experiment Name: At_100uM_ABA_Mutants_cDNA_P Parameter: Tissue Value: Aerial
  misc_feature: MA Experiment 20000088 PARAMETER Experiment Name: At_100uM_ABA_Mutants_cDNA_P Parameter: Treatment Value: 100uM ABA vs. No Treatment
  misc_feature: MA Experiment ID: 20000089 Result: Down-regulated in Transcription
  misc_feature: MA Experiment ID: 20000090 Result: Down-regulated in Transcription
  misc_feature: MA Experiment ID: 20000117 Result: Down-regulated in Transcription
  misc_feature: MA Experiment 20000117 PARAMETER Experiment Name: At_100uM_ABA_Mutants_cDNA_P Parameter: Plant Line Value: Columbia
  misc_feature: MA Experiment 20000117 PARAMETER Experiment Name: At_100uM_ABA_Mutants_cDNA_P Parameter: Timepoint (hr) Value: 6
  misc_feature: MA Experiment 20000117 PARAMETER Experiment Name: At_100uM_ABA_Mutants_cDNA_P Parameter: Tissue Value: Aerial
  misc_feature: MA Experiment 20000117 PARAMETER Experiment Name: At_100uM_ABA_Mutants_cDNA_P Parameter: Treatment Value: 100uM ABA vs. No Treatment
  misc_feature: MA Experiment ID: 20000173 Result: Up-regulated in Transcription
  misc_feature: MA Experiment 20000173 PARAMETER Experiment Name: At_42deg_Heat_P Parameter: Age (day) Value: 14
  misc_feature: MA Experiment 20000173 PARAMETER Experiment Name: At_42deg_Heat_P Parameter: Organism Value: A. thaliana
  misc_feature: MA Experiment 20000173 PARAMETER Experiment Name: At_42deg_Heat_P Parameter: Plant Line Value: WS
  misc_feature: MA Experiment 20000173 PARAMETER Experiment Name: At_42deg_Heat_P Parameter: Temperature (deg C) Value: 42 vs. 22
  misc_feature: MA Experiment 20000173 PARAMETER Experiment Name: At_42deg_Heat_P Parameter: Timepoint (hr) Value: 6
  misc_feature: MA Experiment 20000173 PARAMETER Experiment Name: At_42deg_Heat_P Parameter: Tissue Value: Aerial
  misc_feature: MA Experiment ID: 20000179 Result: Up-regulated in Transcription
  misc_feature: MA Experiment 20000179 PARAMETER Experiment Name: At_Germinating_Seeds_P Parameter: Age (hr) Value: 6 vs. 0
  misc_feature: MA Experiment 20000179 PARAMETER Experiment Name: At_Germinating_Seeds_P Parameter: Tissue Value: Germinating Seeds
  misc_feature: MA Experiment ID: 20000180 Result: Up-regulated in Transcription
  misc_feature: MA Experiment 20000180 PARAMETER Experiment Name: At_Germinating_Seeds_P Parameter: Age (hr) Value: 24 vs. 0
  misc_feature: MA Experiment 20000180 PARAMETER Experiment Name: At_Germinating_Seeds_P Parameter: Tissue Value: Germinating Seeds
  misc_feature: MA Experiment ID: 20000184 Result: Up-regulated in Transcription
  misc_feature: MA Experiment 20000184 PARAMETER Experiment Name: At_Shoots__P Parameter: Age (day) Value: 7
  misc_feature: MA Experiment 20000184 PARAMETER Experiment Name: At_Shoots__P Parameter: Tissue Value: Shoots vs. Whole Plant
  misc_feature: MA Experiment ID: 20000185 Result: Down-regulated in Transcription
  misc_feature: MA Experiment 20000185 PARAMETER Experiment Name: At_Roots__P Parameter: Age (day) Value: 7 vs. 21
  misc_feature: MA Experiment 20000185 PARAMETER Experiment Name: At_Roots__P Parameter: Organism Value: A. thaliana
  misc_feature: MA Experiment 20000185 PARAMETER Experiment Name: At_Roots__P Parameter: Tissue Value: Roots vs. Whole Plant
  misc_feature: MA Experiment ID: 20000214 Result: Up-regulated in Transcription
  misc_feature: MA Experiment 20000214 PARAMETER Experiment Name: At_4deg_Cold_P Parameter: Timepoint (hr) Value: 6
  misc_feature: MA Experiment ID: 20000437 Result: Down-regulated in Transcription
  misc_feature: MA Experiment 20000437 PARAMETER Experiment Name: At_Drought_P Parameter: Age (day) Value: 8
  misc_feature: MA Experiment 20000437 PARAMETER Experiment Name: At_Drought_P Parameter: Organism Value: A. thaliana
  misc_feature: MA Experiment 20000437 PARAMETER Experiment Name: At_Drought_P Parameter: Plant Line Value: WS
  misc_feature: MA Experiment 20000437 PARAMETER Experiment Name: At_Drought_P Parameter: Timepoint (hr) Value: 24
  misc_feature: MA Experiment 20000437 PARAMETER Experiment Name: At_Drought_P Parameter: Tissue Value: Whole Plant
  misc_feature: MA Experiment 20000437 PARAMETER Experiment Name: At_Drought_P Parameter: Treatment Value: Drought vs. No Drought
  misc_feature: MA Experiment ID: 20000438 Result: Up-regulated in Transcription
  misc_feature: MA Experiment 20000438 PARAMETER Experiment Name: At_Shoots__P Parameter: Age (day) Value: 14
  misc_feature: MA Experiment 20000438 PARAMETER Experiment Name: At_Shoots__P Parameter: Tissue Value: Shoots vs. Whole Plant
  misc_feature: MA Experiment ID: 20000439 Result: Down-regulated in Transcription
  misc_feature: MA Experiment 20000439 PARAMETER Experiment Name: At_Roots__P Parameter: Age (day) Value: 14 vs. 21
  misc_feature: MA Experiment 20000439 PARAMETER Experiment Name: At_Roots__P Parameter: Organism Value: A. thaliana
  misc_feature: MA Experiment 20000439 PARAMETER Experiment Name: At_Roots__P Parameter: Tissue Value: Roots vs. Whole Plant
  misc_feature: MA Experiment ID: 20000794 Result: Down-regulated in Transcription
  misc_feature: MA Experiment 20000794 PARAMETER Experiment Name: At_Petals_P Parameter: Age (day) Value: 23-25 days
  misc_feature: MA Experiment 20000794 PARAMETER Experiment Name: At_Petals_P Parameter: Plant Line Value: WS
  misc_feature: MA Experiment 20000794 PARAMETER Experiment Name: At_Petals_P Parameter: Tissue Value: Petals vs. Whole plant
  misc_feature: MA Experiment ID: 20001247 Result: Up-regulated in Transcription
  misc_feature: MA Experiment 20001247 PARAMETER Experiment Name: At_Far-red-induction_P Parameter: Age (day) Value: 7
  misc_feature: MA Experiment 20001247 PARAMETER Experiment Name: At_Far-red-induction_P Parameter: Light Value: Far-red vs. White
  misc_feature: MA Experiment 20001247 PARAMETER Experiment Name: At_Far-red-induction_P Parameter: Organism Value: A. thaliana
  misc_feature: MA Experiment 20001247 PARAMETER Experiment Name: At_Far-red-induction_P Parameter: Plant Line Value: Columbia
  misc_feature: MA Experiment 20001247 PARAMETER Experiment Name: At_Far-red-induction_P Parameter: Timepoint (hr) Value: 1
  misc_feature: MA Experiment 20001247 PARAMETER Experiment Name: At_Far-red-induction_P Parameter: Tissue Value: Whole Plant
  misc_feature: MA Experiment ID: 20001248 Result: Down-regulated in Transcription
  misc_feature: MA Experiment 20001248 PARAMETER Experiment Name: At_Far-red-induction_P Parameter: Age (day) Value: 7
  misc_feature: MA Experiment 20001248 PARAMETER Experiment Name: At_Far-red-induction_P Parameter: Light Value: Far-red vs. White
  misc_feature: MA Experiment 20001248 PARAMETER Experiment Name: At_Far-red-induction_P Parameter: Organism Value: A. thaliana
  misc_feature: MA Experiment 20001248 PARAMETER Experiment Name: At_Far-red-induction_P Parameter: Plant Line Value: Columbia
  misc_feature: MA Experiment 20001248 PARAMETER Experiment Name: At_Far-red-induction_P Parameter: Timepoint (hr) Value: 4
  misc_feature: MA Experiment 20001248 PARAMETER Experiment Name: At_Far-red-induction_P Parameter: Tissue Value: Whole Plant
  misc_feature: MA Experiment ID: 20001450 Result: Down-regulated in Transcription
  misc_feature: MA Experiment 20001450 PARAMETER Experiment Name: At_Far-red-induction_P Parameter: Age (day) Value: 7
  misc_feature: MA Experiment 20001450 PARAMETER Experiment Name: At_Far-red-induction_P Parameter: Light Value: Far-red vs. White
  misc_feature: MA Experiment 20001450 PARAMETER Experiment Name: At_Far-red-induction_P Parameter: Organism Value: A. thaliana
  misc_feature: MA Experiment 20001450 PARAMETER Experiment Name: At_Far-red-induction_P Parameter: Plant Line Value: Columbia
  misc_feature: MA Experiment 20001450 PARAMETER Experiment Name: At_Far-red-induction_P Parameter: Timepoint (hr) Value: 8
  misc_feature: MA Experiment 20001450 PARAMETER Experiment Name: At_Far-red-induction_P Parameter: Tissue Value: Whole Plant
  misc_feature: MA Experiment ID: 20001555 Result: Down-regulated in Transcription
  misc_feature: MA Experiment 20001555 PARAMETER Experiment Name: At_Drought_Soil_Dry_P Parameter: Age (day) Value: 24
  misc_feature: MA Experiment 20001555 PARAMETER Experiment Name: At_Drought_Soil_Dry_P Parameter: Organism Value: A. thaliana
  misc_feature: MA Experiment 20001555 PARAMETER Experiment Name: At_Drought_Soil_Dry_P Parameter: Plant Line Value: WS
  misc_feature: MA Experiment 20001555 PARAMETER Experiment Name: At_Drought_Soil_Dry_P Parameter: Post Timepoint (hr) Value: None
  misc_feature: MA Experiment 20001555 PARAMETER Experiment Name: At_Drought_Soil_Dry_P Parameter: Post-Treatment Value: None
  misc_feature: MA Experiment 20001555 PARAMETER Experiment Name: At_Drought_Soil_Dry_P Parameter: Timepoint (day) Value: 10
  misc_feature: MA Experiment 20001555 PARAMETER Experiment Name: At_Drought_Soil_Dry_P Parameter: Treatment Value: Drought vs. No Drought
  misc_feature: MA Experiment ID: 20001559 Result: Down-regulated in Transcription
  misc_feature: MA Experiment 20001559 PARAMETER Experiment Name: At_Drought_Soil_Dry_P Parameter: Age (day) Value: 28
  misc_feature: MA Experiment 20001559 PARAMETER Experiment Name: At_Drought_Soil_Dry_P Parameter: Organism Value: A. thaliana
  misc_feature: MA Experiment 20001559 PARAMETER Experiment Name: At_Drought_Soil_Dry_P Parameter: Plant Line Value: WS
  misc_feature: MA Experiment 20001559 PARAMETER Experiment Name: At_Drought_Soil_Dry_P Parameter: Post Timepoint (hr) Value: 29
  misc_feature: MA Experiment 20001559 PARAMETER Experiment Name: At_Drought_Soil_Dry_P Parameter: Post-Treatment Value: Re-Water vs. No Drought
  misc_feature: MA Experiment 20001559 PARAMETER Experiment Name: At_Drought_Soil_Dry_P Parameter: Timepoint (day) Value: 14
  misc_feature: MA Experiment 20001559 PARAMETER Experiment Name: At_Drought_Soil_Dry_P Parameter: Treatment Value: Drought vs. No Drought
  misc_feature: MA Experiment ID: 20001757 Result: Up-regulated in Transcription
  misc_feature: MA Experiment 20001757 PARAMETER Experiment Name: At_50mM_NH4NO3_L-to-H_P Parameter: Timepoint (hr) Value: 6
  misc_feature: MA Experiment 20001757 PARAMETER Experiment Name: At_50mM_NH4NO3_L-to-H_P Parameter: Tissue Value: Leaf
  misc_feature: MA Experiment 20001757 PARAMETER Experiment Name: At_50mM_NH4NO3_L-to-H_P Parameter: Treatment Value: 50mM NH4NO3 vs 100mM Mannitol
  misc_feature: MA Experiment ID: 20001904 Result: Down-regulated in Transcription
  misc_feature: MA Experiment 20001904 PARAMETER Experiment Name: At_Drought_Reproduction_P Parameter: Age (day) Value: 37
  misc_feature: MA Experiment 20001904 PARAMETER Experiment Name: At_Drought_Reproduction_P Parameter: Organism Value: A. thaliana
  misc_feature: MA Experiment 20001904 PARAMETER Experiment Name: At_Drought_Reproduction_P Parameter: Plant Line Value: WS
  misc_feature: MA Experiment 20001904 PARAMETER Experiment Name: At_Drought_Reproduction_P Parameter: Timepoint (day) Value: 7
  misc_feature: MA Experiment 20001904 PARAMETER Experiment Name: At_Drought_Reproduction_P Parameter: Tissue Value: Rosettes
  misc_feature: MA Experiment 20001904 PARAMETER Experiment Name: At_Drought_Reproduction_P Parameter: Treatment Value: Drought vs. No Drought
  misc_feature: MA Experiment ID: 20001906 Result: Down-regulated in Transcription
  misc_feature: MA Experiment 20001906 PARAMETER Experiment Name: At_Drought_Reproduction_P Parameter: Age (day) Value: 35
  misc_feature: MA Experiment 20001906 PARAMETER Experiment Name: At_Drought_Reproduction_P Parameter: Organism Value: A. thaliana
  misc_feature: MA Experiment 20001906 PARAMETER Experiment Name: At_Drought_Reproduction_P Parameter: Plant Line Value: WS
  misc_feature: MA Experiment 20001906 PARAMETER Experiment Name: At_Drought_Reproduction_P Parameter: Timepoint (day) Value: 5
  misc_feature: MA Experiment 20001906 PARAMETER Experiment Name: At_Drought_Reproduction_P Parameter: Tissue Value: Siliques
  misc_feature: MA Experiment 20001906 PARAMETER Experiment Name: At_Drought_Reproduction_P Parameter: Treatment Value: Drought vs. No Drought
  misc_feature: MA Experiment ID: 20001911 Result: Down-regulated in Transcription
  misc_feature: MA Experiment 20001911 PARAMETER Experiment Name: At_Drought_Reproduction_P Parameter: Age (day) Value: 40
  misc_feature: MA Experiment 20001911 PARAMETER Experiment Name: At_Drought_Reproduction_P Parameter: Organism Value: A. thaliana
  misc_feature: MA Experiment 20001911 PARAMETER Experiment Name: At_Drought_Reproduction_P Parameter: Plant Line Value: WS
  misc_feature: MA Experiment 20001911 PARAMETER Experiment Name: At_Drought_Reproduction_P Parameter: Timepoint (day) Value: 10
  misc_feature: MA Experiment 20001911 PARAMETER Experiment Name: At_Drought_Reproduction_P Parameter: Tissue Value: Flowers
  misc_feature: MA Experiment 20001911 PARAMETER Experiment Name: At_Drought_Reproduction_P Parameter: Treatment Value: Drought vs. No Drought
gaaccaccatacacacttcaatttcaaataagagcttttcttcagttgttgctcagagacttaaccaatcaaccatggcgaagatgatgatgttgcaacagcatcagccttctttctctctccttacttcttctctgtctgacttcaatggcgctaagctccatttacaagtccagtacaagaggaaggttcatcagccaaaaggagcactctatgtttcagcgtcgagcgaaaagaagattctgataatgggtggtactcgattcattggtctgttcttgtccaggatccttgtcaaagagggacatcaggttacattgttcacaaggggtaaatctcctattgccaaacaattgcccggtgaatctgaccaagactttgctgatttctcttctaagattcttcacttgaaaggagacagaaaggactatgactttgtgaagtcaagtctttcagcagaaggcttcgatgttgtttatgatatcaacgggagggaggccgaagaagttgagcccatactagaagcactacccaaactagagcagtacatctactgttcttcagctggtgtttatctgaaatctgatatcttgccacattgtgaggaggatgcagttgatccgaagagcaggcacaaggggaagctggagactgagagcttactgcaatcaaaaggtgtaaactggacttctatacgtcctgtctacatctacggtccattgaattacaaccccgtcgaagaatggtttttccaccgtctaaaggcaggtcgcccaatcccggttccaaactctgggatacagatctcacaactcggtcacgttaaggacttggcaacagcctttctcaacgtgcttggtaacgagaaagccagcagagagatattcaacatctcgggggagaaatatgttacctttgatgggttagcaaaagcttgcgcaaaggccggtgggtttccggagccagagattgttcattacaacccgaaagagttcgactttgggaagaagaaggcattccctttccgtgatcagcatttctttgcatcggtggagaaagcaaagcatgtcctcggatggaaaccggagttcgacttagtggagggtctcactgactcatacaaccttgatttcggtcgcggaacattccggaaagaagcggatttcaccactgacgacatgattctgagcaagaaacttgttcttcaataatcgaaatcctaagagttgctcattcttggcttgtatgattctgatcacccggttctcttaaagttctgaactttattgtcatctcacgtatgttatggtccggattttgttcgacttttctctaaagaagtcaagctagggacgatgaagaaaccgagaaagtaagtacacgagaaagagacggtctggctcttgactt

SEQ ID NO: 90410 - protein, 402 aa, Arabidopsis thaliana
  peptide (1)..(402): Ceres Seq. ID no. 12723784
  misc_feature (80)..(372): Pfam Name: NAD dependent epimerase/dehydratase family Pfam Description: NAD dependent epimerase/dehydratase family
  misc_feature (25)..(402): Homolog of NCBI NO: 15217485 NR Description: putative RNA-binding protein; protein id: supported by cDNA: 37028., supported by cDNA: gi_13358232, by cDNA: gi_14334753, supported by cDNA: gi_16226246, supported
  misc_feature (25)..(402): Homolog of NCBI NO: 17064988 NR Description: g5bf protein [Arabidopsis thaliana]
  misc_feature (25)..(402): Homolog of NCBI NO: 21593201 NR Description: putative RNA-binding protein [Arabidopsis
  misc_feature (25)..(402): Homolog of NCBI NO: 25454619 NR Description: hypothetical protein g5bf [imported] -
  misc_feature (29)..(402): Homolog of NCBI NO: 25456171 NR Description: probable RNA binding protein [imported] - thaliana >gi|3850621|emb|CAA75602.1| putative RNA binding protein
  misc_feature (71)..(398): Homolog of NCBI NO: 34398360 NR Description: 38 kDa ribosome-associated protein precursor
  misc_feature (79)..(395): Homolog of NCBI NO: 17232323 NR Description: mRNA-binding protein [Nostoc sp. PCC 7120]
  misc_feature (79)..(395): Homolog of NCBI NO: 23040971 NR Description: hypothetical protein [Trichodesmium erythraeum
  misc_feature (79)..(395): Homolog of NCBI NO: 23128166 NR Description: hypothetical protein [Nostoc punctiforme]
  misc_feature (79)..(396): Homolog of NCBI NO: 16330056 NR Description: hypothetical protein [Synechocystis sp. PCC 6803]
TTIHTSISNKSFSSVVAQRLNQSTMAKMMMLQQHQPSFSLLTSSLSDFNGAKLHLQVQYKRKVHQPKGALYVSASSEKKILIMGGTRFIGLFLSRILVKEGHQVTLFTRGKSPIAKQLPGESDQDFADFSSKILHLKGDRKDYDFVKSSLSAEGFDVVYDINGREAEEVEPILEALPKLEQYIYCSSAGVYLKSDILPHCEEDAVDPKSRHKGKLETESLLQSKGVNWTSIRPVYIYGPLNYNPVEEWFFHRLKAGRPIPVPNSGIQISQLGHVKDLATAFLNVLGNEKASREIFNISGEKYVTFDGLAKACAKAGGFPEPEIVHYNPKEFDFGKKKAFPFRDQHFFASVEKAKHVLGWKPEFDLVEGLTDSYNLDFGRGTFRKEADFTTDDMILSKKLVLQ

SEQ ID NO: 90411 - protein, 378 aa, Arabidopsis thaliana; identical to SEQ ID NO: 23756
  peptide (1)..(378): Ceres Seq. ID no. 12723785
  misc_feature (56)..(348): Pfam Name: NAD dependent epimerase/dehydratase family Pfam Description: NAD dependent epimerase/dehydratase family
  misc_feature (1)..(378): Homolog of NCBI NO: 15217485 NR Description: putative RNA-binding protein; protein id: supported by cDNA: 37028., supported by cDNA: gi_13358232, by cDNA: gi_14334753, supported by cDNA: gi_16226246, supported
  misc_feature (1)..(378): Homolog of NCBI NO: 17064988 NR Description: g5bf protein [Arabidopsis thaliana]
  misc_feature (1)..(378): Homolog of NCBI NO: 21593201 NR Description: putative RNA-binding protein [Arabidopsis
  misc_feature (1)..(378): Homolog of NCBI NO: 25454619 NR Description: hypothetical protein g5bf [imported] -
  misc_feature (5)..(378): Homolog of NCBI NO: 25456171 NR Description: probable RNA binding protein [imported] - thaliana >gi|3850621|emb|CAA75602.1| putative RNA binding protein
  misc_feature (47)..(374): Homolog of NCBI NO: 34398360 NR Description: 38 kDa ribosome-associated protein precursor
  misc_feature (55)..(371): Homolog of NCBI NO: 17232323 NR Description: mRNA-binding protein [Nostoc sp. PCC 7120]
  misc_feature (55)..(371): Homolog of NCBI NO: 23040971 NR Description: hypothetical protein [Trichodesmium erythraeum
  misc_feature (55)..(371): Homolog of NCBI NO: 23128166 NR Description: hypothetical protein [Nostoc punctiforme]
  misc_feature (55)..(372): Homolog of NCBI NO: 16330056 NR Description: hypothetical protein [Synechocystis sp. PCC 6803]

SEQ ID NO: 90412 - protein, 375 aa, Arabidopsis thaliana; identical to SEQ ID NO: 23757
  peptide (1)..(375): Ceres Seq. ID no. 12723786
  misc_feature (53)..(345): Pfam Name: NAD dependent epimerase/dehydratase family Pfam Description: NAD dependent epimerase/dehydratase family
  misc_feature (1)..(375): Homolog of NCBI NO: 15217485 NR Description: putative RNA-binding protein; protein id: supported by cDNA: 37028., supported by cDNA: gi_13358232, by cDNA: gi_14334753, supported by cDNA: gi_16226246, supported
  misc_feature (1)..(375): Homolog of NCBI NO: 17064988 NR Description: g5bf protein [Arabidopsis thaliana]
  misc_feature (1)..(375): Homolog of NCBI NO: 21593201 NR Description: putative RNA-binding protein [Arabidopsis
  misc_feature (1)..(375): Homolog of NCBI NO: 25454619 NR Description: hypothetical protein g5bf [imported] -
  misc_feature (2)..(375): Homolog of NCBI NO: 25456171 NR Description: probable RNA binding protein [imported] - thaliana >gi|3850621|emb|CAA75602.1| putative RNA binding protein
  misc_feature (44)..(371): Homolog of NCBI NO: 34398360 NR Description: 38 kDa ribosome-associated protein precursor
  misc_feature (52)..(368): Homolog of NCBI NO: 17232323 NR Description: mRNA-binding protein [Nostoc sp. PCC 7120]
  misc_feature (52)..(368): Homolog of NCBI NO: 23040971 NR Description: hypothetical protein [Trichodesmium erythraeum
  misc_feature (52)..(368): Homolog of NCBI NO: 23128166 NR Description: hypothetical protein [Nostoc punctiforme]
  misc_feature (52)..(369): Homolog of NCBI NO: 16330056 NR Description: hypothetical protein [Synechocystis sp. PCC 6803]

SEQ ID NO: 90413 - DNA, 1229 bp, Arabidopsis thaliana
  misc_feature (1)..(1229): Ceres Seq. ID no. 12723798
  misc_feature: MA Experiment ID: 20000171 Result: Up-regulated in Transcription
  misc_feature: MA Experiment 20000171 PARAMETER Experiment Name: At_42deg_Heat_P Parameter: Age (day) Value: 14
  misc_feature: MA Experiment 20000171 PARAMETER Experiment Name: At_42deg_Heat_P Parameter: Organism Value: A. thaliana
  misc_feature: MA Experiment 20000171 PARAMETER Experiment Name: At_42deg_Heat_P Parameter: Plant Line Value: WS
  misc_feature: MA Experiment 20000171 PARAMETER Experiment Name: At_42deg_Heat_P Parameter: Temperature (deg C) Value: 42 vs. 22
  misc_feature: MA Experiment 20000171 PARAMETER Experiment Name: At_42deg_Heat_P Parameter: Timepoint (hr) Value: 1
  misc_feature: MA Experiment 20000171 PARAMETER Experiment Name: At_42deg_Heat_P Parameter: Tissue Value: Aerial
  misc_feature: MA Experiment ID: 20000173 Result: Up-regulated in Transcription
  misc_feature: MA Experiment 20000173 PARAMETER Experiment Name: At_42deg_Heat_P Parameter: Age (day) Value: 14
  misc_feature: MA Experiment 20000173 PARAMETER Experiment Name: At_42deg_Heat_P Parameter: Organism Value: A. thaliana
  misc_feature: MA Experiment 20000173 PARAMETER Experiment Name: At_42deg_Heat_P Parameter: Plant Line Value: WS
  misc_feature: MA Experiment 20000173 PARAMETER Experiment Name: At_42deg_Heat_P Parameter: Temperature (deg C) Value: 42 vs. 22
  misc_feature: MA Experiment 20000173 PARAMETER Experiment Name: At_42deg_Heat_P Parameter: Timepoint (hr) Value: 6
  misc_feature: MA Experiment 20000173 PARAMETER Experiment Name: At_42deg_Heat_P Parameter: Tissue Value: Aerial
  misc_feature: MA Experiment ID: 20000185 Result: Up-regulated in Transcription
  misc_feature: MA Experiment 20000185 PARAMETER Experiment Name: At_Roots__P Parameter: Age (day) Value: 7 vs. 21
  misc_feature: MA Experiment 20000185 PARAMETER Experiment Name: At_Roots__P Parameter: Organism Value: A. thaliana
  misc_feature: MA Experiment 20000185 PARAMETER Experiment Name: At_Roots__P Parameter: Tissue Value: Roots vs. Whole Plant
  misc_feature: MA Experiment ID: 20000265 Result: Up-regulated in Transcription
  misc_feature: MA Experiment 20000265 PARAMETER Experiment Name: At_Open_Flower_P Parameter: Age (day) Value: 21
  misc_feature: MA Experiment 20000265 PARAMETER Experiment Name: At_Open_Flower_P Parameter: Plant Line Value: WS
  misc_feature: MA Experiment 20000265 PARAMETER Experiment Name: At_Open_Flower_P Parameter: Tissue Value: Closed Flower vs. Whole Plant
  misc_feature: MA Experiment ID: 20000437 Result: Up-regulated in Transcription
  misc_feature: MA Experiment 20000437 PARAMETER Experiment Name: At_Drought_P Parameter: Age (day) Value: 8
  misc_feature: MA Experiment 20000437 PARAMETER Experiment Name: At_Drought_P Parameter: Organism Value: A. thaliana
  misc_feature: MA Experiment 20000437 PARAMETER Experiment Name: At_Drought_P Parameter: Plant Line Value: WS
  misc_feature: MA Experiment 20000437 PARAMETER Experiment Name: At_Drought_P Parameter: Timepoint (hr) Value: 24
  misc_feature: MA Experiment 20000437 PARAMETER Experiment Name: At_Drought_P Parameter: Tissue Value: Whole Plant
  misc_feature: MA Experiment 20000437 PARAMETER Experiment Name: At_Drought_P Parameter: Treatment Value: Drought vs. No Drought
  misc_feature: MA Experiment ID: 20000794 Result: Up-regulated in Transcription
  misc_feature: MA Experiment 20000794 PARAMETER Experiment Name: At_Petals_P Parameter: Age (day) Value: 23-25 days
  misc_feature: MA Experiment 20000794 PARAMETER Experiment Name: At_Petals_P Parameter: Plant Line Value: WS
  misc_feature: MA Experiment 20000794 PARAMETER Experiment Name: At_Petals_P Parameter: Tissue Value: Petals vs. Whole plant
  misc_feature: MA Experiment ID: 20001248 Result: Down-regulated in Transcription
  misc_feature: MA Experiment 20001248 PARAMETER Experiment Name: At_Far-red-induction_P Parameter: Age (day) Value: 7
  misc_feature: MA Experiment 20001248 PARAMETER Experiment Name: At_Far-red-induction_P Parameter: Light Value: Far-red vs. White
  misc_feature: MA Experiment 20001248 PARAMETER Experiment Name: At_Far-red-induction_P Parameter: Organism Value: A. thaliana
  misc_feature: MA Experiment 20001248 PARAMETER Experiment Name: At_Far-red-induction_P Parameter: Plant Line Value: Columbia
  misc_feature: MA Experiment 20001248 PARAMETER Experiment Name: At_Far-red-induction_P Parameter: Timepoint (hr) Value: 4
  misc_feature: MA Experiment 20001248 PARAMETER Experiment Name: At_Far-red-induction_P Parameter: Tissue Value: Whole Plant
  misc_feature: MA Experiment ID: 20001559 Result: Up-regulated in Transcription
  misc_feature: MA Experiment 20001559 PARAMETER Experiment Name: At_Drought_Soil_Dry_P Parameter: Age (day) Value: 28
  misc_feature: MA Experiment 20001559 PARAMETER Experiment Name: At_Drought_Soil_Dry_P Parameter: Organism Value: A. thaliana
  misc_feature: MA Experiment 20001559 PARAMETER Experiment Name: At_Drought_Soil_Dry_P Parameter: Plant Line Value: WS
  misc_feature: MA Experiment 20001559 PARAMETER Experiment Name: At_Drought_Soil_Dry_P Parameter: Post Timepoint (hr) Value: 29
  misc_feature: MA Experiment 20001559 PARAMETER Experiment Name: At_Drought_Soil_Dry_P Parameter: Post-Treatment Value: Re-Water vs. No Drought
  misc_feature: MA Experiment 20001559 PARAMETER Experiment Name: At_Drought_Soil_Dry_P Parameter: Timepoint (day) Value: 14
  misc_feature: MA Experiment 20001559 PARAMETER Experiment Name: At_Drought_Soil_Dry_P Parameter: Treatment Value: Drought vs. No Drought
  misc_feature: MA Experiment ID: 20001757 Result: Down-regulated in Transcription
  misc_feature: MA Experiment 20001757 PARAMETER Experiment Name: At_50mM_NH4NO3_L-to-H_P Parameter: Timepoint (hr) Value: 6
  misc_feature: MA Experiment 20001757 PARAMETER Experiment Name: At_50mM_NH4NO3_L-to-H_P Parameter: Tissue Value: Leaf
  misc_feature: MA Experiment 20001757 PARAMETER Experiment Name: At_50mM_NH4NO3_L-to-H_P Parameter: Treatment Value: 50mM NH4NO3 vs 100mM Mannitol
  misc_feature: MA Experiment ID: 20001905 Result: Up-regulated in Transcription
  misc_feature: MA Experiment 20001905 PARAMETER Experiment Name: At_Drought_Reproduction_P Parameter: Age (day) Value: 40
  misc_feature: MA Experiment 20001905 PARAMETER Experiment Name: At_Drought_Reproduction_P Parameter: Organism Value: A. thaliana
  misc_feature: MA Experiment 20001905 PARAMETER Experiment Name: At_Drought_Reproduction_P Parameter: Plant Line Value: WS
  misc_feature: MA Experiment 20001905 PARAMETER Experiment Name: At_Drought_Reproduction_P Parameter: Timepoint (day) Value: 10
  misc_feature: MA Experiment 20001905 PARAMETER Experiment Name: At_Drought_Reproduction_P Parameter: Tissue Value: Rosettes
  misc_feature: MA Experiment 20001905 PARAMETER Experiment Name: At_Drought_Reproduction_P Parameter: Treatment Value: Drought vs. No Drought
  misc_feature: MA Experiment ID: 20001911 Result: Up-regulated in Transcription
  misc_feature: MA Experiment 20001911 PARAMETER Experiment Name: At_Drought_Reproduction_P Parameter: Age (day) Value: 40
  misc_feature: MA Experiment 20001911 PARAMETER Experiment Name: At_Drought_Reproduction_P Parameter: Organism Value: A. thaliana
  misc_feature: MA Experiment 20001911 PARAMETER Experiment Name: At_Drought_Reproduction_P Parameter: Plant Line Value: WS
  misc_feature: MA Experiment 20001911 PARAMETER Experiment Name: At_Drought_Reproduction_P Parameter: Timepoint (day) Value: 10
  misc_feature: MA Experiment 20001911 PARAMETER Experiment Name: At_Drought_Reproduction_P Parameter: Tissue Value: Flowers
  misc_feature: MA Experiment 20001911 PARAMETER Experiment Name: At_Drought_Reproduction_P Parameter: Treatment Value: Drought vs. No Drought
gtctcctttccagaacaatctaacgctttctcgaacatcttcttcttcttctttctcgaaattatttttccagtaatcaatttcttctcttctagatttttacaggaactaattttctgctctgaggtatcagatgagtagccgatggaatcgtacgatctacgttgggaatttgcctggagatattcgcaagtgtgaggttgaagatctcttctacaagtatggaccaattgtggacattgatttgaagattccaccgagacctcctggttatgcctttgtcgagtttgaagatcctcgtgatgcagacgatgcaatttatggacgtgatggttatgattttgatgggtgtcgacttcgggttgagattgcacatggtggtcgtagattttcaccatcagttgataggtacagcagcagctacagtgcgagccgtgcaccttcaagacgctctgactaccgcgtgcttgtgaccggattaccgccttctgcttcgtggcaggaccttaaggatcacatgcgcaaagctggagatgtctgcttctctgaagttttccctgaccgtaaaggcatgtctggggttgtggattatagcaactatgatgatatgaagtacgcaataaggaaacttgatgccactgaatttcgaaatgctttctctagtgcttatatacgggtgagggaatatgagtcgaggagtgtgagtcgaagcccagatgattctaaaagctatagaagcaggagtcggagccgtggtccaagctgtagctatagtagcaagagcaggagtgtgtcacctgctagatccatttccccgcgttcacggccccttagtcgttctcgctcgctatacagctctgtctcaaggtcccaatcaagatcaaaatcaagatcaagatcaagatcgaattctccagtttcacctgtgatatctggttgaaaatgaaaactggccactggctgtacccgaatcgtctcaagcttctcaggctccactgctaatagaatttgattccgatttgggattattatactggtcttcttgtatgggacgaccaatatgtctttctagttttagttgtgaacctggaattggtctgttattgtgtcattaaaaagccggaaactctgtctcggctgcataataaagttcatcagacattgtgttgggtgtggtgaggtttttccatacatatacatttacattacaactactggtgtcttttatg

SEQ ID NO: 90414 - protein, 268 aa, Arabidopsis thaliana; identical to SEQ ID NO: 35071
  peptide (1)..(268): Ceres Seq. ID no. 12723799
  misc_feature (9)..(77): Pfam Name: RNA recognition motif. (a.k.a. RRM, RBD, or RNP domain) Pfam Description: RNA recognition motif. (a.k.a. RRM, RBD, or RNP
  misc_feature (1)..(268): Homolog of NCBI NO: 4775270 NR Description: SF2/ASF-like splicing modulator Srp30 thaliana] >gi|23297699|gb|AAN13011.1| putative SF2/ASF splicing
  misc_feature (1)..(265): Homolog of NCBI NO: 22329428 NR Description: arginine/serine-rich splicing factor, atSRp30;
  misc_feature (1)..(248): Homolog of NCBI NO: 4775271 NR Description: SF2/ASF-like splicing modulator Srp30, variant 1
  misc_feature (1)..(218): Homolog of NCBI NO: 25386570 NR Description: hypothetical protein [imported] - Arabidopsis
  misc_feature (62)..(268): Homolog of NCBI NO: 21954085 NR Description: putative SF2/ASF splicing modulator Srp30 protein
  misc_feature (1)..(265): Homolog of NCBI NO: 30678391 NR Description: pre-mRNA splicing factor SF2 (SR1 protein)
  misc_feature (1)..(265): Homolog of NCBI NO: 5815235 NR Description: splicing factor SR1 [Arabidopsis thaliana]
  misc_feature (1)..(256): Homolog of NCBI NO: 2443473 NR Description: ASF/SF2 homolog [Arabidopsis thaliana]
  misc_feature (1)..(256): Homolog of NCBI NO: 30678395 NR Description: pre-mRNA splicing factor SF2 (SR1 protein)
  misc_feature (1)..(264): Homolog of NCBI NO: 33146854 NR Description: putative pre-mRNA splicing factor SF2 [Oryza

SEQ ID NO: 90415 - protein, 140 aa, Arabidopsis thaliana; identical to SEQ ID NO: 35072
  peptide (1)..(140): Ceres Seq. ID no. 12723800
  misc_feature (1)..(140): Homolog of NCBI NO: 4775270 NR Description: SF2/ASF-like splicing modulator Srp30 thaliana] >gi|23297699|gb|AAN13011.1| putative SF2/ASF splicing
  misc_feature (1)..(137): Homolog of NCBI NO: 22329428 NR Description: arginine/serine-rich splicing factor, atSRp30;
  misc_feature (1)..(120): Homolog of NCBI NO: 4775271 NR Description: SF2/ASF-like splicing modulator Srp30, variant 1
  misc_feature (1)..(90): Homolog of NCBI NO: 25386570 NR Description: hypothetical protein [imported] - Arabidopsis
  misc_feature (1)..(140): Homolog of NCBI NO: 21954085 NR Description: putative SF2/ASF splicing modulator Srp30 protein
  misc_feature (1)..(137): Homolog of NCBI NO: 30678391 NR Description: pre-mRNA splicing factor SF2 (SR1 protein)
  misc_feature (1)..(137): Homolog of NCBI NO: 5815235 NR Description: splicing factor SR1 [Arabidopsis thaliana]
  misc_feature (1)..(128): Homolog of NCBI NO: 2443473 NR Description: ASF/SF2 homolog [Arabidopsis thaliana]
  misc_feature (1)..(128): Homolog of NCBI NO: 30678395 NR Description: pre-mRNA splicing factor SF2 (SR1 protein)
  misc_feature (1)..(136): Homolog of NCBI NO: 33146854 NR Description: putative pre-mRNA splicing factor SF2 [Oryza

SEQ ID NO: 90416 - DNA, 842 bp, Arabidopsis thaliana
  misc_feature (1)..(842): Ceres Seq. ID no. 12723809
  misc_feature: MA Experiment ID: 108461 Result: Up-regulated in Transcription
  misc_feature: MA Experiment 108461 PARAMETER Experiment Name: At_Germinating_Seeds_cDNA_P Parameter: Age (day) Value: 1 vs. 0
  misc_feature: MA Experiment 108461 PARAMETER Experiment Name: At_Germinating_Seeds_cDNA_P Parameter: Tissue Value: Germinating Seeds
  misc_feature: MA Experiment ID: 108573 Result: Down-regulated in Transcription
  misc_feature: MA Experiment 108573 PARAMETER Experiment Name: At_Drought_cDNA_P Parameter: Timepoint (hr) Value: 6
  misc_feature: MA Experiment 108573 PARAMETER Experiment Name: At_Drought_cDNA_P Parameter: Tissue Value: Aerial
  misc_feature: MA Experiment 108573 PARAMETER Experiment Name: At_Drought_cDNA_P Parameter: Treatment Value: Drought vs. No Drought
  misc_feature: MA Experiment ID: 108577 Result: Down-regulated in Transcription
  misc_feature: MA Experiment 108577 PARAMETER Experiment Name: At_42deg_Heat_cDNA_P Parameter: Temperature (deg C) Value: 42 vs. 22
  misc_feature: MA Experiment 108577 PARAMETER Experiment Name: At_42deg_Heat_cDNA_P Parameter: Timepoint (hr) Value: 6
  misc_feature: MA Experiment 108577 PARAMETER Experiment Name: At_42deg_Heat_cDNA_P Parameter: Tissue Value: Aerial
  misc_feature: MA Experiment ID: 20000112 Result: Down-regulated in Transcription
  misc_feature: MA Experiment 20000112 PARAMETER Experiment Name: At_42deg_Heat_cDNA_P Parameter: Temperature (deg C) Value: 42 vs. 22
  misc_feature: MA Experiment 20000112 PARAMETER Experiment Name: At_42deg_Heat_cDNA_P Parameter: Timepoint (hr) Value: 2
  misc_feature: MA Experiment 20000112 PARAMETER Experiment Name: At_42deg_Heat_cDNA_P Parameter: Tissue Value: Aerial
  misc_feature: MA Experiment ID: 20000113 Result: Down-regulated in Transcription
  misc_feature: MA Experiment 20000113 PARAMETER Experiment Name: At_42deg_Heat_cDNA_P Parameter: Temperature (deg C) Value: 42 vs. 22
  misc_feature: MA Experiment 20000113 PARAMETER Experiment Name: At_42deg_Heat_cDNA_P Parameter: Timepoint (hr) Value: 8
  misc_feature: MA Experiment 20000113 PARAMETER Experiment Name: At_42deg_Heat_cDNA_P Parameter: Tissue Value: Aerial
  misc_feature: MA Experiment ID: 20000173 Result: Down-regulated in Transcription
  misc_feature: MA Experiment 20000173 PARAMETER Experiment Name: At_42deg_Heat_P Parameter: Age (day) Value: 14
  misc_feature: MA Experiment 20000173 PARAMETER Experiment Name: At_42deg_Heat_P Parameter: Organism Value: A. thaliana
  misc_feature: MA Experiment 20000173 PARAMETER Experiment Name: At_42deg_Heat_P Parameter: Plant Line Value: WS
  misc_feature: MA Experiment 20000173 PARAMETER Experiment Name: At_42deg_Heat_P Parameter: Temperature (deg C) Value: 42 vs. 22
  misc_feature: MA Experiment 20000173 PARAMETER Experiment Name: At_42deg_Heat_P Parameter: Timepoint (hr) Value: 6
  misc_feature: MA Experiment 20000173 PARAMETER Experiment Name: At_42deg_Heat_P Parameter: Tissue Value: Aerial
  misc_feature: MA Experiment ID: 20000179 Result: Up-regulated in Transcription
  misc_feature: MA Experiment 20000179 PARAMETER Experiment Name: At_Germinating_Seeds_P Parameter: Age (hr) Value: 6 vs. 0
  misc_feature: MA Experiment 20000179 PARAMETER Experiment Name: At_Germinating_Seeds_P Parameter: Tissue Value: Germinating Seeds
  misc_feature: MA Experiment ID: 20000180 Result: Up-regulated in Transcription
  misc_feature: MA Experiment 20000180 PARAMETER Experiment Name: At_Germinating_Seeds_P Parameter: Age (hr) Value: 24 vs. 0
  misc_feature: MA Experiment 20000180 PARAMETER Experiment Name: At_Germinating_Seeds_P Parameter: Tissue Value: Germinating Seeds
  misc_feature: MA Experiment ID: 20000437 Result: Down-regulated in Transcription
  misc_feature: MA Experiment 20000437 PARAMETER Experiment Name: At_Drought_P Parameter: Age (day) Value: 8
  misc_feature: MA Experiment 20000437 PARAMETER Experiment Name: At_Drought_P Parameter: Organism Value: A. thaliana
  misc_feature: MA Experiment 20000437 PARAMETER Experiment Name: At_Drought_P Parameter: Plant Line Value: WS
  misc_feature: MA Experiment 20000437 PARAMETER Experiment Name: At_Drought_P Parameter: Timepoint (hr) Value: 24
  misc_feature: MA Experiment 20000437 PARAMETER Experiment Name: At_Drought_P Parameter: Tissue Value: Whole Plant
  misc_feature: MA Experiment 20000437 PARAMETER Experiment Name: At_Drought_P Parameter: Treatment Value: Drought vs. No Drought
  misc_feature: MA Experiment ID: 20000794 Result: Down-regulated in Transcription
  misc_feature: MA Experiment 20000794 PARAMETER Experiment Name: At_Petals_P Parameter: Age (day) Value: 23-25 days
  misc_feature: MA Experiment 20000794 PARAMETER Experiment Name: At_Petals_P Parameter: Plant Line Value: WS
  misc_feature: MA Experiment 20000794 PARAMETER Experiment Name: At_Petals_P Parameter: Tissue Value: Petals vs. Whole plant
  misc_feature: MA Experiment ID: 20001911 Result: Down-regulated in Transcription
  misc_feature: MA Experiment 20001911 PARAMETER Experiment Name: At_Drought_Reproduction_P Parameter: Age (day) Value: 40
  misc_feature: MA Experiment 20001911 PARAMETER Experiment Name: At_Drought_Reproduction_P Parameter: Organism Value: A. thaliana
  misc_feature: MA Experiment 20001911 PARAMETER Experiment Name: At_Drought_Reproduction_P Parameter: Plant Line Value: WS
  misc_feature: MA Experiment 20001911 PARAMETER Experiment Name: At_Drought_Reproduction_P Parameter: Timepoint (day) Value: 10
  misc_feature: MA Experiment 20001911 PARAMETER Experiment Name: At_Drought_Reproduction_P Parameter: Tissue Value: Flowers
  misc_feature: MA Experiment 20001911 PARAMETER Experiment Name: At_Drought_Reproduction_P Parameter: Treatment Value: Drought vs. No Drought
tttcaaaatcccaaatctaaagcactcctcgagaaaagtgtaacaatggcgagaagaccggacgaagaatacgactacttgtttaaagtggttttgatcggagactccggtgtcggcaagtctaatctcctctctagattcactcgcaacgagttctgcttagaatccaaatccaccattggtgtcgaattcgctactcgtactctccaagtggaaggaaggactgtgaaagctcagatatgggacacggctgggcaagaacgatacagagccataactagcgcctattacagaggtgcacttggagctcttttggtctatgatgtcaccaagccaacaacgtttgagaatgtaagcaggtggttaaaagaactaagagaccatgcagattccaatatagtgatcatgttgattgggaacaagacagatctgaagcatctcagagcagttgccacagaggatgctcagagctatgcagagaaagaaggcttatctttcatcgagacatcggctctcgaggcattaaacgtagaaaaggcttttcagacgattctctcggaggtttataggatcatcagcaagaagtcgatatcttcagaccagacaactgcaaatgccaacatcaaggaaggccaaacaattgatgtggctgctacttctgaatcaaacgctaagaagccttgttgctcatcgtcttgaaaggctttgtttgtgttgcacttaaaaaaagccaaatatctatgagactttatttcaaggcttgcgttgtatttgttttctttcttttttctgttgttgataatataactcaaagataattttttatatcaattgtggagttc

SEQ ID NO: 90417 - protein, 232 aa, Arabidopsis thaliana
  peptide (1)..(232): Ceres Seq. ID no. 12723810
  misc_feature (29)..(190): Pfam Name: Ras family Pfam Description: Ras family
  misc_feature (16)..(232): Homolog of NCBI NO: 15217568 NR Description: GTP-binding protein, putative; protein id: supported by cDNA: 17081., supported by cDNA: gi_15010637,
  misc_feature (16)..(231): Homolog of NCBI NO: 3024501 NR Description: RAS-RELATED PROTEIN RAB11C
  misc_feature (16)..(231): Homolog of NCBI NO: 3024528 NR Description: RAS-RELATED PROTEIN RAB2BV
  misc_feature (16)..(231): Homolog of NCBI NO: 1405561 NR Description: FSGTP1 [Fagus sylvatica]
  misc_feature (16)..(231): Homolog of NCBI NO: 34897394 NR Description: Ras-related GTP-binding protein [Oryza sativa
  misc_feature (16)..(231): Homolog of NCBI NO: 15232652 NR Description: GTP-binding protein, putative; protein id: supported by cDNA: 35596., supported by cDNA: gi_20465470
  misc_feature (16)..(231): Homolog of NCBI NO: 15222396 NR Description: GTP-binding protein, putative; protein id:
  misc_feature (16)..(231): Homolog of NCBI NO: 3024506 NR Description: RAS-RELATED PROTEIN RAB11A
  misc_feature (16)..(231): Homolog of NCBI NO: 15237828 NR Description: Ras-related GTP-binding protein, putative; id: At5g59150.1, supported by cDNA: gi_13877728 [Arabidopsis
  misc_feature (73)..(231): Homolog of NCBI NO: 25294121 NR Description: protein F22G5.24 [imported] - Arabidopsis >gi|8778562|gb|AAF79570.1|AC022464_28 F22G5.24 [Arabidopsis
FQNPKSKALLEKSVTMARRPDEEYDYLFKVVLIGDSGVGKSNLLSRFTRNEFCLESKSTIGVEFATRTLQVEGRTVKAQIWDTAGQERYRAITSAYYRGALGALLVYDVTKPTTFENVSRWLKELRDHADSNIVIMLIGNKTDLKHLRAVATEDAQSYAEKEGLSFIETSALEALNVEKAFQTILSEVYRIISKKSISSDQTTANANIKEGQTIDVAATSESNAKKPCCSSS

SEQ ID NO: 90418 - protein, 217 aa, Arabidopsis thaliana; identical to SEQ ID NO: 30179
  peptide (1)..(217): Ceres Seq. ID no. 12723811
  misc_feature (14)..(175): Pfam Name: Ras family Pfam Description: Ras family
  misc_feature (1)..(217): Homolog of NCBI NO: 15217568 NR Description: GTP-binding protein, putative; protein id: supported by cDNA: 17081., supported by cDNA: gi_15010637,
  misc_feature (1)..(216): Homolog of NCBI NO: 3024501 NR Description: RAS-RELATED PROTEIN RAB11C
  misc_feature (1)..(216): Homolog of NCBI NO: 3024528 NR Description: RAS-RELATED PROTEIN RAB2BV
  misc_feature (1)..(216): Homolog of NCBI NO: 1405561 NR Description: FSGTP1 [Fagus sylvatica]
  misc_feature (1)..(216): Homolog of NCBI NO: 34897394 NR Description: Ras-related GTP-binding protein [Oryza sativa
  misc_feature (1)..(216): Homolog of NCBI NO: 15232652 NR Description: GTP-binding protein, putative; protein id: supported by cDNA: 35596., supported by cDNA: gi_20465470
  misc_feature (1)..(216): Homolog of NCBI NO: 15222396 NR Description: GTP-binding protein, putative; protein id:
  misc_feature (1)..(216): Homolog of NCBI NO: 3024506 NR Description: RAS-RELATED PROTEIN RAB11A
  misc_feature (1)..(216): Homolog of NCBI NO: 15237828 NR Description: Ras-related GTP-binding protein, putative; id: At5g59150.1, supported by cDNA: gi_13877728 [Arabidopsis
  misc_feature (58)..(216): Homolog of NCBI NO: 25294121 NR Description: protein F22G5.24 [imported] - Arabidopsis >gi|8778562|gb|AAF79570.1|AC022464_28 F22G5.24 [Arabidopsis

SEQ ID NO: 90419 - DNA, 800 bp, Arabidopsis thaliana
  misc_feature (1)..(800): Ceres Seq. ID no. 12723812
  misc_feature: MA Experiment ID: 108461 Result: Up-regulated in Transcription
  misc_feature: MA Experiment 108461 PARAMETER Experiment Name: At_Germinating_Seeds_cDNA_P Parameter: Age (day) Value: 1 vs. 0
  misc_feature: MA Experiment 108461 PARAMETER Experiment Name: At_Germinating_Seeds_cDNA_P Parameter: Tissue Value: Germinating Seeds
  misc_feature: MA Experiment ID: 108573 Result: Down-regulated in Transcription
  misc_feature: MA Experiment 108573 PARAMETER Experiment Name: At_Drought_cDNA_P Parameter: Timepoint (hr) Value: 6
  misc_feature: MA Experiment 108573 PARAMETER Experiment Name: At_Drought_cDNA_P Parameter: Tissue Value: Aerial
  misc_feature: MA Experiment 108573 PARAMETER Experiment Name: At_Drought_cDNA_P Parameter: Treatment Value: Drought vs. No Drought
  misc_feature: MA Experiment ID: 108577 Result: Down-regulated in Transcription
  misc_feature: MA Experiment 108577 PARAMETER Experiment Name: At_42deg_Heat_cDNA_P Parameter: Temperature (deg C) Value: 42 vs. 22
  misc_feature: MA Experiment 108577 PARAMETER Experiment Name: At_42deg_Heat_cDNA_P Parameter: Timepoint (hr) Value: 6
  misc_feature: MA Experiment 108577 PARAMETER Experiment Name: At_42deg_Heat_cDNA_P Parameter: Tissue Value: Aerial
  misc_feature: MA Experiment ID: 20000112 Result: Down-regulated in Transcription
  misc_feature: MA Experiment 20000112 PARAMETER Experiment Name: At_42deg_Heat_cDNA_P Parameter: Temperature (deg C) Value: 42 vs. 22
  misc_feature: MA Experiment 20000112 PARAMETER Experiment Name: At_42deg_Heat_cDNA_P Parameter: Timepoint (hr) Value: 2
  misc_feature: MA Experiment 20000112 PARAMETER Experiment Name: At_42deg_Heat_cDNA_P Parameter: Tissue Value: Aerial
  misc_feature: MA Experiment ID: 20000113 Result: Down-regulated in Transcription
  misc_feature: MA Experiment 20000113 PARAMETER Experiment Name: At_42deg_Heat_cDNA_P Parameter: Temperature (deg C) Value: 42 vs. 22
  misc_feature: MA Experiment 20000113 PARAMETER Experiment Name: At_42deg_Heat_cDNA_P Parameter: Timepoint (hr) Value: 8
  misc_feature: MA Experiment 20000113 PARAMETER Experiment Name: At_42deg_Heat_cDNA_P Parameter: Tissue Value: Aerial
  misc_feature: MA Experiment ID: 20000173 Result: Down-regulated in Transcription
  misc_feature: MA Experiment 20000173 PARAMETER Experiment Name: At_42deg_Heat_P Parameter: Age (day) Value: 14
  misc_feature: MA Experiment 20000173 PARAMETER Experiment Name: At_42deg_Heat_P Parameter: Organism Value: A. thaliana
  misc_feature: MA Experiment 20000173 PARAMETER Experiment Name: At_42deg_Heat_P Parameter: Plant Line Value: WS
  misc_feature: MA Experiment 20000173 PARAMETER Experiment Name: At_42deg_Heat_P Parameter: Temperature (deg C) Value: 42 vs. 22
  misc_feature: MA Experiment 20000173 PARAMETER Experiment Name: At_42deg_Heat_P Parameter: Timepoint (hr) Value: 6
  misc_feature: MA Experiment 20000173 PARAMETER Experiment Name: At_42deg_Heat_P Parameter: Tissue Value: Aerial
  misc_feature: MA Experiment ID: 20000179 Result: Up-regulated in Transcription
  misc_feature: MA Experiment 20000179 PARAMETER Experiment Name: At_Germinating_Seeds_P Parameter: Age (hr) Value: 6 vs. 0
  misc_feature: MA Experiment 20000179 PARAMETER Experiment Name: At_Germinating_Seeds_P Parameter: Tissue Value: Germinating Seeds
  misc_feature: MA Experiment ID: 20000180 Result: Up-regulated in Transcription
  misc_feature: MA Experiment 20000180 PARAMETER Experiment Name: At_Germinating_Seeds_P Parameter: Age (hr) Value: 24 vs. 0
  misc_feature: MA Experiment 20000180 PARAMETER Experiment Name: At_Germinating_Seeds_P Parameter: Tissue Value: Germinating Seeds
  misc_feature: MA Experiment ID: 20000437 Result: Down-regulated in Transcription
  misc_feature: MA Experiment 20000437 PARAMETER Experiment Name: At_Drought_P Parameter: Age (day) Value: 8
  misc_feature: MA Experiment 20000437 PARAMETER Experiment Name: At_Drought_P Parameter: Organism Value: A. thaliana
  misc_feature: MA Experiment 20000437 PARAMETER Experiment Name: At_Drought_P Parameter: Plant Line Value: WS
  misc_feature: MA Experiment 20000437 PARAMETER Experiment Name: At_Drought_P Parameter: Timepoint (hr) Value: 24
  misc_feature: MA Experiment 20000437 PARAMETER Experiment Name: At_Drought_P Parameter: Tissue Value: Whole Plant
  misc_feature: MA Experiment 20000437 PARAMETER Experiment Name: At_Drought_P Parameter: Treatment Value: Drought vs. No Drought
  misc_feature: MA Experiment ID: 20000794 Result: Down-regulated in Transcription
  misc_feature: MA Experiment 20000794 PARAMETER Experiment Name: At_Petals_P Parameter: Age (day) Value: 23-25 days
  misc_feature: MA Experiment 20000794 PARAMETER Experiment Name: At_Petals_P Parameter: Plant Line Value: WS
  misc_feature: MA Experiment 20000794 PARAMETER Experiment Name: At_Petals_P Parameter: Tissue Value: Petals vs. Whole plant
  misc_feature: MA Experiment ID: 20001911 Result: Down-regulated in Transcription
  misc_feature: MA Experiment 20001911 PARAMETER Experiment Name: At_Drought_Reproduction_P Parameter: Age (day) Value: 40
  misc_feature: MA Experiment 20001911 PARAMETER Experiment Name: At_Drought_Reproduction_P Parameter: Organism Value: A. thaliana
  misc_feature: MA Experiment 20001911 PARAMETER Experiment Name: At_Drought_Reproduction_P Parameter: Plant Line Value: WS
  misc_feature: MA Experiment 20001911 PARAMETER Experiment Name: At_Drought_Reproduction_P Parameter: Timepoint (day) Value: 10
  misc_feature: MA Experiment 20001911 PARAMETER Experiment Name: At_Drought_Reproduction_P Parameter: Tissue Value: Flowers
  misc_feature: MA Experiment 20001911 PARAMETER Experiment Name: At_Drought_Reproduction_P Parameter: Treatment Value: Drought vs. No Drought
aaggggaaagagaaattaaattatttatttatttctgtcatcttctccttttctatttcaaaatcccaaatctaaagcactcctcgagaaaagtgtaacaatggcgagaagaccggacgaagaatacgactacttgtttaaagtggttttgatcggagactccggtgtcggcaagtctaatctcctctctagattcactcgcaacgagttctgcttagaatccaaatccaccattggtgtcgaattcgctactcgtactctccaagtggaaggaaggactgtgaaagctcagatatgggacacggctgggcaagaacgatacagagccataactagcgcctattacagaggtgcacttggagctcttttggtctatgatgtcaccaagccaacaacgtttgagaatgtaagcaggtggttaaaagaactaagagaccatgcagattccaatatagtgatcatgttgattgggaacaagacagatctgaagcatctcagagcagttgccacagaggatgctcagagctatgcagagaaagaaggcttatctttcatcgagacatcggctctcgaggcattaaacgtagaaaaggcttttcagacgattctctcggaggtttataggatcatcagcaagaagtcgatatcttcagaccagacaactgcaaatgccaacatcaaggaaggccaaacaattgatgtggctgctacttctgaatcaaacgctaagaagccttgttgctcatcgtcttgaaaggctttgtttgtgttgcacttaaaaaaagccaaatatctatgag

SEQ ID NO: 90420 - protein, 217 aa, Arabidopsis thaliana; identical to SEQ ID NO: 30179
  peptide (1)..(217): Ceres Seq. ID no. 12723813
  misc_feature (14)..(175): Pfam Name: Ras family Pfam Description: Ras family
  misc_feature (1)..(217): Homolog of NCBI NO: 15217568 NR Description: GTP-binding protein, putative; protein id: supported by cDNA: 17081., supported by cDNA: gi_15010637,
  misc_feature (1)..(216): Homolog of NCBI NO: 3024501 NR Description: RAS-RELATED PROTEIN RAB11C
  misc_feature (1)..(216): Homolog of NCBI NO: 3024528 NR Description: RAS-RELATED PROTEIN RAB2BV
  misc_feature (1)..(216): Homolog of NCBI NO: 1405561 NR Description: FSGTP1 [Fagus sylvatica]
  misc_feature (1)..(216): Homolog of NCBI NO: 34897394 NR Description: Ras-related GTP-binding protein [Oryza sativa
  misc_feature (1)..(216): Homolog of NCBI NO: 15232652 NR Description: GTP-binding protein, putative; protein id: supported by cDNA: 35596., supported by cDNA: gi_20465470
  misc_feature (1)..(216): Homolog of NCBI NO: 15222396 NR Description: GTP-binding protein, putative; protein id:
  misc_feature (1)..(216): Homolog of NCBI NO: 3024506 NR Description: RAS-RELATED PROTEIN RAB11A
  misc_feature (1)..(216): Homolog of NCBI NO: 15237828 NR Description: Ras-related GTP-binding protein, putative; id: At5g59150.1, supported by cDNA: gi_13877728 [Arabidopsis
  misc_feature (58)..(216): Homolog of NCBI NO: 25294121 NR Description: protein F22G5.24 [imported] - Arabidopsis >gi|8778562|gb|AAF79570.1|AC022464_28 F22G5.24 [Arabidopsis

SEQ ID NO: 90421 - DNA, 1278 bp, Arabidopsis thaliana
  misc_feature (1)..(1278): Ceres Seq. ID no. 12723829
  misc_feature: MA Experiment ID: 20000184 Result: Up-regulated in Transcription
  misc_feature: MA Experiment 20000184 PARAMETER Experiment Name: At_Shoots__P Parameter: Age (day) Value: 7
  misc_feature: MA Experiment 20000184 PARAMETER Experiment Name: At_Shoots__P Parameter: Tissue Value: Shoots vs. Whole Plant
  misc_feature: MA Experiment ID: 20000185 Result: Down-regulated in Transcription
  misc_feature: MA Experiment 20000185 PARAMETER Experiment Name: At_Roots__P Parameter: Age (day) Value: 7 vs. 21
  misc_feature: MA Experiment 20000185 PARAMETER Experiment Name: At_Roots__P Parameter: Organism Value: A. thaliana
  misc_feature: MA Experiment 20000185 PARAMETER Experiment Name: At_Roots__P Parameter: Tissue Value: Roots vs. Whole Plant
  misc_feature: MA Experiment ID: 20000227 Result: Down-regulated in Transcription
  misc_feature: MA Experiment 20000227 PARAMETER Experiment Name: At_Root-Tips-vs-Tops_P Parameter: Tissue Value: Root Tips vs. Root Tops
  misc_feature: MA Experiment ID: 20000264 Result: Up-regulated in Transcription
  misc_feature: MA Experiment 20000264 PARAMETER Experiment Name: At_Open_Flower_P Parameter: Age (day) Value: 21
  misc_feature: MA Experiment 20000264 PARAMETER Experiment Name: At_Open_Flower_P Parameter: Plant Line Value: WS
  misc_feature: MA Experiment 20000264 PARAMETER Experiment Name: At_Open_Flower_P Parameter: Tissue Value: Open Flower vs. Whole Plant
  misc_feature: MA Experiment ID: 20000438 Result: Up-regulated in Transcription
  misc_feature: MA Experiment 20000438 PARAMETER Experiment Name: At_Shoots__P Parameter: Age (day) Value: 14
  misc_feature: MA Experiment 20000438 PARAMETER Experiment Name: At_Shoots__P Parameter: Tissue Value: Shoots vs. Whole Plant
  misc_feature: MA Experiment ID: 20000451 Result: Down-regulated in Transcription
  misc_feature: MA Experiment 20000451 PARAMETER Experiment Name: At_CS6879_Shoots-Roots_P Parameter: Age (day) Value: 14
  misc_feature: MA Experiment 20000451 PARAMETER Experiment Name: At_CS6879_Shoots-Roots_P Parameter: Organism Value: A. thaliana
  misc_feature: MA Experiment 20000451 PARAMETER Experiment Name: At_CS6879_Shoots-Roots_P Parameter: Plant Line Value: CS6879 vs. WS
  misc_feature: MA Experiment 20000451 PARAMETER Experiment Name: At_CS6879_Shoots-Roots_P Parameter: Tissue Value: Roots
  misc_feature: MA Experiment ID: 20000794 Result: Up-regulated in Transcription
  misc_feature: MA Experiment 20000794 PARAMETER Experiment Name: At_Petals_P Parameter: Age (day) Value: 23-25 days
  misc_feature: MA Experiment 20000794 PARAMETER Experiment Name: At_Petals_P Parameter: Plant Line Value: WS
  misc_feature: MA Experiment 20000794 PARAMETER Experiment Name: At_Petals_P Parameter: Tissue Value: Petals vs. Whole plant
  misc_feature: MA Experiment ID: 20001248 Result: Down-regulated in Transcription
  misc_feature: MA Experiment 20001248 PARAMETER Experiment Name: At_Far-red-induction_P Parameter: Age (day) Value: 7
  misc_feature: MA Experiment 20001248 PARAMETER Experiment Name: At_Far-red-induction_P Parameter: Light Value: Far-red vs. White
  misc_feature: MA Experiment 20001248 PARAMETER Experiment Name: At_Far-red-induction_P Parameter: Organism Value: A. thaliana
  misc_feature: MA Experiment 20001248 PARAMETER Experiment Name: At_Far-red-induction_P Parameter: Plant Line Value: Columbia
  misc_feature: MA Experiment 20001248 PARAMETER Experiment Name: At_Far-red-induction_P Parameter: Timepoint (hr) Value: 4
  misc_feature: MA Experiment 20001248 PARAMETER Experiment Name: At_Far-red-induction_P Parameter: Tissue Value: Whole Plant
  misc_feature: MA Experiment ID: 20001450 Result: Down-regulated in Transcription
  misc_feature: MA Experiment 20001450 PARAMETER Experiment Name: At_Far-red-induction_P Parameter: Age (day) Value: 7
  misc_feature: MA Experiment 20001450 PARAMETER Experiment Name: At_Far-red-induction_P Parameter: Light Value: Far-red vs. White
  misc_feature: MA Experiment 20001450 PARAMETER Experiment Name: At_Far-red-induction_P Parameter: Organism Value: A. thaliana
  misc_feature: MA Experiment 20001450 PARAMETER Experiment Name: At_Far-red-induction_P Parameter: Plant Line Value: Columbia
  misc_feature: MA Experiment 20001450 PARAMETER Experiment Name: At_Far-red-induction_P Parameter: Timepoint (hr) Value: 8
  misc_feature: MA Experiment 20001450 PARAMETER Experiment Name: At_Far-red-induction_P Parameter: Tissue Value: Whole Plant
  misc_feature: MA Experiment ID: 20001557 Result: Down-regulated in Transcription
  misc_feature: MA Experiment 20001557 PARAMETER Experiment Name: At_Drought_Soil_Dry_P Parameter: Age (day) Value: 27
  misc_feature: MA Experiment 20001557 PARAMETER Experiment Name: At_Drought_Soil_Dry_P Parameter: Organism Value: A. thaliana
  misc_feature: MA Experiment 20001557 PARAMETER Experiment Name: At_Drought_Soil_Dry_P Parameter: Plant Line Value: WS
  misc_feature: MA Experiment 20001557 PARAMETER Experiment Name: At_Drought_Soil_Dry_P Parameter: Post Timepoint (hr) Value: 3
  misc_feature: MA Experiment 20001557 PARAMETER Experiment Name: At_Drought_Soil_Dry_P Parameter: Post-Treatment Value: Re-Water vs. No Drought
  misc_feature: MA Experiment 20001557 PARAMETER Experiment Name: At_Drought_Soil_Dry_P Parameter: Timepoint (day) Value: 13
  misc_feature: MA Experiment 20001557 PARAMETER Experiment Name: At_Drought_Soil_Dry_P Parameter: Treatment Value: Drought vs. No Drought
  misc_feature: MA Experiment ID: 20001558 Result: Down-regulated in Transcription
  misc_feature: MA Experiment 20001558 PARAMETER Experiment Name: At_Drought_Soil_Dry_P Parameter: Age (day) Value: 27
  misc_feature: MA Experiment 20001558 PARAMETER Experiment Name: At_Drought_Soil_Dry_P Parameter: Organism Value: A. thaliana
  misc_feature: MA Experiment 20001558 PARAMETER Experiment Name: At_Drought_Soil_Dry_P Parameter: Plant Line Value: WS
  misc_feature: MA Experiment 20001558 PARAMETER Experiment Name: At_Drought_Soil_Dry_P Parameter: Post Timepoint (hr) Value: 6
  misc_feature: MA Experiment 20001558 PARAMETER Experiment Name: At_Drought_Soil_Dry_P Parameter: Post-Treatment Value: Re-Water vs. No Drought
  misc_feature: MA Experiment 20001558 PARAMETER Experiment Name: At_Drought_Soil_Dry_P Parameter: Timepoint (day) Value: 13
  misc_feature: MA Experiment 20001558 PARAMETER Experiment Name: At_Drought_Soil_Dry_P Parameter: Treatment Value: Drought vs. No Drought
  misc_feature: MA Experiment ID: 20001905 Result: Down-regulated in Transcription
  misc_feature: MA Experiment 20001905 PARAMETER Experiment Name: At_Drought_Reproduction_P Parameter: Age (day) Value: 40
  misc_feature: MA Experiment 20001905 PARAMETER Experiment Name: At_Drought_Reproduction_P Parameter: Organism Value: A. thaliana
  misc_feature: MA Experiment 20001905 PARAMETER Experiment Name: At_Drought_Reproduction_P Parameter: Plant Line Value: WS
  misc_feature: MA Experiment 20001905 PARAMETER Experiment Name: At_Drought_Reproduction_P Parameter: Timepoint (day) Value: 10
  misc_feature: MA Experiment 20001905 PARAMETER Experiment Name: At_Drought_Reproduction_P Parameter: Tissue Value: Rosettes
  misc_feature: MA Experiment 20001905 PARAMETER Experiment Name: At_Drought_Reproduction_P Parameter: Treatment Value: Drought vs. No Drought
aagcttccctctctcttcgagtcggttcttaatctccgggataaaatggcgaccgaggacgtgaagctgatcggctcatgggcgagtgtttacgtcatgagggcgaggatcgctctccacctcaaatctattagctacgaattccttcaggagacgtatggttcaaagagcgaattgctcctcaaatcaaacccggttcacaagaagatgccggttctgattcacgctgacaaaccggtgtgcgagtccaacatcatcgttcattatatcgacgaggcttggaactcttctggaccttccattctcccgtcccatccatacgaccgggccattgctcggttttgggctgcctacatagacgatcaggttcatagattgttcttcacttgctcttttcactttgattgcatgtaataaagtataccgggaattaatgagggattgatttggttttgattgctttaattttgatacatccccaaaactttagcggttcttttatgattgttattggtttaatccggttaataatctagaataacacgatatgaccgatttaaaccggatagggtttgactatagtccagcttcaactaactttaatttctagtttatacggatagttaggtaattagtcaacttttatgttgaaagaaattagacattttgtttatcttccttactatatatgacataatcaagtaaatcttaaatcttatatgttctgacttaaatttgatatgaatggaagtggtttatctctgtgagaagtatcctaacagctcaaggagacgaagagaagaaagcagccatagctcaagttgaagaaaggaccaagcttctggagaaagcattcaacgattgtagccaaggaaaaccgttcttcaacggtgaccatatcggttacctcgacattgccttggggagcttcttaggttggtggagagtcgtcgagttggatgccaatcataaatttcttgatgagaccaaaactccctctctagtcaaatgggcagagcggttctgtgatgatcccgctgtgaaacctataatgcccgagattacaaagctcgctgaattcgcaaggaagctctttcctaagcggcaagcataaactggattactaggatgtaagttatataataagcacagccaaatattttttttatgtcttttgcatattcgttcataatcttggagttatgaaaatattgtaatccatattacctcagatcaaattttacatgagtgtaccaaacatataaacattgattatcg

SEQ ID NO: 90422 - protein, 137 aa, Arabidopsis thaliana
  peptide (1)..(137): Ceres Seq. ID no. 12723830
  misc_feature (16)..(122): Homolog of NCBI NO: 15218517 NR Description: glutathione transferase, putative; protein id:
  misc_feature (16)..(125): Homolog of NCBI NO: 4914338 NR Description: F14N23.24 [Arabidopsis thaliana]
  misc_feature (16)..(122): Homolog of NCBI NO: 11096016 NR Description: glutathione S-transferase [Arabidopsis thaliana]
  misc_feature (16)..(122): Homolog of NCBI NO: 15375408 NR Description: glutathione S-transferase [Arabidopsis thaliana]
  misc_feature (16)..(122): Homolog of NCBI NO: 11096018 NR Description: glutathione S-transferase [Arabidopsis thaliana]
  misc_feature (11)..(122): Homolog of NCBI NO: 6856103 NR Description: glutathione S-transferase [Gossypium hirsutum]
  misc_feature (18)..(122): Homolog of NCBI NO: 6652870 NR Description: glutathione S-transferase 1 [Papaver somniferum]
  misc_feature (18)..(122): Homolog of NCBI NO: 6652874 NR Description: glutathione S-transferase 3 [Papaver somniferum]
  misc_feature (16)..(122): Homolog of NCBI NO: 15218518 NR Description: glutathione transferase, putative; protein id: supported by cDNA: gi_11096015, supported by cDNA: gi_15375407
KLPSLFESVLNLRDKMATEDVKLIGSWASVYVMRARIALHLKSISYEFLQETYGSKSELLLKSNPVHKKMPVLIHADKPVCESNIIVHYIDEAWNSSGPSILPSHPYDRAIARFWAAYIDDQVHRLFFTCSFHFDCM

SEQ ID NO: 90423 - protein, 122 aa, Arabidopsis thaliana
  peptide (1)..(122): Ceres Seq. ID no. 12723831
  misc_feature (1)..(107): Homolog of NCBI NO: 15218517 NR Description: glutathione transferase, putative; protein id:
  misc_feature (1)..(110): Homolog of NCBI NO: 4914338 NR Description: F14N23.24 [Arabidopsis thaliana]
  misc_feature (1)..(107): Homolog of NCBI NO: 11096016 NR Description: glutathione S-transferase [Arabidopsis thaliana]
  misc_feature (1)..(107): Homolog of NCBI NO: 15375408 NR Description: glutathione S-transferase [Arabidopsis thaliana]
  misc_feature (1)..(107): Homolog of NCBI NO: 11096018 NR Description: glutathione S-transferase [Arabidopsis thaliana]
  misc_feature (1)..(107): Homolog of NCBI NO: 6856103 NR Description: glutathione S-transferase [Gossypium hirsutum]
  misc_feature (3)..(107): Homolog of NCBI NO: 6652870 NR Description: glutathione S-transferase 1 [Papaver somniferum]
  misc_feature (3)..(107): Homolog of NCBI NO: 6652874 NR Description: glutathione S-transferase 3 [Papaver somniferum]
  misc_feature (1)..(107): Homolog of NCBI NO: 15218518 NR Description: glutathione transferase, putative; protein id: supported by cDNA: gi_11096015, supported by cDNA: gi_15375407
MATEDVKLIGSWASVYVMRARIALHLKSISYEFLQETYGSKSELLLKSNPVHKKMPVLIHADKPVCESNIIVHYIDEAWNSSGPSILPSHPYDRAIARFWAAYIDDQVHRLFFTCSFHFDCM

SEQ ID NO: 90424 - protein, 105 aa, Arabidopsis thaliana
  peptide (1)..(105): Ceres Seq. ID no. 12723832
  misc_feature (1)..(90): Homolog of NCBI NO: 15218517 NR Description: glutathione transferase, putative; protein id:
  misc_feature (1)..(93): Homolog of NCBI NO: 4914338 NR Description: F14N23.24 [Arabidopsis thaliana]
  misc_feature (1)..(90): Homolog of NCBI NO: 11096016 NR Description: glutathione S-transferase [Arabidopsis thaliana]
  misc_feature (1)..(90): Homolog of NCBI NO: 15375408 NR Description: glutathione S-transferase [Arabidopsis thaliana]
  misc_feature (1)..(90): Homolog of NCBI NO: 11096018 NR Description: glutathione S-transferase [Arabidopsis thaliana]
  misc_feature (1)..(90): Homolog of NCBI NO: 6856103 NR Description: glutathione S-transferase [Gossypium hirsutum]
  misc_feature (1)..(90): Homolog of NCBI NO: 6652870 NR Description: glutathione S-transferase 1 [Papaver somniferum]
  misc_feature (1)..(90): Homolog of NCBI NO: 6652874 NR Description: glutathione S-transferase 3 [Papaver somniferum]
  misc_feature (1)..(90): Homolog of NCBI NO: 15218518 NR Description: glutathione transferase, putative; protein id: supported by cDNA: gi_11096015, supported by cDNA: gi_15375407
MRARIALHLKSISYEFLQETYGSKSELLLKSNPVHKKMPVLIHADKPVCESNIIVHYIDEAWNSSGPSILPSHPYDRAIARFWAAYIDDQVHRLFFTCSFHFDCM

SEQ ID NO: 90425 - DNA, 1930 bp, Arabidopsis thaliana
  misc_feature (1)..(1930): Ceres Seq. ID no. 12723854
  misc_feature: MA Experiment ID: 20000355 Result: Down-regulated in Transcription
  misc_feature: MA Experiment 20000355 PARAMETER Experiment Name: At_Siliques_Sub_P Parameter: Age (day) Value: 21
  misc_feature: MA Experiment 20000355 PARAMETER Experiment Name: At_Siliques_Sub_P Parameter: Organism Value: A. thaliana
  misc_feature: MA Experiment 20000355 PARAMETER Experiment Name: At_Siliques_Sub_P Parameter: Plant Line Value: WS
  misc_feature: MA Experiment 20000355 PARAMETER Experiment Name: At_Siliques_Sub_P Parameter: Tissue Value: Less Than 5mm Siliques vs. Whole Plant
gaagcgaaacacgacacggattcacacaatactcagatatatacaaaaaggattttagattttgattcagaaccaaaaataaaaaaaggaacttttttatttctttgtttgattttttgggttgttggttttttttttgtttgttaattttggggatcgatgtcggaaaaggaagaagctccgtcgacatcgaagtccaccggagctccgtcgcgtccgactttatctcttcctccacggccgtttagtgagatgttctttaacggtggcgttggattcagtcctggtccgatgactctggtctctaatatgttccctgattccgatgagtttaggtctttctctcagcttctcgctggagccatgtcttctccagcgactgcagctgctgctgctgctgctgcgacggctagtgattaccagagacttggtgaagggactaatagctctagtggtgatgttgacccgagattcaagcaaaacagaccaaccgcggttcttgacctgatatgtaacattgtgcagggatcatatggaatgacacatcagcaagctctagctcaagtcactgctcaagcagttcaagccaatgccaatatgcaaccacaaacagagtaccctcctccctctcaagttcaatcattttcatcgggtcaagcgcagatcccgacctcggctccactaccagctcaaagagaaacctcagatgtaaccatcatagagcacaggtcacaacagcctctaaatgttgacaaaccagctgatgatggctataactggcgaaaatatgggcaaaagcaagttaaaggtagcgagtttccacgaagctattacaagtgtactaatccaggatgtcctgtcaagaagaaggttgagagatctcttgatggacaagtaacggagattatctacaaaggtcagcacaatcatgaacctcctcaaaacactaagcgaggtaacaaagataacaccgcgaatataaatgggagttcgataaataacaatcgcgggagttctgaattgggggcatcacagtttcaaactaatagctccaacaagactaagagagagcaacatgaagcagtaagtcaagctacgacaacagagcacttgtctgaggcaagtgacggtgaagaagttggtaatggagaaactgatgtgagagagaaagatgagaatgagcctgatcccaagagaagaagtacagaagttcggatttcagaaccagctcctgctgcttcacatagaactgtgacagagcctagaattattgtccaaacgacgagtgaagttgatcttctagatgatggatataggtggcgtaaatatggacagaaagttgtcaaagggaatccttatccgaggagctactacaagtgcacaacaccaggatgtggtgtgaggaaacatgtagagagagcagcaacagatccaaaagctgtagtaacaacatatgaaggaaaacataaccatgaccttcccgctgctaaatcaagcagccatgccgctgcagcggcacagttaaggccagataatcgacctggcggtttggctaacttaaatcaacagcagcagcaacagcccgttgcgcggctaaggcttaaagaagagcaaacaacttgagagaagaaaactcttgaccgtttttcattacaaaagctttcaaattccactcacacacttgtctgaaaaatctagcagtttgcaggaaagaaacagcttcaagaggttgtagttcttctatgttctggtgtaaaacttaaaagctttttagggttttcagatttctgtttactaatactgtatgtgaattcttttgtacatgaggaagaaaattacagggggatattttgtgttgtatcttttgtgttattgtttcagtaaaagataggtcttacattttgtgtatgaaaatgaaagtatttgttgt

SEQ ID NO: 90426 - protein, 487 aa, Arabidopsis thaliana
  peptide (1)..(487): Ceres Seq. ID no. 12723855
  misc_feature (1)..(487): Homolog of NCBI NO: 30683544 NR Description: WRKY family transcription factor [Arabidopsis
  misc_feature (112)..(487): Homolog of NCBI NO: 8778394 NR Description: F16A14.18 [Arabidopsis thaliana]
  misc_feature (1)..(114): Homolog of NCBI NO: 8778394 NR Description: F16A14.18 [Arabidopsis thaliana]
  misc_feature (121)..(487): Homolog of NCBI NO: 15223004 NR Description: WRKY family transcription factor; protein id: supported by cDNA: gi_15010749, supported by cDNA: gi_15991741 thaliana] >gi|20978796|sp|Q9XI90|WRK4_ARATH Probable
  misc_feature (1)..(114): Homolog of NCBI NO: 15223004 NR Description: WRKY family transcription factor; protein id: supported by cDNA: gi_15010749, supported by cDNA: gi_15991741 thaliana] >gi|20978796|sp|Q9XI90|WRK4_ARATH Probable
  misc_feature (121)..(487): Homolog of NCBI NO: 15227612 NR Description: WRKY family transcription factor; protein id: supported by cDNA: gi_13506736 [Arabidopsis thaliana]
  misc_feature (1)..(114): Homolog of NCBI NO: 15227612 NR Description: WRKY family transcription factor; protein id: supported by cDNA: gi_13506736 [Arabidopsis thaliana]
  misc_feature (122)..(487): Homolog of NCBI NO: 25348323 NR Description: DNA-binding protein WRKY2 [imported] - common
  misc_feature (7)..(114): Homolog of NCBI NO: 25348323 NR Description: DNA-binding protein WRKY2 [imported] - common
  misc_feature (36)..(402): Homolog of NCBI NO: 30681996 NR Description: disease resistance protein -related [Arabidopsis
MSEKEEAPSTSKSTGAPSRPTLSLPPRPFSEMFFNGGVGFSPGPMTLVSNMFPDSDEFRSFSQLLAGAMSSPATAAAAAAAATASDYQRLGEGTNSSSGDVDPRFKQNRPTAVLDLICNIVQGSYGMTHQQALAQVTAQAVQANANMQPQTEYPPPSQVQSFSSGQAQIPTSAPLPAQRETSDVTIIEHRSQQPLNVDKPADDGYNWRKYGQKQVKGSEFPRSYYKCTNPGCPVKKKVERSLDGQVTEIIYKGQHNHEPPQNTKRGNKDNTANINGSSINNNRGSSELGASQFQTNSSNKTKREQHEAVSQATTTEHLSEASDGEEVGNGETDVREKDENEPDPKRRSTEVRISEPAPAASHRTVTEPRIIVQTTSEVDLLDDGYRWRKYGQKVVKGNPYPRSYYKCTTPGCGVRKHVERAATDPKAVVTTYEGKHNHDLPAAKSSSHAAAAAQLRPDNRPGGLANLNQQQQQQPVARLRLKEEQTT

SEQ ID NO: 90427 - protein, 456 aa, Arabidopsis thaliana
  peptide (1)..(456): Ceres Seq. ID no. 12723856
  misc_feature (1)..(456): Homolog of NCBI NO: 30683544 NR Description: WRKY family transcription factor [Arabidopsis
  misc_feature (81)..(456): Homolog of NCBI NO: 8778394 NR Description: F16A14.18 [Arabidopsis thaliana]
  misc_feature (1)..(83): Homolog of NCBI NO: 8778394 NR Description: F16A14.18 [Arabidopsis thaliana]
  misc_feature (90)..(456): Homolog of NCBI NO: 15223004 NR Description: WRKY family transcription factor; protein id: supported by cDNA: gi_15010749, supported by cDNA: gi_15991741 thaliana] >gi|20978796|sp|Q9XI90|WRK4_ARATH Probable
  misc_feature (1)..(83): Homolog of NCBI NO: 15223004 NR Description: WRKY family transcription factor; protein id: supported by cDNA: gi_15010749, supported by cDNA: gi_15991741 thaliana] >gi|20978796|sp|Q9XI90|WRK4_ARATH Probable
  misc_feature (90)..(456): Homolog of NCBI NO: 15227612 NR Description: WRKY family transcription factor; protein id: supported by cDNA: gi_13506736 [Arabidopsis thaliana]
  misc_feature (1)..(83): Homolog of NCBI NO: 15227612 NR Description: WRKY family transcription factor; protein id: supported by cDNA: gi_13506736 [Arabidopsis thaliana]
  misc_feature (91)..(456): Homolog of NCBI NO: 25348323 NR Description: DNA-binding protein WRKY2 [imported] - common
  misc_feature (1)..(83): Homolog of NCBI NO: 25348323 NR Description: DNA-binding protein WRKY2 [imported] - common
  misc_feature (5)..(371): Homolog of NCBI NO: 30681996 NR Description: disease resistance protein -related [Arabidopsis
MFFNGGVGFSPGPMTLVSNMFPDSDEFRSFSQLLAGAMSSPATAAAAAAAATASDYQRLGEGTNSSSGDVDPRFKQNRPTAVLDLICNIVQGSYGMTHQQALAQVTAQAVQANANMQPQTEYPPPSQVQSFSSGQAQIPTSAPLPAQRETSDVTIIEHRSQQPLNVDKPADDGYNWRKYGQKQVKGSEFPRSYYKCTNPGCPVKKKVERSLDGQVTEIIYKGQHNHEPPQNTKRGNKDNTANINGSSINNNRGSSELGASQFQTNSSNKTKREQHEAVSQATTTEHLSEASDGEEVGNGETDVREKDENEPDPKRRSTEVRISEPAPAASHRTVTEPRIIVQTTSEVDLLDDGYRWRKYGQKVVKGNPYPRSYYKCTTPGCGVRKHVERAATDPKAVVTTYEGKHNHDLPAAKSSSHAAAAAQLRPDNRPGGLANLNQQQQQQPVARLRLKEEQTT

SEQ ID NO: 90428 - protein, 443 aa, Arabidopsis thaliana
  peptide (1)..(443): Ceres Seq. ID no. 12723857
  misc_feature (1)..(443): Homolog of NCBI NO: 30683544 NR Description: WRKY family transcription factor [Arabidopsis
  misc_feature (68)..(443): Homolog of NCBI NO: 8778394 NR Description: F16A14.18 [Arabidopsis thaliana]
  misc_feature (1)..(70): Homolog of NCBI NO: 8778394 NR Description: F16A14.18 [Arabidopsis thaliana]
  misc_feature (77)..(443): Homolog of NCBI NO: 15223004 NR Description: WRKY family transcription factor; protein id: supported by cDNA: gi_15010749, supported by cDNA: gi_15991741 thaliana] >gi|20978796|sp|Q9XI90|WRK4_ARATH Probable
  misc_feature (1)..(70): Homolog of NCBI NO: 15223004 NR Description: WRKY family transcription factor; protein id: supported by cDNA: gi_15010749, supported by cDNA: gi_15991741 thaliana] >gi|20978796|sp|Q9XI90|WRK4_ARATH Probable
  misc_feature (77)..(443): Homolog of NCBI NO: 15227612 NR Description: WRKY family transcription factor; protein id: supported by cDNA: gi_13506736 [Arabidopsis thaliana]
  misc_feature (1)..(70): Homolog of NCBI NO: 15227612 NR Description: WRKY family transcription factor; protein id: supported by cDNA: gi_13506736 [Arabidopsis thaliana]
  misc_feature (78)..(443): Homolog of NCBI NO: 25348323 NR Description: DNA-binding protein WRKY2 [imported] - common
  misc_feature (1)..(70): Homolog of NCBI NO: 25348323 NR Description: DNA-binding protein WRKY2 [imported] - common
  misc_feature (1)..(358): Homolog of NCBI NO: 30681996 NR Description: disease resistance protein -related [Arabidopsis
MTLVSNMFPDSDEFRSFSQLLAGAMSSPATAAAAAAAATASDYQRLGEGTNSSSGDVDPRFKQNRPTAVLDLICNIVQGSYGMTHQQALAQVTAQAVQANANMQPQTEYPPPSQVQSFSSGQAQIPTSAPLPAQRETSDVTIIEHRSQQPLNVDKPADDGYNWRKYGQKQVKGSEFPRSYYKCTNPGCPVKKKVERSLDGQVTEIIYKGQHNHEPPQNTKRGNKDNTANINGSSINNNRGSSELGASQFQTNSSNKTKREQHEAVSQATTTEHLSEASDGEEVGNGETDVREKDENEPDPKRRSTEVRISEPAPAASHRTVTEPRIIVQTTSEVDLLDDGYRWRKYGQKVVKGNPYPRSYYKCTTPGCGVRKHVERAATDPKAVVTTYEGKHNHDLPAAKSSSHAAAAAQLRPDNRPGGLANLNQQQQQQPVARLRLKEEQTT

SEQ ID NO: 90429 - DNA, 1391 bp, Arabidopsis thaliana
  misc_feature (1)..(1391): Ceres Seq. ID no. 12723858
  misc_feature: MA Experiment ID: 20000171 Result: Down-regulated in Transcription
  misc_feature: MA Experiment 20000171 PARAMETER Experiment Name: At_42deg_Heat_P Parameter: Age (day) Value: 14
  misc_feature: MA Experiment 20000171 PARAMETER Experiment Name: At_42deg_Heat_P Parameter: Organism Value: A. thaliana
  misc_feature: MA Experiment 20000171 PARAMETER Experiment Name: At_42deg_Heat_P Parameter: Plant Line Value: WS
  misc_feature: MA Experiment 20000171 PARAMETER Experiment Name: At_42deg_Heat_P Parameter: Temperature (deg C) Value: 42 vs. 22
  misc_feature: MA Experiment 20000171 PARAMETER Experiment Name: At_42deg_Heat_P Parameter: Timepoint (hr) Value: 1
  misc_feature: MA Experiment 20000171 PARAMETER Experiment Name: At_42deg_Heat_P Parameter: Tissue Value: Aerial
  misc_feature: MA Experiment ID: 20000173 Result: Down-regulated in Transcription
  misc_feature: MA Experiment 20000173 PARAMETER Experiment Name: At_42deg_Heat_P Parameter: Age (day) Value: 14
  misc_feature: MA Experiment 20000173 PARAMETER Experiment Name: At_42deg_Heat_P Parameter: Organism Value: A. thaliana
  misc_feature: MA Experiment 20000173 PARAMETER Experiment Name: At_42deg_Heat_P Parameter: Plant Line Value: WS
  misc_feature: MA Experiment 20000173 PARAMETER Experiment Name: At_42deg_Heat_P Parameter: Temperature (deg C) Value: 42 vs. 22
  misc_feature: MA Experiment 20000173 PARAMETER Experiment Name: At_42deg_Heat_P Parameter: Timepoint (hr) Value: 6
  misc_feature: MA Experiment 20000173 PARAMETER Experiment Name: At_42deg_Heat_P Parameter: Tissue Value: Aerial
  misc_feature: MA Experiment ID: 20000234 Result: Up-regulated in Transcription
  misc_feature: MA Experiment 20000234 PARAMETER Experiment Name: At_Siliques_P Parameter: Age (day) Value: 21
  misc_feature: MA Experiment 20000234 PARAMETER Experiment Name: At_Siliques_P Parameter: Organism Value: A. thaliana
  misc_feature: MA Experiment 20000234 PARAMETER Experiment Name: At_Siliques_P Parameter: Plant Line Value: WS
  misc_feature: MA Experiment 20000234 PARAMETER Experiment Name: At_Siliques_P Parameter: Tissue Value: Less Than 5mm Siliques vs. Whole Plant
  misc_feature: MA Experiment ID: 20000265 Result: Up-regulated in Transcription
  misc_feature: MA Experiment 20000265 PARAMETER Experiment Name: At_Open_Flower_P Parameter: Age (day) Value: 21
  misc_feature: MA Experiment 20000265 PARAMETER Experiment Name: At_Open_Flower_P Parameter: Plant Line Value: WS
  misc_feature: MA Experiment 20000265 PARAMETER Experiment Name: At_Open_Flower_P Parameter: Tissue Value: Closed Flower vs. Whole Plant
  misc_feature: MA Experiment ID: 20000439 Result: Up-regulated in Transcription
  misc_feature: MA Experiment 20000439 PARAMETER Experiment Name: At_Roots__P Parameter: Age (day) Value: 14 vs. 21
  misc_feature: MA Experiment 20000439 PARAMETER Experiment Name: At_Roots__P Parameter: Organism Value: A. thaliana
  misc_feature: MA Experiment 20000439 PARAMETER Experiment Name: At_Roots__P Parameter: Tissue Value: Roots vs. Whole Plant
  misc_feature: MA Experiment ID: 20001451 Result: Down-regulated in Transcription
  misc_feature: MA Experiment 20001451 PARAMETER Experiment Name: At_Far-red-induction_P Parameter: Age (day) Value: 7
  misc_feature: MA Experiment 20001451 PARAMETER Experiment Name: At_Far-red-induction_P Parameter: Light Value: Far-red vs. White
  misc_feature: MA Experiment 20001451 PARAMETER Experiment Name: At_Far-red-induction_P Parameter: Organism Value: A. thaliana
  misc_feature: MA Experiment 20001451 PARAMETER Experiment Name: At_Far-red-induction_P Parameter: Plant Line Value: Columbia
  misc_feature: MA Experiment 20001451 PARAMETER Experiment Name: At_Far-red-induction_P Parameter: Timepoint (hr) Value: 24
  misc_feature: MA Experiment 20001451 PARAMETER Experiment Name: At_Far-red-induction_P Parameter: Tissue Value: Whole Plant
  misc_feature: MA Experiment ID: 20001911 Result: Down-regulated in Transcription
  misc_feature: MA Experiment 20001911 PARAMETER Experiment Name: At_Drought_Reproduction_P Parameter: Age (day) Value: 40
  misc_feature: MA Experiment 20001911 PARAMETER Experiment Name: At_Drought_Reproduction_P Parameter: Organism Value: A. thaliana
  misc_feature: MA Experiment 20001911 PARAMETER Experiment Name: At_Drought_Reproduction_P Parameter: Plant Line Value: WS
  misc_feature: MA Experiment 20001911 PARAMETER Experiment Name: At_Drought_Reproduction_P Parameter: Timepoint (day) Value: 10
  misc_feature: MA Experiment 20001911 PARAMETER Experiment Name: At_Drought_Reproduction_P Parameter: Tissue Value: Flowers
  misc_feature: MA Experiment 20001911 PARAMETER Experiment Name: At_Drought_Reproduction_P Parameter: Treatment Value: Drought vs. No Drought
acattgaatcatctgatttgcagaaaaaggagatctctttatgtaaaagtctctgagaattttggtttaaagagaggattttacggagatgggtttgttggaatcggtgaaatcaatcaactgggaacatgaatcatctccggtttatcaggattttcgagttcttcctctcttcgctgtgttcttcccttcgattcgatttctcctcgatagattcgtcttcgagaaattggcaaaatatttgatctatggaaaacatagacaggatatgggagatgacacaaccgagagaaagaagaagatcaggaaattcaaagaatcggcctggaagtgtgtttactatctatcagctgagattcttgctttatctgtgacttacaatgagccttggtttatgaacactaaatacttttgggtagggcctggagatcagacttggcctgatcaacaaacaaagttaaagttgaagcttttgtatatgtttgtggctggtttctatacatactccatctttgctctggttttctgggaaacgaggcgttctgattttggagtttcaatgggtcatcatattgccactcttattcttattgttctctcatacgtatgtagcttctcccgtgttggttctgttgttctggcacttcacgatgctagtgatgtgtttcttgaggttgggaaaatgtctaaatatagtggagctgaaagaatcgcaagcttttcgttcattcttttcgttttgtcttggatcattctccgcctcatttactatcccttttggatcctatggagtacaaggtttgtataatatattaagatcctttctatagtttttctcgaaatatttgtcgccttacatatattacattgcttgttgcagctatgaagtagttttggagcttgataaagacaagcatccaatcgaaggaccaatttactactacatgtttaacactctcctatattgcttgcttgttcttcacatttattggtgggttttgatgtatcggatgcttgtgaaacaaatacaagatagaggcaagcttagtgaagatgtcagatcagattctgaaggcgaagatgagcacgaagactgatttgatcacaaaggtagatagaaatgtaaaagcacgttgttctctctttacatattcgcagattcttttgttctctgtctctgtgattctgatcgctaatgggtgtttaagagtggaggagactgagtcatcaatctctaacattggaccaactcatggaacataactgattcaggagacatgaaactgtagttgtattgaattgtagtctgaacaaattccagatcttcttgtattgtattcatttcttgttttggatcactcaccattcatgatatatatcaatgttgatat

SEQ ID NO: 90430 - protein, 239 aa, Arabidopsis thaliana
  peptide (1)..(239): Ceres Seq. ID no. 12723859
  misc_feature (93)..(238): Pfam Name: Longevity-assurance protein (LAG1) Pfam Description: Longevity-assurance protein (LAG1)
  misc_feature (1)..(239): Homolog of NCBI NO: 30683361 NR Description: longevity assurance protein -related [Arabidopsis
  misc_feature (1)..(238): Homolog of NCBI NO: 25518747 NR Description: hypothetical protein F13B4.7 - Arabidopsis >gi|9802756|gb|AAF99825.1|AC027134_7 Highly similar to fungal
  misc_feature (1)..(238): Homolog of NCBI NO: 16974114 NR Description: putative resistance protein [Lycopersicon
  misc_feature (1)..(238): Homolog of NCBI NO: 18404559 NR Description: expressed protein; protein id: At3g25540.1, by cDNA: gi_13430479, supported by cDNA: gi_7658238 [Arabidopsis >gi|7658239|gb|AAF66102.1|AF198179_1 LAG1 homolog 1 [Arabidopsis
  misc_feature (9)..(239): Homolog of NCBI NO: 7688742 NR Description: ASC1 [Lycopersicon esculentum] alternaria stem canker resistance protein [Lycopersicon
  misc_feature (1)..(123): Homolog of NCBI NO: 8920562 NR Description: Contains similarity to LAG1 homolog 1 from
  misc_feature (23)..(239): Homolog of NCBI NO: 34901974 NR Description: unknown protein [Oryza sativa (japonica
  misc_feature (4)..(236): Homolog of NCBI NO: 7658241 NR Description: LAG1 homolog 2 [Arabidopsis thaliana]
  misc_feature (4)..(236): Homolog of NCBI NO: 15230323 NR Description: longevity factor-like protein; protein id: supported by cDNA: 123372., supported by cDNA: gi_7658240 thaliana] >gi|9294628|dbj|BAB02967.1| contains similarity to
  misc_feature (67)..(239): Homolog of NCBI NO: 24119257 NR Description: trh3 protein [Danio rerio] Trh3 [Danio rerio] >gi|28278814|gb|AAH45284.1| Similar to RIKEN
MGLLESVKSINWEHESSPVYQDFRVLPLFAVFFPSIRFLLDRFVFEKLAKYLIYGKHRQDMGDDTTERKKKIRKFKESAWKCVYYLSAEILALSVTYNEPWFMNTKYFWVGPGDQTWPDQQTKLKLKLLYMFVAGFYTYSIFALVFWETRRSDFGVSMGHHIATLILIVLSYVCSFSRVGSVVLALHDASDVFLEVGKMSKYSGAERIASFSFILFVLSWIILRLIYYPFWILWSTRFV

SEQ ID NO: 90431 - protein, 179 aa, Arabidopsis thaliana
  peptide (1)..(179): Ceres Seq. ID no. 12723860
  misc_feature (33)..(178): Pfam Name: Longevity-assurance protein (LAG1) Pfam Description: Longevity-assurance protein (LAG1)
  misc_feature (1)..(179): Homolog of NCBI NO: 30683361 NR Description: longevity assurance protein -related [Arabidopsis
  misc_feature (1)..(178): Homolog of NCBI NO: 25518747 NR Description: hypothetical protein F13B4.7 - Arabidopsis >gi|9802756|gb|AAF99825.1|AC027134_7 Highly similar to fungal
  misc_feature (1)..(178): Homolog of NCBI NO: 16974114 NR Description: putative resistance protein [Lycopersicon
  misc_feature (1)..(178): Homolog of NCBI NO: 18404559 NR Description: expressed protein; protein id: At3g25540.1, by cDNA: gi_13430479, supported by cDNA: gi_7658238 [Arabidopsis >gi|7658239|gb|AAF66102.1|AF198179_1 LAG1 homolog 1 [Arabidopsis
  misc_feature (1)..(179): Homolog of NCBI NO: 7688742 NR Description: ASC1 [Lycopersicon esculentum] alternaria stem canker resistance protein [Lycopersicon
  misc_feature (1)..(63): Homolog of NCBI NO: 8920562 NR Description: Contains similarity to LAG1 homolog 1 from
  misc_feature (1)..(179): Homolog of NCBI NO: 34901974 NR Description: unknown protein [Oryza sativa (japonica
  misc_feature (1)..(176): Homolog of NCBI NO: 7658241 NR Description: LAG1 homolog 2 [Arabidopsis thaliana]
  misc_feature (1)..(176): Homolog of NCBI NO: 15230323 NR Description: longevity factor-like protein; protein id: supported by cDNA: 123372., supported by cDNA: gi_7658240 thaliana] >gi|9294628|dbj|BAB02967.1| contains similarity to
  misc_feature (7)..(179): Homolog of NCBI NO: 24119257 NR Description: trh3 protein [Danio rerio] Trh3 [Danio rerio] >gi|28278814|gb|AAH45284.1| Similar to RIKEN
MGDDTTERKKKIRKFKESAWKCVYYLSAEILALSVTYNEPWFMNTKYFWVGPGDQTWPDQQTKLKLKLLYMFVAGFYTYSIFALVFWETRRSDFGVSMGHHIATLILIVLSYVCSFSRVGSVVLALHDASDVFLEVGKMSKYSGAERIASFSFILFVLSWIILRLIYYPFWILWSTRFV

SEQ ID NO: 90432 - protein, 137 aa, Arabidopsis thaliana
  peptide (1)..(137): Ceres Seq. ID no. 12723861
  misc_feature (1)..(136): Pfam Name: Longevity-assurance protein (LAG1) Pfam Description: Longevity-assurance protein (LAG1)
  misc_feature (1)..(137): Homolog of NCBI NO: 30683361 NR Description: longevity assurance protein -related [Arabidopsis
  misc_feature (1)..(136): Homolog of NCBI NO: 25518747 NR Description: hypothetical protein F13B4.7 - Arabidopsis >gi|9802756|gb|AAF99825.1|AC027134_7 Highly similar to fungal
  misc_feature (1)..(136): Homolog of NCBI NO: 16974114 NR Description: putative resistance protein [Lycopersicon
  misc_feature (1)..(136): Homolog of NCBI NO: 18404559 NR Description: expressed protein; protein id: At3g25540.1, by cDNA: gi_13430479, supported by cDNA: gi_7658238 [Arabidopsis >gi|7658239|gb|AAF66102.1|AF198179_1 LAG1 homolog 1 [Arabidopsis
  misc_feature (1)..(137): Homolog of NCBI NO: 7688742 NR Description: ASC1 [Lycopersicon esculentum] alternaria stem canker resistance protein [Lycopersicon
  misc_feature (1)..(21): Homolog of NCBI NO: 8920562 NR Description: Contains similarity to LAG1 homolog 1 from
  misc_feature (1)..(137): Homolog of NCBI NO: 34901974 NR Description: unknown protein [Oryza sativa (japonica
  misc_feature (1)..(134): Homolog of NCBI NO: 7658241 NR Description: LAG1 homolog 2 [Arabidopsis thaliana]
  misc_feature (1)..(134): Homolog of NCBI NO: 15230323 NR Description: longevity factor-like protein; protein id: supported by cDNA: 123372., supported by cDNA: gi_7658240 thaliana] >gi|9294628|dbj|BAB02967.1| contains similarity to
  misc_feature (1)..(137): Homolog of NCBI NO: 24119257 NR Description: trh3 protein [Danio rerio] Trh3 [Danio rerio] >gi|28278814|gb|AAH45284.1| Similar to RIKEN
MNTKYFWVGPGDQTWPDQQTKLKLKLLYMFVAGFYTYSIFALVFWETRRSDFGVSMGHHIATLILIVLSYVCSFSRVGSVVLALHDASDVFLEVGKMSKYSGAERIASFSFILFVLSWIILRLIYYPFWILWSTRFV

SEQ ID NO: 90433 - DNA, 1149 bp, Arabidopsis thaliana
  misc_feature (1)..(1149): Ceres Seq. ID no. 12723870
  misc_feature: MA Experiment ID: 20000315 Result: Down-regulated in Transcription
  misc_feature: MA Experiment 20000315 PARAMETER Experiment Name: At_14day_Shoots-Roots_Sub_P Parameter: Age (day) Value: 14
  misc_feature: MA Experiment 20000315 PARAMETER Experiment Name: At_14day_Shoots-Roots_Sub_P Parameter: Organism Value: A. thaliana
  misc_feature: MA Experiment 20000315 PARAMETER Experiment Name: At_14day_Shoots-Roots_Sub_P Parameter: Plant Line Value: WS
  misc_feature: MA Experiment 20000315 PARAMETER Experiment Name: At_14day_Shoots-Roots_Sub_P Parameter: Tissue Value: Shoots vs. Whole Plant
atgagttgcttcgggtgttttggtggctctgagagatcaagacattcaccaaatccatatgatgatgatacatattcccatgatagtggtgaaaccagcaatccgggaggagatgatgaagaaggagaagaggaagaggaagtagaggagctaagtcgttccaaacgatctgaagaaattttgaaatgtaaactacaaaatggactagtctgcaggcagtttccagtcaaggaaactaataaacttacacgcggagaggatgaagatggaaacaagacaataaatgagtttgttcgtgagcgtaaaattggatctggtagttatgggaaagtggttctctatcgaagcactgtcgatgacaagcattatgctattaaggcttttcacaagtcacatttatcgaggctacgggttgcaccttcagaaactgctatgggtgatgttcttcgtgaggttatgattatgaaaaccctggagcatcctaatatcgttaatctcattgaggtgattgatgaccctgagtttgatgatttttacatggttctcgaatatgttgatggaaaatgggcctatgatgattctggaccaccgggtgctctcggagaaattactgctagaaagtacttgcgcgatgtagttgccggcctcatgtaccttcatgctcataatgtaattcatggtgacatcaaacctgacaatttactggttactagtaccgggagagtgaaaataggagatttcagtgtcagccaagatgatgatgatcaactccgtagatcacccggcactcctgtctttactgccccagaatgttgtttaggtataacatacagtggaagatctgcagatacgtgggcagtaggagttactttgtattgtatgattttaggacaatacccatttctgggtgatacacttcaagatacttatgacaagattgttcacaacccgttgataataccggaaggactcaatcctcgtctaagggacttgatcgaaggtctcctttgcaaagatccaaaccagaggatgacgttgaaagctgtggcggagcatccatggatcacaggagaagacggggctatttcggaatactgttgttggtgcaaacgcaaagctgaagaagaagaagatcaaaaccatagctga

SEQ ID NO: 90434 - protein, 382 aa, Arabidopsis thaliana
  peptide (1)..(382): Ceres Seq. ID no. 12723871
  misc_feature (97)..(355): Pfam Name: Protein kinase domain Pfam Description: Protein kinase domain
  misc_feature (1)..(382): Homolog of NCBI NO: 11358840 NR Description: serine/threonine-protein kinase-like protein -
  misc_feature (1)..(382): Homolog of NCBI NO: 30692568 NR Description: protein kinase family [Arabidopsis thaliana]
  misc_feature (1)..(382): Homolog of NCBI NO: 9757757 NR Description: serine/threonine-protein kinase-like protein
  misc_feature (1)..(382): Homolog of NCBI NO: 22327987 NR Description: serine/threonine-protein kinase - like protein; id: At5g60550.1, supported by cDNA: gi_20466759 [Arabidopsis
  misc_feature (1)..(382): Homolog of NCBI NO: 20466760 NR Description: serine/threonine-protein kinase-like protein
  misc_feature (11)..(375): Homolog of NCBI NO: 13324784 NR Description: putative protein kinase [Oryza sativa]
  misc_feature (202)..(380): Homolog of NCBI NO: 27437013 NR Description: calcium/calmodulin-dependent protein kinase 1 isoform b; CAMKK alpha protein [Homo sapiens]
  misc_feature (75)..(133): Homolog of NCBI NO: 27437013 NR Description: calcium/calmodulin-dependent protein kinase 1 isoform b; CAMKK alpha protein [Homo sapiens]
  misc_feature (148)..(183): Homolog of NCBI NO: 27437013 NR Description: calcium/calmodulin-dependent protein kinase 1 isoform b; CAMKK alpha protein [Homo sapiens]
  misc_feature (76)..(354): Homolog of NCBI NO: 19075860 NR Description: serine/threonine-protein kinase ssp1
MSCFGCFGGSERSRHSPNPYDDDTYSHDSGETSNPGGDDEEGEEEEEVEELSRSKRSEEILKCKLQNGLVCRQFPVKETNKLTRGEDEDGNKTINEFVRERKIGSGSYGKVVLYRSTVDDKHYAIKAFHKSHLSRLRVAPSETAMGDVLREVMIMKTLEHPNIVNLIEVIDDPEFDDFYMVLEYVDGKWAYDDSGPPGALGEITARKYLRDVVAGLMYLHAHNVIHGDIKPDNLLVTSTGRVKIGDFSVSQDDDDQLRRSPGTPVFTAPECCLGITYSGRSADTWAVGVTLYCMILGQYPFLGDTLQDTYDKIVHNPLIIPEGLNPRLRDLIEGLLCKDPNQRMTLKAVAEHPWITGEDGAISEYCCWCKRKAEEEEDQNHS

SEQ ID NO: 90435 - protein, 238 aa, Arabidopsis thaliana
  peptide (1)..(238): Ceres Seq. ID no. 12723872
  misc_feature (1)..(211): Pfam Name: Protein kinase domain Pfam Description: Protein kinase domain
  misc_feature (1)..(238): Homolog of NCBI NO: 11358840 NR Description: serine/threonine-protein kinase-like protein -
  misc_feature (1)..(238): Homolog of NCBI NO: 30692568 NR Description: protein kinase family [Arabidopsis thaliana]
  misc_feature (1)..(238): Homolog of NCBI NO: 9757757 NR Description: serine/threonine-protein kinase-like protein
  misc_feature (1)..(238): Homolog of NCBI NO: 22327987 NR Description: serine/threonine-protein kinase - like protein; id: At5g60550.1, supported by cDNA: gi_20466759 [Arabidopsis
  misc_feature (1)..(238): Homolog of NCBI NO: 20466760 NR Description: serine/threonine-protein kinase-like protein
  misc_feature (1)..(231): Homolog of NCBI NO: 13324784 NR Description: putative protein kinase [Oryza sativa]
  misc_feature (58)..(236): Homolog of NCBI NO: 27437013 NR Description: calcium/calmodulin-dependent protein kinase 1 isoform b; CAMKK alpha protein [Homo sapiens]
  misc_feature (4)..(39): Homolog of NCBI NO: 27437013 NR Description: calcium/calmodulin-dependent protein kinase 1 isoform b; CAMKK alpha protein [Homo sapiens]
  misc_feature (1)..(210): Homolog of NCBI NO: 19075860 NR Description: serine/threonine-protein kinase ssp1
  misc_feature (1)..(232): Homolog of NCBI NO: 23491819 NR Description: calcium/calmodulin-dependent protein kinase
MGDVLREVMIMKTLEHPNIVNLIEVIDDPEFDDFYMVLEYVDGKWAYDDSGPPGALGEITARKYLRDVVAGLMYLHAHNVIHGDIKPDNLLVTSTGRVKIGDFSVSQDDDDQLRRSPGTPVFTAPECCLGITYSGRSADTWAVGVTLYCMILGQYPFLGDTLQDTYDKIVHNPLIIPEGLNPRLRDLIEGLLCKDPNQRMTLKAVAEHPWITGEDGAISEYCCWCKRKAEEEEDQNHS

SEQ ID NO: 90436 - protein, 230 aa, Arabidopsis thaliana
  peptide (1)..(230): Ceres Seq. ID no. 12723873
  misc_feature (1)..(203): Pfam Name: Protein kinase domain Pfam Description: Protein kinase domain
  misc_feature (1)..(230): Homolog of NCBI NO: 11358840 NR Description: serine/threonine-protein kinase-like protein -
  misc_feature (1)..(230): Homolog of NCBI NO: 30692568 NR Description: protein kinase family [Arabidopsis thaliana]
  misc_feature (1)..(230): Homolog of NCBI NO: 9757757 NR Description: serine/threonine-protein kinase-like protein
  misc_feature (1)..(230): Homolog of NCBI NO: 22327987 NR Description: serine/threonine-protein kinase - like protein; id: At5g60550.1, supported by cDNA: gi_20466759 [Arabidopsis
  misc_feature (1)..(230): Homolog of NCBI NO: 20466760 NR Description: serine/threonine-protein kinase-like protein
  misc_feature (1)..(223): Homolog of NCBI NO: 13324784 NR Description: putative protein kinase [Oryza sativa]
  misc_feature (50)..(228): Homolog of NCBI NO: 27437013 NR Description: calcium/calmodulin-dependent protein kinase 1 isoform b; CAMKK alpha protein [Homo sapiens]
  misc_feature (1)..(31): Homolog of NCBI NO: 27437013 NR Description: calcium/calmodulin-dependent protein kinase 1 isoform b; CAMKK alpha protein [Homo sapiens]
  misc_feature (1)..(202): Homolog of NCBI NO: 19075860 NR Description: serine/threonine-protein kinase ssp1
  misc_feature (1)..(224): Homolog of NCBI NO: 23491819 NR Description: calcium/calmodulin-dependent protein kinase
MIMKTLEHPNIVNLIEVIDDPEFDDFYMVLEYVDGKWAYDDSGPPGALGEITARKYLRDVVAGLMYLHAHNVIHGDIKPDNLLVTSTGRVKIGDFSVSQDDDDQLRRSPGTPVFTAPECCLGITYSGRSADTWAVGVTLYCMILGQYPFLGDTLQDTYDKIVHNPLIIPEGLNPRLRDLIEGLLCKDPNQRMTLKAVAEHPWITGEDGAISEYCCWCKRKAEEEEDQNHS

SEQ ID NO: 90437 - DNA, 1428 bp, Arabidopsis thaliana
  misc_feature (1)..(1428): Ceres Seq. ID no. 12723898
  misc_feature: MA Experiment ID: 20000495 Result: Up-regulated in Transcription
  misc_feature: MA Experiment 20000495 PARAMETER Experiment Name: At_Guard_Cells_P Parameter: Harvest Date Value: 8/2/2002
  misc_feature: MA Experiment 20000495 PARAMETER Experiment Name: At_Guard_Cells_P Parameter: Organism Value: A. thaliana
  misc_feature: MA Experiment 20000495 PARAMETER Experiment Name: At_Guard_Cells_P Parameter: Tissue Value: Guard Cells vs. Leaves
atggcaatggtagagaagaatagttctgcgattggctatgtagctagaaatctgttactgagcttattcgtcgtcacgacgatcctctttgctctttcctgttactttgtgttacgttccactgctcataatcgcttccttagctctacatttccatctaaatcattcgtcgatgtaaggccggagaaagcgaattgtagatgtgttaaggacgagaaatcgtcggtaatcgcgggtcctttgaaggtttatatgtataatatggatccagagtttcattttggattgttagattggaagaagaaggaaggtagtgatagtagtgtatggcctgatattcagaagtatataccaccttatcctggaggtttgaatttgcagcatagtatcgagtattggcttacgttggatttgcttgcatcggagtatgagaatgcaccgagaagtgttgcggcgaagcgtgtttataattctagtgaagctgatgttatctttgtgccgtttttttcttcgttgagttataatcggttttcgaaagtgaatcctcatcagaaaactagtaggaataaggatttgcaagggaagttggttacgtttttgactgctcaagaggagtggaagaggagtggtggtagagatcatgttgttcttgctcatcatccgaatagtatgttagatgctagaaataagttgtttcctgcaatgtttatactttcggactttggaaggtatcctcctactgtggctaatgttgagaaagatgtcattgcgccgtataagcatgttattaaagcttatgaaaacgatacatcgggtttcgatagtagaccgattctgctttactttcagggtgctatctacaggaaagatggcgggtttgtgcgtcaggagttattctacctcttgcaagatgagaaagatgtgcatttctcgtttgggagtgtgagaaacggaggtataaacaaagcaagccaaggaatgcacaattccaagttctgtctcaatattgccggagacactccttcgtcaaaccgtctctttgacgccatagccagtcactgtgttcctgtcattatcagcgacgacattgagcttccttttgaggatgttattgattactctgagttctcggtgtttgttcgcacctctgatgcattgaaagagaacttcttggttaacttaatacgaggaataaccaaagaggaatggacacgaatgtggaatcgattaaaggaagtggagaaatattatgagttccattttccatcaaaggtagatgatgcggtgcagatgatatggcaagcgattgcccgtaaagttccgggtgttaaaatgaggattcataagtctagaaggtattctggatctgtttctgagaccgggaaagaatcaagatggtcttcattgatacctcggagtttctggtga

SEQ ID NO: 90438 - protein, 475 aa, Arabidopsis thaliana
  peptide (1)..(475): Ceres Seq. ID no. 12723899
  misc_feature (83)..(410): Pfam Name: Exostosin family Pfam Description: Exostosin family
  misc_feature (1)..(475): Homolog of NCBI NO: 15230692 NR Description: Exostosin family; protein id: At3g45400.1
  misc_feature (67)..(454): Homolog of NCBI NO: 15228598 NR Description: Exostosin family; protein id: At3g03650.1 thaliana] >gi|6091757|gb|AAF03467.1|AC009327_6 hypothetical
  misc_feature (3)..(456): Homolog of NCBI NO: 18410670 NR Description: Exostosin family; protein id: At1g74680.1, by cDNA: gi_16209708 [Arabidopsis thaliana] At1g74680/F1M20_36 [Arabidopsis thaliana]
  misc_feature (14)..(456): Homolog of NCBI NO: 25406363 NR Description: F25A4.34 [imported] - Arabidopsis thaliana
  misc_feature (28)..(452): Homolog of NCBI NO: 19386797 NR Description: OJ1485_B09.5 [Oryza sativa (japonica
  misc_feature (35)..(452): Homolog of NCBI NO: 22330483 NR Description: Exostosin family; protein id: At1g67410.1
  misc_feature (35)..(325): Homolog of NCBI NO: 7487224 NR Description: hypothetical protein T1F15.13 - Arabidopsis
  misc_feature (322)..(440): Homolog of NCBI NO: 7487224 NR Description: hypothetical protein T1F15.13 - Arabidopsis
  misc_feature (14)..(452): Homolog of NCBI NO: 30686300 NR Description: Exostosin family [Arabidopsis thaliana]
  misc_feature (47)..(452): Homolog of NCBI NO: 34899802 NR Description: OJ1092_A07.9 [Oryza sativa (japonica
MAMVEKNSSAIGYVARNLLLSLFVVTTILFALSCYFVLRSTAHNRFLSSTFPSKSFVDVRPEKANCRCVKDEKSSVIAGPLKVYMYNMDPEFHFGLLDWKKKEGSDSSVWPDIQKYIPPYPGGLNLQHSIEYWLTLDLLASEYENAPRSVAAKRVYNSSEADVIFVPFFSSLSYNRFSKVNPHQKTSRNKDLQGKLVTFLTAQEEWKRSGGRDHVVLAHHPNSMLDARNKLFPAMFILSDFGRYPPTVANVEKDVIAPYKHVIKAYENDTSGFDSRPILLYFQGAIYRKDGGFVRQELFYLLQDEKDVHFSFGSVRNGGINKASQGMHNSKFCLNIAGDTPSSNRLFDAIASHCVPVIISDDIELPFEDVIDYSEFSVFVRTSDALKENFLVNLIRGITKEEWTRMWNRLKEVEKYYEFHFPSKVDDAVQMIWQAIARKVPGVKMRIHKSRRYSGSVSETGKESRWSSLIPRSFW

SEQ ID NO: 90439 - protein, 473 aa, Arabidopsis thaliana
  peptide (1)..(473): Ceres Seq. ID no. 12723900
  misc_feature (81)..(408): Pfam Name: Exostosin family Pfam Description: Exostosin family
  misc_feature (1)..(473): Homolog of NCBI NO: 15230692 NR Description: Exostosin family; protein id: At3g45400.1
  misc_feature (65)..(452): Homolog of NCBI NO: 15228598 NR Description: Exostosin family; protein id: At3g03650.1 thaliana] >gi|6091757|gb|AAF03467.1|AC009327_6 hypothetical
  misc_feature (1)..(454): Homolog of NCBI NO: 18410670 NR Description: Exostosin family; protein id: At1g74680.1, by cDNA: gi_16209708 [Arabidopsis thaliana] At1g74680/F1M20_36 [Arabidopsis thaliana]
  misc_feature (12)..(454): Homolog of NCBI NO: 25406363 NR Description: F25A4.34 [imported] - Arabidopsis thaliana
  misc_feature (26)..(450): Homolog of NCBI NO: 19386797 NR Description: OJ1485_B09.5 [Oryza sativa (japonica
  misc_feature (33)..(450): Homolog of NCBI NO: 22330483 NR Description: Exostosin family; protein id: At1g67410.1
  misc_feature (33)..(323): Homolog of NCBI NO: 7487224 NR Description: hypothetical protein T1F15.13 - Arabidopsis
  misc_feature (320)..(438): Homolog of NCBI NO: 7487224 NR Description: hypothetical protein T1F15.13 - Arabidopsis
  misc_feature (12)..(450): Homolog of NCBI NO: 30686300 NR Description: Exostosin family [Arabidopsis thaliana]
  misc_feature (45)..(450): Homolog of NCBI NO: 34899802 NR Description: OJ1092_A07.9 [Oryza sativa (japonica
MVEKNSSAIGYVARNLLLSLFVVTTILFALSCYFVLRSTAHNRFLSSTFPSKSFVDVRPEKANCRCVKDEKSSVIAGPLKVYMYNMDPEFHFGLLDWKKKEGSDSSVWPDIQKYIPPYPGGLNLQHSIEYWLTLDLLASEYENAPRSVAAKRVYNSSEADVIFVPFFSSLSYNRFSKVNPHQKTSRNKDLQGKLVTFLTAQEEWKRSGGRDHVVLAHHPNSMLDARNKLFPAMFILSDFGRYPPTVANVEKDVIAPYKHVIKAYENDTSGFDSRPILLYFQGAIYRKDGGFVRQELFYLLQDEKDVHFSFGSVRNGGINKASQGMHNSKFCLNIAGDTPSSNRLFDAIASHCVPVIISDDIELPFEDVIDYSEFSVFVRTSDALKENFLVNLIRGITKEEWTRMWNRLKEVEKYYEFHFPSKVDDAVQMIWQAIARKVPGVKMRIHKSRRYSGSVSETGKESRWSSLIPRSFW

SEQ ID NO: 90440 - protein, 391 aa, Arabidopsis thaliana
  peptide (1)..(391): Ceres Seq. ID no. 12723901
  misc_feature (1)..(326): Pfam Name: Exostosin family Pfam Description: Exostosin family
  misc_feature (1)..(391): Homolog of NCBI NO: 15230692 NR Description: Exostosin family; protein id: At3g45400.1
  misc_feature (1)..(370): Homolog of NCBI NO: 15228598 NR Description: Exostosin family; protein id: At3g03650.1 thaliana] >gi|6091757|gb|AAF03467.1|AC009327_6 hypothetical
  misc_feature (1)..(372): Homolog of NCBI NO: 18410670 NR Description: Exostosin family; protein id: At1g74680.1, by cDNA: gi_16209708 [Arabidopsis thaliana] At1g74680/F1M20_36 [Arabidopsis thaliana]
  misc_feature (1)..(372): Homolog of NCBI NO: 25406363 NR Description: F25A4.34 [imported] - Arabidopsis thaliana
  misc_feature (1)..(368): Homolog of NCBI NO: 19386797 NR Description: OJ1485_B09.5 [Oryza sativa (japonica
  misc_feature (1)..(368): Homolog of NCBI NO: 22330483 NR Description: Exostosin family; protein id: At1g67410.1
  misc_feature (1)..(241): Homolog of NCBI NO: 7487224 NR Description: hypothetical protein T1F15.13 - Arabidopsis
  misc_feature (238)..(356): Homolog of NCBI NO: 7487224 NR Description: hypothetical protein T1F15.13 - Arabidopsis
  misc_feature (1)..(368): Homolog of NCBI NO: 30686300 NR Description: Exostosin family [Arabidopsis thaliana]
  misc_feature (1)..(368): Homolog of NCBI NO: 34899802 NR Description: OJ1092_A07.9 [Oryza sativa (japonica
MYNMDPEFHFGLLDWKKKEGSDSSVWPDIQKYIPPYPGGLNLQHSIEYWLTLDLLASEYENAPRSVAAKRVYNSSEADVIFVPFFSSLSYNRFSKVNPHQKTSRNKDLQGKLVTFLTAQEEWKRSGGRDHVVLAHHPNSMLDARNKLFPAMFILSDFGRYPPTVANVEKDVIAPYKHVIKAYENDTSGFDSRPILLYFQGAIYRKDGGFVRQELFYLLQDEKDVHFSFGSVRNGGINKASQGMHNSKFCLNIAGDTPSSNRLFDAIASHCVPVIISDDIELPFEDVIDYSEFSVFVRTSDALKENFLVNLIRGITKEEWTRMWNRLKEVEKYYEFHFPSKVDDAVQMIWQAIARKVPGVKMRIHKSRRYSGSVSETGKESRWSSLIPRSFW

SEQ ID NO: 90441 - DNA, 1995 bp, Arabidopsis thaliana
  misc_feature (1)..(1995): Ceres Seq. ID no. 12723902
  misc_feature: MA Experiment ID: 20000185 Result: Up-regulated in Transcription
  misc_feature: MA Experiment 20000185 PARAMETER Experiment Name: At_Roots__P Parameter: Age (day) Value: 7 vs. 21
  misc_feature: MA Experiment 20000185 PARAMETER Experiment Name: At_Roots__P Parameter: Organism Value: A. thaliana
  misc_feature: MA Experiment 20000185 PARAMETER Experiment Name: At_Roots__P Parameter: Tissue Value: Roots vs. Whole Plant
  misc_feature: MA Experiment ID: 20000227 Result: Down-regulated in Transcription
  misc_feature: MA Experiment 20000227 PARAMETER Experiment Name: At_Root-Tips-vs-Tops_P Parameter: Tissue Value: Root Tips vs. Root Tops
  misc_feature: MA Experiment ID: 20000437 Result: Down-regulated in Transcription
  misc_feature: MA Experiment 20000437 PARAMETER Experiment Name: At_Drought_P Parameter: Age (day) Value: 8
  misc_feature: MA Experiment 20000437 PARAMETER Experiment Name: At_Drought_P Parameter: Organism Value: A. thaliana
  misc_feature: MA Experiment 20000437 PARAMETER Experiment Name: At_Drought_P Parameter: Plant Line Value: WS
  misc_feature: MA Experiment 20000437 PARAMETER Experiment Name: At_Drought_P Parameter: Timepoint (hr) Value: 24
  misc_feature: MA Experiment 20000437 PARAMETER Experiment Name: At_Drought_P Parameter: Tissue Value: Whole Plant
  misc_feature: MA Experiment 20000437 PARAMETER Experiment Name: At_Drought_P Parameter: Treatment Value: Drought vs. No Drought
  misc_feature: MA Experiment ID: 20000439 Result: Up-regulated in Transcription
  misc_feature: MA Experiment 20000439 PARAMETER Experiment Name: At_Roots__P Parameter: Age (day) Value: 14 vs. 21
  misc_feature: MA Experiment 20000439 PARAMETER Experiment Name: At_Roots__P Parameter: Organism Value: A. thaliana
  misc_feature: MA Experiment 20000439 PARAMETER Experiment Name: At_Roots__P Parameter: Tissue Value: Roots vs. Whole Plant
atggcttgtagactatatttggctttgatcttctcttgcgtttatctgatttgcctgtcaagtcaacaagaaaccgggtttgtctacaatggcttcgagcaagcagatctttttattgatgggatcgccaaaatactacctgatgggcttttgcagttgacaaatactacagagttgcaaatgggtcatgctttcttcaagaagccgtttgattttgatccatcttcatcactatcgttctatacacattttgtgtgtgcgcttgtgcctcctaagttgggagctgatggtggccatgggattgtctttgttgtatctccttccattgatctctctcatgcatacgcaactcagtacttgggggtcttcagcaacttaacaaatgggacttcctcttcacatctgctagctattgagctcgataccgttaagacagtagagtttaatgagctggagaagcctcatgttggtattgatttgaacagcccaatatctgttgaatctgctctgccatcttacttttccaacgctttggggaagaatataagcataaatcttcttagtggggagcctatacaggtctgggtagattacgatggctcgtttctaaatgttacactggcccctatagaaatcaagaagccaaatcagcctcttatatcaagagccatcaatctttcagaaatctttcaagagaagatgtatgttgggttctcttcatcaacagggaatcttctcagtaaccattatatacttggatggagttttagtagaagaaaagaacaattacagagcctgaacctctctacacttcctcgggttcctcttcctaaagaggaaaaaaagaaattatctccattacttattggtttggtcatcttattagtgattcctgtggtgatggttcttggaggagtttattggtacaggagaaagaaatatgcagaagtaaaagaatggtgggaaaaggaatacggcccacaccgattctcctataagtctctgtacaaagcaacaaatgggtttcgtaaagattgtcgtgttgggaaaggtgggtttggagaagtctacaaaggaactttgcccggaggcaggcatatagctgtgaaaagactatcccacgatgcagagcaagggatgaaacagtttgtggcagaagttgtaaccatgggaaatttacaacatcggaacttggttcctcttctcgggtattgcaggagaaaatgtgagttacttttggtgtctgagtacatgcccaacggtagccttgaccagtacttgtttcatgagggaaacccatctccttcatggtatcaaagaatttctattcttaaggacattgcctcagctctcagttacttgcatacaggaaccaagcaagttgttttgcaccgggatataaaagcttctaacgtcatgttggattccgagttcaacgggaggttaggtgattttggaatggccaagtttcacgaccgtggaaccaacttatctgcaacagccgctgtgggaaccataggttacatggcacctgaactaataacaatgggcacgtctatgaaaaccgatgtgtatgcttttggtgcttttcttcttgaagtaatttgtggcaggcgaccagtggaacctgagctaccagtcggaaagcaatatttggtcaagtgggtctatgaatgctggaaagaggcttgcttattcaagaccagagatccaagattgggagtagaattcttacccgaggaagtcgagatggttctgaaacttgggttactctgcacaaatgctatgccagaatcaaggcctgcgatggaacaagtggtgcaataccttaaccaagacttacccttaccgattttctcgccgtctactccaggtatcggggcttttatgccagtttctatggaagcattatctgccattggggtctccagtgtaaggaactcatcagtttctatgtttgttactcacacaatcttggacgggcatggaagataa

SEQ ID NO: 90442 - protein, 664 aa, Arabidopsis thaliana
  peptide (1)..(664): Ceres Seq. ID no. 12723903
  misc_feature (1)..(664): Homolog of NCBI NO: 15230696 NR Description: receptor-like protein kinase; protein id:
  misc_feature (4)..(664): Homolog of NCBI NO: 15239268 NR Description: receptor-like protein kinase; protein id:
  misc_feature (1)..(664): Homolog of NCBI NO: 15230700 NR Description: receptor like protein kinase; protein id:
  misc_feature (1)..(664): Homolog of NCBI NO: 15230670 NR Description: receptor-like protein kinase; protein id:
  misc_feature (9)..(664): Homolog of NCBI NO: 15239261 NR Description: receptor like protein kinase; protein id:
  misc_feature (1)..(644): Homolog of NCBI NO: 15239263 NR Description: receptor like protein kinase; protein id:
  misc_feature (1)..(644): Homolog of NCBI NO: 15810557 NR Description: putative receptor protein kinase [Arabidopsis
  misc_feature (61)..(649): Homolog of NCBI NO: 15230698 NR Description: receptor like protein kinase; protein id:
  misc_feature (5)..(664): Homolog of NCBI NO: 15239260 NR Description: receptor like protein kinase; protein id:
  misc_feature (4)..(621): Homolog of NCBI NO: 34899542 NR Description: putative receptor-type protein kinase LRK1 [Oryza
MACRLYLALIFSCVYLICLSSQQETGFVYNGFEQADLFIDGIAKILPDGLLQLTNTTELQMGHAFFKKPFDFDPSSSLSFYTHFVCALVPPKLGADGGHGIVFVVSPSIDLSHAYATQYLGVFSNLTNGTSSSHLLAIELDTVKTVEFNELEKPHVGIDLNSPISVESALPSYFSNALGKNISINLLSGEPIQVWVDYDGSFLNVTLAPIEIKKPNQPLISRAINLSEIFQEKMYVGFSSSTGNLLSNHYILGWSFSRRKEQLQSLNLSTLPRVPLPKEEKKKLSPLLIGLVILLVIPVVMVLGGVYWYRRKKYAEVKEWWEKEYGPHRFSYKSLYKATNGFRKDCRVGKGGFGEVYKGTLPGGRHIAVKRLSHDAEQGMKQFVAEVVTMGNLQHRNLVPLLGYCRRKCELLLVSEYMPNGSLDQYLFHEGNPSPSWYQRISILKDIASALSYLHTGTKQVVLHRDIKASNVMLDSEFNGRLGDFGMAKFHDRGTNLSATAAVGTIGYMAPELITMGTSMKTDVYAFGAFLLEVICGRRPVEPELPVGKQYLVKWVYECWKEACLFKTRDPRLGVEFLPEEVEMVLKLGLLCTNAMPESRPAMEQVVQYLNQDLPLPIFSPSTPGIGAFMPVSMEALSAIGVSSVRNSSVSMFVTHTILDGHGR

SEQ ID NO: 90443 - protein, 604 aa, Arabidopsis thaliana
  peptide (1)..(604): Ceres Seq. ID no. 12723904
  misc_feature (1)..(604): Homolog of NCBI NO: 15230696 NR Description: receptor-like protein kinase; protein id:
  misc_feature (1)..(604): Homolog of NCBI NO: 15239268 NR Description: receptor-like protein kinase; protein id:
  misc_feature (1)..(604): Homolog of NCBI NO: 15230700 NR Description: receptor like protein kinase; protein id:
  misc_feature (1)..(604): Homolog of NCBI NO: 15230670 NR Description: receptor-like protein kinase; protein id:
  misc_feature (1)..(604): Homolog of NCBI NO: 15239261 NR Description: receptor like protein kinase; protein id:
  misc_feature (1)..(584): Homolog of NCBI NO: 15239263 NR Description: receptor like protein kinase; protein id:
  misc_feature (1)..(584): Homolog of NCBI NO: 15810557 NR Description: putative receptor protein kinase [Arabidopsis
  misc_feature (1)..(589): Homolog of NCBI NO: 15230698 NR Description: receptor like protein kinase; protein id:
  misc_feature (1)..(604): Homolog of NCBI NO: 15239260 NR Description: receptor like protein kinase; protein id:
  misc_feature (1)..(561): Homolog of NCBI NO: 34899542 NR Description: putative receptor-type protein kinase LRK1 [Oryza
MGHAFFKKPFDFDPSSSLSFYTHFVCALVPPKLGADGGHGIVFVVSPSIDLSHAYATQYLGVFSNLTNGTSSSHLLAIELDTVKTVEFNELEKPHVGIDLNSPISVESALPSYFSNALGKNISINLLSGEPIQVWVDYDGSFLNVTLAPIEIKKPNQPLISRAINLSEIFQEKMYVGFSSSTGNLLSNHYILGWSFSRRKEQLQSLNLSTLPRVPLPKEEKKKLSPLLIGLVILLVIPVVMVLGGVYWYRRKKYAEVKEWWEKEYGPHRFSYKSLYKATNGFRKDCRVGKGGFGEVYKGTLPGGRHIAVKRLSHDAEQGMKQFVAEVVTMGNLQHRNLVPLLGYCRRKCELLLVSEYMPNGSLDQYLFHEGNPSPSWYQRISILKDIASALSYLHTGTKQVVLHRDIKASNVMLDSEFNGRLGDFGMAKFHDRGTNLSATAAVGTIGYMAPELITMGTSMKTDVYAFGAFLLEVICGRRPVEPELPVGKQYLVKWVYECWKEACLFKTRDPRLGVEFLPEEVEMVLKLGLLCTNAMPESRPAMEQVVQYLNQDLPLPIFSPSTPGIGAFMPVSMEALSAIGVSSVRNSSVSMFVTHTILDGHGR

SEQ ID NO: 90444 - protein, 431 aa, Arabidopsis thaliana
  peptide (1)..(431): Ceres Seq. ID no. 12723905
  misc_feature (1)..(431): Homolog of NCBI NO: 15230696 NR Description: receptor-like protein kinase; protein id:
  misc_feature (1)..(431): Homolog of NCBI NO: 15239268 NR Description: receptor-like protein kinase; protein id:
  misc_feature (1)..(431): Homolog of NCBI NO: 15230700 NR Description: receptor like protein kinase; protein id:
  misc_feature (1)..(431): Homolog of NCBI NO: 15230670 NR Description: receptor-like protein kinase; protein id:
  misc_feature (1)..(431): Homolog of NCBI NO: 15239261 NR Description: receptor like protein kinase; protein id:
  misc_feature (1)..(411): Homolog of NCBI NO: 15239263 NR Description: receptor like protein kinase; protein id:
  misc_feature (1)..(411): Homolog of NCBI NO: 15810557 NR Description: putative receptor protein kinase [Arabidopsis
  misc_feature (1)..(416): Homolog of NCBI NO: 15230698 NR Description: receptor like protein kinase; protein id:
  misc_feature (1)..(431): Homolog of NCBI NO: 15239260 NR Description: receptor like protein kinase; protein id:
  misc_feature (1)..(388): Homolog of NCBI NO: 34899542 NR Description: putative receptor-type protein kinase LRK1 [Oryza
MYVGFSSSTGNLLSNHYILGWSFSRRKEQLQSLNLSTLPRVPLPKEEKKKLSPLLIGLVILLVIPVVMVLGGVYWYRRKKYAEVKEWWEKEYGPHRFSYKSLYKATNGFRKDCRVGKGGFGEVYKGTLPGGRHIAVKRLSHDAEQGMKQFVAEVVTMGNLQHRNLVPLLGYCRRKCELLLVSEYMPNGSLDQYLFHEGNPSPSWYQRISILKDIASALSYLHTGTKQVVLHRDIKASNVMLDSEFNGRLGDFGMAKFHDRGTNLSATAAVGTIGYMAPELITMGTSMKTDVYAFGAFLLEVICGRRPVEPELPVGKQYLVKWVYECWKEACLFKTRDPRLGVEFLPEEVEMVLKLGLLCTNAMPESRPAMEQVVQYLNQDLPLPIFSPSTPGIGAFMPVSMEALSAIGVSSVRNSSVSMFVTHTILDGHGR

SEQ ID NO: 90445 - DNA, 1293 bp, Arabidopsis thaliana
  misc_feature (1)..(1293): Ceres Seq. ID no. 12723962
  misc_feature: MA Experiment ID: 20000314 Result: Down-regulated in Transcription
  misc_feature: MA Experiment 20000314 PARAMETER Experiment Name: At_14day_Shoots-Roots_Sub_P Parameter: Age (day) Value: 14
  misc_feature: MA Experiment 20000314 PARAMETER Experiment Name: At_14day_Shoots-Roots_Sub_P Parameter: Organism Value: A. thaliana
  misc_feature: MA Experiment 20000314 PARAMETER Experiment Name: At_14day_Shoots-Roots_Sub_P Parameter: Plant Line Value: WS
  misc_feature: MA Experiment 20000314 PARAMETER Experiment Name: At_14day_Shoots-Roots_Sub_P Parameter: Tissue Value: Roots vs. Whole Plant
  misc_feature: MA Experiment ID: 20000328 Result: Down-regulated in Transcription
  misc_feature: MA Experiment 20000328 PARAMETER Experiment Name: At_42deg_Heat_Sub_P Parameter: Age (day) Value: 14
  misc_feature: MA Experiment 20000328 PARAMETER Experiment Name: At_42deg_Heat_Sub_P Parameter: Organism Value: A. thaliana
  misc_feature: MA Experiment 20000328 PARAMETER Experiment Name: At_42deg_Heat_Sub_P Parameter: Plant Line Value: WS
  misc_feature: MA Experiment 20000328 PARAMETER Experiment Name: At_42deg_Heat_Sub_P Parameter: Temperature (deg C) Value: 42 vs. 22
  misc_feature: MA Experiment 20000328 PARAMETER Experiment Name: At_42deg_Heat_Sub_P Parameter: Timepoint (hr) Value: 6
  misc_feature: MA Experiment 20000328 PARAMETER Experiment Name: At_42deg_Heat_Sub_P Parameter: Tissue Value: Aerial
  misc_feature: MA Experiment ID: 20000440 Result: Down-regulated in Transcription
  misc_feature: MA Experiment 20000440 PARAMETER Experiment Name: At_Closed-Flower__Sub_P Parameter: Tissue Value: Closed Flower vs. Whole Plant
atggtcgcctcatctgagttcatcgtcacaaggaaaaaccctgaactcatccctcccgtgtccgaaactccgaatggtcattactatctctcgaatctcgatcaaaacatcgccatcatcgtgaaaacattatattactacaaatcggagtcaagaaccaaccaagaatcctacaatgtgatcaagaaatctctctcagaggttcttgttcattactaccctgtcgccggaaggctgacgatcagtccggaagggaagatcgccgtcaattgcaccggagaaggtgtagtggttgtggaagctgaggctaactgtgggatagatacgatcaaagaggccatctcagagaatagaatggagacgctcgagaaacttgtttacgacgttccaggtgcccggaatattcttgagattccaccggtagtagttcaggtgacaaatttcaaatgtgggggttttgtcctaggactaggcatgagccacaacatgttcgatggagtcgccgctgcggagttcctcaactcgtggtgcgagatggccaagggtcttcctttatccgtcccaccattcttggaccgtacgattctccggtcacgaaaccctcccaaaatcgagttcccacacaatgaattcgacgaaattgaagatatttccgacaccggaaaaatctacgatgaagaaaaactcatctacaaatcatttcttttcgaacccgaaaagcttgagaagctcaagatcatggcgattgaagaaaataacaataataaggtatcaacatttcaagccttaaccgggtttctttggaaatcaagatgcgaagctctacggtttaaaccggaccaacgggttaagcttctgtttgcggcggatggacggtcaagattcatcccacgtctcccgcaaggatattgcgggaacgggattgtgttaaccggtttggtgacatcatcgggagaattagttgggaaccctctttctcactcggtgggtttggtcaagagactggtggagctggttacggacggcttcatgcggtcggctatggactacttcgaggtgaaccggacacggccgagtatgaacgcgacacttttgattacatcctggtcaaaattgacattgcataaactggatttcggttggggagaaccggttttctctggaccggttggtttaccagggagggaagtgatcttgttcttaccaagtggtgatgatatgaagagtatcaatgtgtttcttggccttcctacttcagctatggaagtgtttgaagagcttatgaagatctga

SEQ ID NO: 90446 - protein, 430 aa, Arabidopsis thaliana
  peptide (1)..(430): Ceres Seq. ID no. 12723963
  misc_feature (7)..(428): Pfam Name: Transferase family Pfam Description: Transferase family
  misc_feature (1)..(430): Homolog of NCBI NO: 15229017 NR Description: putative protein; protein id: At3g48720.1
  misc_feature (1)..(430): Homolog of NCBI NO: 34222064 NR Description: At3g48720 [Arabidopsis thaliana]
  misc_feature (1)..(430): Homolog of NCBI NO: 15242820 NR Description: acyltransferase-like protein; protein id: supported by cDNA: 157547., supported by cDNA: gi_14334863
  misc_feature (1)..(430): Homolog of NCBI NO: 21553692 NR Description: acyltransferase-like protein [Arabidopsis
  misc_feature (9)..(426): Homolog of NCBI NO: 30693723 NR Description: transferase family [Arabidopsis thaliana]
  misc_feature (9)..(426): Homolog of NCBI NO: 30693725 NR Description: transferase family [Arabidopsis thaliana]
  misc_feature (3)..(428): Homolog of NCBI NO: 20161743 NR Description: N-hydroxycinnamoyl/benzoyltransferase-like
  misc_feature (2)..(428): Homolog of NCBI NO: 6469032 NR Description: N-hydroxycinnamoyl/benzoyltransferase [Ipomoea
  misc_feature (12)..(428): Homolog of NCBI NO: 27475616 NR Description: hydroxycinnamoyl transferase [Nicotiana tabacum]
  misc_feature (12)..(428): Homolog of NCBI NO: 40644084 NR Description: hydroxycinnamoyl CoA quinate transferase
MVASSEFIVTRKNPELIPPVSETPNGHYYLSNLDQNIAIIVKTLYYYKSESRTNQESYNVIKKSLSEVLVHYYPVAGRLTISPEGKIAVNCTGEGVVVVEAEANCGIDTIKEAISENRMETLEKLVYDVPGARNILEIPPVVVQVTNFKCGGFVLGLGMSHNMFDGVAAAEFLNSWCEMAKGLPLSVPPFLDRTILRSRNPPKIEFPHNEFDEIEDISDTGKIYDEEKLIYKSFLFEPEKLEKLKIMAIEENNNNKVSTFQALTGFLWKSRCEALRFKPDQRVKLLFAADGRSRFIPRLPQGYCGNGIVLTGLVTSSGELVGNPLSHSVGLVKRLVELVTDGFMRSAMDYFEVNRTRPSMNATLLITSWSKLTLHKLDFGWGEPVFSGPVGLPGREVILFLPSGDDMKSINVFLGLPTSAMEVFEELMKI

SEQ ID NO: 90447 - protein, 312 aa, Arabidopsis thaliana
  peptide (1)..(312): Ceres Seq. ID no. 12723964
  misc_feature (1)..(310): Pfam Name: Transferase family Pfam Description: Transferase family
  misc_feature (1)..(312): Homolog of NCBI NO: 15229017 NR Description: putative protein; protein id: At3g48720.1
  misc_feature (1)..(312): Homolog of NCBI NO: 34222064 NR Description: At3g48720 [Arabidopsis thaliana]
  misc_feature (1)..(312): Homolog of NCBI NO: 15242820 NR Description: acyltransferase-like protein; protein id: supported by cDNA: 157547., supported by cDNA: gi_14334863
  misc_feature (1)..(312): Homolog of NCBI NO: 21553692 NR Description: acyltransferase-like protein [Arabidopsis
  misc_feature (1)..(308): Homolog of NCBI NO: 30693723 NR Description: transferase family [Arabidopsis thaliana]
  misc_feature (1)..(308): Homolog of NCBI NO: 30693725 NR Description: transferase family [Arabidopsis thaliana]
  misc_feature (1)..(310): Homolog of NCBI NO: 20161743 NR Description: N-hydroxycinnamoyl/benzoyltransferase-like
  misc_feature (1)..(310): Homolog of NCBI NO: 6469032 NR Description: N-hydroxycinnamoyl/benzoyltransferase [Ipomoea
  misc_feature (1)..(310): Homolog of NCBI NO: 27475616 NR Description: hydroxycinnamoyl transferase [Nicotiana tabacum]
  misc_feature (1)..(310): Homolog of NCBI NO: 40644084 NR Description: hydroxycinnamoyl CoA quinate transferase
METLEKLVYDVPGARNILEIPPVVVQVTNFKCGGFVLGLGMSHNMFDGVAAAEFLNSWCEMAKGLPLSVPPFLDRTILRSRNPPKIEFPHNEFDEIEDISDTGKIYDEEKLIYKSFLFEPEKLEKLKIMAIEENNNNKVSTFQALTGFLWKSRCEALRFKPDQRVKLLFAADGRSRFIPRLPQGYCGNGIVLTGLVTSSGELVGNPLSHSVGLVKRLVELVTDGFMRSAMDYFEVNRTRPSMNATLLITSWSKLTLHKLDFGWGEPVFSGPVGLPGREVILFLPSGDDMKSINVFLGLPTSAMEVFEELMKI

SEQ ID NO: 90448 - protein, 272 aa, Arabidopsis thaliana
  peptide (1)..(272): Ceres Seq. ID no. 12723965
  misc_feature (1)..(270): Pfam Name: Transferase family Pfam Description: Transferase family
  misc_feature (1)..(272): Homolog of NCBI NO: 15229017 NR Description: putative protein; protein id: At3g48720.1
  misc_feature (1)..(272): Homolog of NCBI NO: 34222064 NR Description: At3g48720 [Arabidopsis thaliana]
  misc_feature (1)..(272): Homolog of NCBI NO: 15242820 NR Description: acyltransferase-like protein; protein id: supported by cDNA: 157547., supported by cDNA: gi_14334863
  misc_feature (1)..(272): Homolog of NCBI NO: 21553692 NR Description: acyltransferase-like protein [Arabidopsis
  misc_feature (1)..(268): Homolog of NCBI NO: 30693723 NR Description: transferase family [Arabidopsis thaliana]
  misc_feature (1)..(268): Homolog of NCBI NO: 30693725 NR Description: transferase family [Arabidopsis thaliana]
  misc_feature (1)..(270): Homolog of NCBI NO: 20161743 NR Description: N-hydroxycinnamoyl/benzoyltransferase-like
  misc_feature (1)..(270): Homolog of NCBI NO: 6469032 NR Description: N-hydroxycinnamoyl/benzoyltransferase [Ipomoea
  misc_feature (1)..(270): Homolog of NCBI NO: 27475616 NR Description: hydroxycinnamoyl transferase [Nicotiana tabacum]
  misc_feature (1)..(270): Homolog of NCBI NO: 40644084 NR Description: hydroxycinnamoyl CoA quinate transferase
MSHNMFDGVAAAEFLNSWCEMAKGLPLSVPPFLDRTILRSRNPPKIEFPHNEFDEIEDISDTGKIYDEEKLIYKSFLFEPEKLEKLKIMAIEENNNNKVSTFQALTGFLWKSRCEALRFKPDQRVKLLFAADGRSRFIPRLPQGYCGNGIVLTGLVTSSGELVGNPLSHSVGLVKRLVELVTDGFMRSAMDYFEVNRTRPSMNATLLITSWSKLTLHKLDFGWGEPVFSGPVGLPGREVILFLPSGDDMKSINVFLGLPTSAMEVFEELMKI

SEQ ID NO: 90449 - DNA, 786 bp, Arabidopsis thaliana
  misc_feature (1)..(786): Ceres Seq. ID no. 12723988
  misc_feature: MA Experiment ID: 20000182 Result: Up-regulated in Transcription
  misc_feature: MA Experiment 20000182 PARAMETER Experiment Name: At_2mM_SA_P Parameter: Age (day) Value: 14
  misc_feature: MA Experiment 20000182 PARAMETER Experiment Name: At_2mM_SA_P Parameter: Organism Value: A. thaliana
  misc_feature: MA Experiment 20000182 PARAMETER Experiment Name: At_2mM_SA_P Parameter: Plant Line Value: WS
  misc_feature: MA Experiment 20000182 PARAMETER Experiment Name: At_2mM_SA_P Parameter: Timepoint (hr) Value: 6
  misc_feature: MA Experiment 20000182 PARAMETER Experiment Name: At_2mM_SA_P Parameter: Tissue Value: Aerial
  misc_feature: MA Experiment 20000182 PARAMETER Experiment Name: At_2mM_SA_P Parameter: Treatment Value: 2mM SA vs. No Treatment
  misc_feature: MA Experiment ID: 20000185 Result: Up-regulated in Transcription
  misc_feature: MA Experiment 20000185 PARAMETER Experiment Name: At_Roots__P Parameter: Age (day) Value: 7 vs. 21
  misc_feature: MA Experiment 20000185 PARAMETER Experiment Name: At_Roots__P Parameter: Organism Value: A. thaliana
  misc_feature: MA Experiment 20000185 PARAMETER Experiment Name: At_Roots__P Parameter: Tissue Value: Roots vs. Whole Plant
  misc_feature: MA Experiment ID: 20000439 Result: Up-regulated in Transcription
  misc_feature: MA Experiment 20000439 PARAMETER Experiment Name: At_Roots__P Parameter: Age (day) Value: 14 vs. 21
  misc_feature: MA Experiment 20000439 PARAMETER Experiment Name: At_Roots__P Parameter: Organism Value: A. thaliana
  misc_feature: MA Experiment 20000439 PARAMETER Experiment Name: At_Roots__P Parameter: Tissue Value: Roots vs. Whole Plant
  misc_feature: MA Experiment ID: 20000460 Result: Down-regulated in Transcription
  misc_feature: MA Experiment 20000460 PARAMETER Experiment Name: At_10percent_PEG_P Parameter: Age (day) Value: 12
  misc_feature: MA Experiment 20000460 PARAMETER Experiment Name: At_10percent_PEG_P Parameter: Organism Value: A. thaliana
  misc_feature: MA Experiment 20000460 PARAMETER Experiment Name: At_10percent_PEG_P Parameter: Plant Line Value: WS
  misc_feature: MA Experiment 20000460 PARAMETER Experiment Name: At_10percent_PEG_P Parameter: Timepoint (day) Value: 12
  misc_feature: MA Experiment 20000460 PARAMETER Experiment Name: At_10percent_PEG_P Parameter: Tissue Value: Whole Plant
  misc_feature: MA Experiment 20000460 PARAMETER Experiment Name: At_10percent_PEG_P Parameter: Treatment Value: 10percent PEG vs. No Treatment
  misc_feature: MA Experiment ID: 20000527 Result: Down-regulated in Transcription
  misc_feature: MA Experiment 20000527 PARAMETER Experiment Name: At_10percent_PEG_P Parameter: Age (day) Value: 20
  misc_feature: MA Experiment 20000527 PARAMETER Experiment Name: At_10percent_PEG_P Parameter: Organism Value: A. thaliana
  misc_feature: MA Experiment 20000527 PARAMETER Experiment Name: At_10percent_PEG_P Parameter: Plant Line Value: WS
  misc_feature: MA Experiment 20000527 PARAMETER Experiment Name: At_10percent_PEG_P Parameter: Timepoint (day) Value: 20
  misc_feature: MA Experiment 20000527 PARAMETER Experiment Name: At_10percent_PEG_P Parameter: Tissue Value: Whole Plant
  misc_feature: MA Experiment 20000527 PARAMETER Experiment Name: At_10percent_PEG_P Parameter: Treatment Value: 10percent PEG vs. No Treatment
  misc_feature: MA Experiment ID: 20001557 Result: Down-regulated in Transcription
  misc_feature: MA Experiment 20001557 PARAMETER Experiment Name: At_Drought_Soil_Dry_P Parameter: Age (day) Value: 27
  misc_feature: MA Experiment 20001557 PARAMETER Experiment Name: At_Drought_Soil_Dry_P Parameter: Organism Value: A. thaliana
  misc_feature: MA Experiment 20001557 PARAMETER Experiment Name: At_Drought_Soil_Dry_P Parameter: Plant Line Value: WS
  misc_feature: MA Experiment 20001557 PARAMETER Experiment Name: At_Drought_Soil_Dry_P Parameter: Post Timepoint (hr) Value: 3
  misc_feature: MA Experiment 20001557 PARAMETER Experiment Name: At_Drought_Soil_Dry_P Parameter: Post-Treatment Value: Re-Water vs. No Drought
  misc_feature: MA Experiment 20001557 PARAMETER Experiment Name: At_Drought_Soil_Dry_P Parameter: Timepoint (day) Value: 13
  misc_feature: MA Experiment 20001557 PARAMETER Experiment Name: At_Drought_Soil_Dry_P Parameter: Treatment Value: Drought vs. No Drought
  misc_feature: MA Experiment ID: 20001558 Result: Down-regulated in Transcription
  misc_feature: MA Experiment 20001558 PARAMETER Experiment Name: At_Drought_Soil_Dry_P Parameter: Age (day) Value: 27
  misc_feature: MA Experiment 20001558 PARAMETER Experiment Name: At_Drought_Soil_Dry_P Parameter: Organism Value: A. thaliana
  misc_feature: MA Experiment 20001558 PARAMETER Experiment Name: At_Drought_Soil_Dry_P Parameter: Plant Line Value: WS
  misc_feature: MA Experiment 20001558 PARAMETER Experiment Name: At_Drought_Soil_Dry_P Parameter: Post Timepoint (hr) Value: 6
  misc_feature: MA Experiment 20001558 PARAMETER Experiment Name: At_Drought_Soil_Dry_P Parameter: Post-Treatment Value: Re-Water vs. No Drought
  misc_feature: MA Experiment 20001558 PARAMETER Experiment Name: At_Drought_Soil_Dry_P Parameter: Timepoint (day) Value: 13
  misc_feature: MA Experiment 20001558 PARAMETER Experiment Name: At_Drought_Soil_Dry_P Parameter: Treatment Value: Drought vs. No Drought
atggtgtttaaatcagaaaaatcaaaccgggaaatgaaatcaaaggagaagcaaaggaagggattatggtcacccgaggaagatgagaagcttaggagtcatgtcctcaaatatggccatggatgctggagtactattcctcttcaagctggattgcagaggaatgggaagagttgtagattaaggtgggttaattatttaagacctggacttaagaagtctttattcactaaacaagaggaaactatacttctttcacttcattccatgttgggtaacaaatggtctcagatatcgaaattcttaccaggaagaaccgacaacgagatcaaaaactattggcattctaatctaaagaagggtgtaactttgaaacaacatgaaaccacaaaaaaacatcaaacacctttaatcacaaactcacttgaggccttgcagagttcaactgaaagatcttcttcatctatcaatgtcggagaaacgtctaatgctcaaacctcaagcttttcgccaaatctcgtgttctcggaatggttagatcatagtttgcttatggatcagtcacctcaaaagtctagctatgttcaaaatcttgttttaccggaagagagaggattcattggaccatgtggccctcgttatttgggaaacgactctttgcctgatttcgtgccaaattcagaatttttgttggatgatgagatatcatctgagatcgagttctgtacttcattttcagacaactttttgttcgatggtctcatcaacgagctacgaccaatgtaa

SEQ ID NO: 90450 - protein, 261 aa, Arabidopsis thaliana
  peptide (1)..(261): Ceres Seq. ID no. 12723989
  misc_feature (20)..(67): Pfam Name: Myb-like DNA-binding domain Pfam Description: Myb-like DNA-binding domain
  misc_feature (1)..(261): Homolog of NCBI NO: 15229055 NR Description: myb family transcription factor; protein id:
  misc_feature (84)..(261): Homolog of NCBI NO: 11358539 NR Description: myb-related transcription factor MYB45 [imported] Arabidopsis thaliana (fragment) >gi|3941458|gb|AAC83605.1|
  misc_feature (13)..(188): Homolog of NCBI NO: 15242947 NR Description: myb family transcription factor(MYB19); protein At5g52260.1 [Arabidopsis thaliana] >gi|8885539|dbj|BAA97469.1|
  misc_feature (13)..(156): Homolog of NCBI NO: 15235149 NR Description: myb family transcription factor; protein id:
  misc_feature (13)..(156): Homolog of NCBI NO: 25387539 NR Description: myb-like protein [imported] - Arabidopsis thaliana
  misc_feature (15)..(163): Homolog of NCBI NO: 2280530 NR Description: ATMYB4 [Arabidopsis thaliana]
  misc_feature (15)..(163): Homolog of NCBI NO: 30690317 NR Description: myb transcription factor (ATMYB4) [Arabidopsis >gi|20466622|gb|AAM20628.1| transcription factor ATMYB4 thaliana] >gi|30984580|gb|AAP42753.1| At5g26655 [Arabidopsis
  misc_feature (15)..(172): Homolog of NCBI NO: 15234262 NR Description: myb family transcription factor; protein id: supported by cDNA: gi_15375280, supported by cDNA: gi_15450989
  misc_feature (49)..(163): Homolog of NCBI NO: 7446174 NR Description: transcription factor MYB4 - Arabidopsis thaliana
  misc_feature (15)..(47): Homolog of NCBI NO: 7446174 NR Description: transcription factor MYB4 - Arabidopsis thaliana
MVFKSEKSNREMKSKEKQRKGLWSPEEDEKLRSHVLKYGHGCWSTIPLQAGLQRNGKSCRLRWVNYLRPGLKKSLFTKQEETILLSLHSMLGNKWSQISKFLPGRTDNEIKNYWHSNLKKGVTLKQHETTKKHQTPLITNSLEALQSSTERSSSSINVGETSNAQTSSFSPNLVFSEWLDHSLLMDQSPQKSSYVQNLVLPEERGFIGPCGPRYLGNDSLPDFVPNSEFLLDDEISSEIEFCTSFSDNFLFDGLINELRPM

SEQ ID NO: 90451 - protein, 250 aa, Arabidopsis thaliana
  peptide (1)..(250): Ceres Seq. ID no. 12723990
  misc_feature (9)..(56): Pfam Name: Myb-like DNA-binding domain Pfam Description: Myb-like DNA-binding domain
  misc_feature (1)..(250): Homolog of NCBI NO: 15229055 NR Description: myb family transcription factor; protein id:
  misc_feature (73)..(250): Homolog of NCBI NO: 11358539 NR Description: myb-related transcription factor MYB45 [imported] Arabidopsis thaliana (fragment) >gi|3941458|gb|AAC83605.1|
  misc_feature (2)..(177): Homolog of NCBI NO: 15242947 NR Description: myb family transcription factor(MYB19); protein At5g52260.1 [Arabidopsis thaliana] >gi|8885539|dbj|BAA97469.1|
  misc_feature (2)..(145): Homolog of NCBI NO: 15235149 NR Description: myb family transcription factor; protein id:
  misc_feature (2)..(145): Homolog of NCBI NO: 25387539 NR Description: myb-like protein [imported] - Arabidopsis thaliana
  misc_feature (4)..(152): Homolog of NCBI NO: 2280530 NR Description: ATMYB4 [Arabidopsis thaliana]
  misc_feature (4)..(152): Homolog of NCBI NO: 30690317 NR Description: myb transcription factor (ATMYB4) [Arabidopsis >gi|20466622|gb|AAM20628.1| transcription factor ATMYB4 thaliana] >gi|30984580|gb|AAP42753.1| At5g26655 [Arabidopsis
  misc_feature (4)..(161): Homolog of NCBI NO: 15234262 NR Description: myb family transcription factor; protein id: supported by cDNA: gi_15375280, supported by cDNA: gi_15450989
  misc_feature (38)..(152): Homolog of NCBI NO: 7446174 NR Description: transcription factor MYB4 - Arabidopsis thaliana
  misc_feature (4)..(36): Homolog of NCBI NO: 7446174 NR Description: transcription factor MYB4 - Arabidopsis thaliana
MKSKEKQRKGLWSPEEDEKLRSHVLKYGHGCWSTIPLQAGLQRNGKSCRLRWVNYLRPGLKKSLFTKQEETILLSLHSMLGNKWSQISKFLPGRTDNEIKNYWHSNLKKGVTLKQHETTKKHQTPLITNSLEALQSSTERSSSSINVGETSNAQTSSFSPNLVFSEWLDHSLLMDQSPQKSSYVQNLVLPEERGFIGPCGPRYLGNDSLPDFVPNSEFLLDDEISSEIEFCTSFSDNFLFDGLINELRPM

SEQ ID NO: 90452 - protein, 172 aa, Arabidopsis thaliana
  peptide (1)..(172): Ceres Seq. ID no. 12723991
  misc_feature (1)..(172): Homolog of NCBI NO: 15229055 NR Description: myb family transcription factor; protein id:
  misc_feature (1)..(172): Homolog of NCBI NO: 11358539 NR Description: myb-related transcription factor MYB45 [imported] Arabidopsis thaliana (fragment) >gi|3941458|gb|AAC83605.1|
  misc_feature (1)..(99): Homolog of NCBI NO: 15242947 NR Description: myb family transcription factor(MYB19); protein At5g52260.1 [Arabidopsis thaliana] >gi|8885539|dbj|BAA97469.1|
  misc_feature (1)..(67): Homolog of NCBI NO: 15235149 NR Description: myb family transcription factor; protein id:
  misc_feature (1)..(67): Homolog of NCBI NO: 25387539 NR Description: myb-like protein [imported] - Arabidopsis thaliana
  misc_feature (1)..(74): Homolog of NCBI NO: 2280530 NR Description: ATMYB4 [Arabidopsis thaliana]
  misc_feature (1)..(74): Homolog of NCBI NO: 30690317 NR Description: myb transcription factor (ATMYB4) [Arabidopsis >gi|20466622|gb|AAM20628.1| transcription factor ATMYB4 thaliana] >gi|30984580|gb|AAP42753.1| At5g26655 [Arabidopsis
  misc_feature (1)..(83): Homolog of NCBI NO: 15234262 NR Description: myb family transcription factor; protein id: supported by cDNA: gi_15375280, supported by cDNA: gi_15450989
  misc_feature (1)..(74): Homolog of NCBI NO: 7446174 NR Description: transcription factor MYB4 - Arabidopsis thaliana
  misc_feature (1)..(81): Homolog of NCBI NO: 34902542 NR Description: putative transcription factor (myb) [Oryza sativa
MLGNKWSQISKFLPGRTDNEIKNYWHSNLKKGVTLKQHETTKKHQTPLITNSLEALQSSTERSSSSINVGETSNAQTSSFSPNLVFSEWLDHSLLMDQSPQKSSYVQNLVLPEERGFIGPCGPRYLGNDSLPDFVPNSEFLLDDEISSEIEFCTSFSDNFLFDGLINELRPM

SEQ ID NO: 90453 - DNA, 1410 bp, Arabidopsis thaliana
  misc_feature (1)..(1410): Ceres Seq. ID no. 12723995
  misc_feature: MA Experiment ID: 20000171 Result: Up-regulated in Transcription
  misc_feature: MA Experiment 20000171 PARAMETER Experiment Name: At_42deg_Heat_P Parameter: Age (day) Value: 14
  misc_feature: MA Experiment 20000171 PARAMETER Experiment Name: At_42deg_Heat_P Parameter: Organism Value: A. thaliana
  misc_feature: MA Experiment 20000171 PARAMETER Experiment Name: At_42deg_Heat_P Parameter: Plant Line Value: WS
  misc_feature: MA Experiment 20000171 PARAMETER Experiment Name: At_42deg_Heat_P Parameter: Temperature (deg C) Value: 42 vs. 22
  misc_feature: MA Experiment 20000171 PARAMETER Experiment Name: At_42deg_Heat_P Parameter: Timepoint (hr) Value: 1
  misc_feature: MA Experiment 20000171 PARAMETER Experiment Name: At_42deg_Heat_P Parameter: Tissue Value: Aerial
  misc_feature: MA Experiment ID: 20000235 Result: Up-regulated in Transcription
  misc_feature: MA Experiment 20000235 PARAMETER Experiment Name: At_Siliques_P Parameter: Age (day) Value: 21
  misc_feature: MA Experiment 20000235 PARAMETER Experiment Name: At_Siliques_P Parameter: Organism Value: A. thaliana
  misc_feature: MA Experiment 20000235 PARAMETER Experiment Name: At_Siliques_P Parameter: Plant Line Value: WS
  misc_feature: MA Experiment 20000235 PARAMETER Experiment Name: At_Siliques_P Parameter: Tissue Value: 5-10mm Siliques vs. Whole Plant
atgattagaccaacgtttggtttactagtctttttggctatattcctttttccggcgattgaatcccggagtcaccgaaattcggtgacttccaagattgaattttcagcgctgaattgccggaaacatagtgcaatactgactgattttggtgcggttggagatggaaaaacttctaatacaaaagcgtttagaaatgccataagcaagctcagccaaatggcaaccgatggcggagctcaactcgtagtacctcccggaaaatggcttaccggaagttttaaccttacaagccatttcactttgttcatccagcgaggtgctaccatccttgcatctcaggatgaatctgaatggccagttatcgctccattgccatcgtacgggaaaggaagagacggaaccggaaccgggagattcaacagtctcatctccggtacaaacctaaccgacgtggttatcactggtaacaacggaacgatcaacggacagggacagtattggtgggacaaattcaagaagaagcagttcaaaataacaagaccgtacttgatcgagatcttgttctccaaaaacattcaaatctcgaacatcacattgatcgattcgccgtcgtggaatattcatcctgtctattgtaatagcgtcattgtcaaatccgtcaccgttcttgctcccgtcactgttcccaacaccgacggtatcaatccagattcttgcacaaacacattgatcgaagactgttacatagtctccggagacgactgcatcgccgtcaaaagcggttgggaccaatacggaatcaaattcggaatgccgacgcagcaactctcgatccgacggctgacatgcatctccccaaagagtgcaggagtagccttaggaagtgaaatgtccggaggaatcaaagacgttagaatcgaagatgtaactctaaccaacaccgaatccgccatccgaatcaaaactgcggtgggacgtggcgcttacgtcaaggatatttacgctaggaggatcacaatgaagacgatgaaatatgttttctggatgagtggaaactacggtagtcatcctgacgaaggatttgatcccaaggcgttgccggaaattactaatatcaattaccgcgatatgacggcggagaatgttacaatgtcagcgagtctcgacgggattgataaagatccgtttacgggtatttgtatctcgaatgtgactatagctttggcggctaaggctaagaaaatgcagtggaattgtacagatgtggctggagttaccagcagagttacgccagagccatgtagtttgttgcctgagaagaaagctcaggcgaagaatgttgactgtgcgtttccgtctgatttgattccgattgagagtgttgtattgaagaagtgctttctttga

SEQ ID NO: 90454 - protein, 469 aa, Arabidopsis thaliana
  peptide (1)..(469): Ceres Seq. ID no. 12723996
  misc_feature (78)..(435): Pfam Name: Glycosyl hydrolases family 28 Pfam Description: Glycosyl hydrolases family 28
  misc_feature (1)..(469): Homolog of NCBI NO: 15229058 NR Description: polygalacturonase, putative; protein id:
  misc_feature (1)..(467): Homolog of NCBI NO: 15224072 NR Description: polygalacturonase, putative; protein id: [Arabidopsis thaliana] >gi|25412169|pir||B84630 probable
  misc_feature (34)..(467): Homolog of NCBI NO: 30692538 NR Description: polygalacturonase-like protein [Fragaria x
  misc_feature (23)..(468): Homolog of NCBI NO: 15236514 NR Description: polygalacturonase, putative; protein id:
  misc_feature (34)..(467): Homolog of NCBI NO: 15233124 NR Description: polygalacturonase, putative; protein id:
  misc_feature (3)..(467): Homolog of NCBI NO: 34897760 NR Description: ESTs AU029388(E30287),D49277(S16474) correspond a region of the predicted gene.~Similar to Arabidopsis thaliana
  misc_feature (41)..(450): Homolog of NCBI NO: 18412253 NR Description: polygalacturonase, putative; protein id: supported by cDNA: gi_13358184 [Arabidopsis thaliana] AT3g62110 [Arabidopsis thaliana] >gi|23397166|gb|AAN31866.1|
  misc_feature (41)..(450): Homolog of NCBI NO: 11263971 NR Description: hypothetical protein T17J13.70 - Arabidopsis >gi|6899921|emb|CAB71871.1| putative protein [Arabidopsis
  misc_feature (2)..(438): Homolog of NCBI NO: 40714685 NR Description: putative polygalacturonase [Oryza sativa
  misc_feature (12)..(438): Homolog of NCBI NO: 15236625 NR Description: polygalacturonase, putative; protein id: supported by cDNA: gi_17065241 [Arabidopsis thaliana]
MIRPTFGLLVFLAIFLFPAIESRSHRNSVTSKIEFSALNCRKHSAILTDFGAVGDGKTSNTKAFRNAISKLSQMATDGGAQLVVPPGKWLTGSFNLTSHFTLFIQRGATILASQDESEWPVIAPLPSYGKGRDGTGTGRFNSLISGTNLTDVVITGNNGTINGQGQYWWDKFKKKQFKITRPYLIEILFSKNIQISNITLIDSPSWNIHPVYCNSVIVKSVTVLAPVTVPNTDGINPDSCTNTLIEDCYIVSGDDCIAVKSGWDQYGIKFGMPTQQLSIRRLTCISPKSAGVALGSEMSGGIKDVRIEDVTLTNTESAIRIKTAVGRGAYVKDIYARRITMKTMKYVFWMSGNYGSHPDEGFDPKALPEITNINYRDMTAENVTMSASLDGIDKDPFTGICISNVTIALAAKAKKMQWNCTDVAGVTSRVTPEPCSLLPEKKAQAKNVDCAFPSDLIPIESVVLKKCFL

SEQ ID NO: 90455 - protein, 396 aa, Arabidopsis thaliana
  peptide (1)..(396): Ceres Seq. ID no. 12723997
  misc_feature (5)..(362): Pfam Name: Glycosyl hydrolases family 28 Pfam Description: Glycosyl hydrolases family 28
  misc_feature (1)..(396): Homolog of NCBI NO: 15229058 NR Description: polygalacturonase, putative; protein id:
  misc_feature (1)..(394): Homolog of NCBI NO: 15224072 NR Description: polygalacturonase, putative; protein id: [Arabidopsis thaliana] >gi|25412169|pir||B84630 probable
  misc_feature (1)..(394): Homolog of NCBI NO: 30692538 NR Description: polygalacturonase-like protein [Fragaria x
  misc_feature (1)..(395): Homolog of NCBI NO: 15236514 NR Description: polygalacturonase, putative; protein id:
  misc_feature (1)..(394): Homolog of NCBI NO: 15233124 NR Description: polygalacturonase, putative; protein id:
  misc_feature (1)..(394): Homolog of NCBI NO: 34897760 NR Description: ESTs AU029388(E30287),D49277(S16474) correspond a region of the predicted gene.~Similar to Arabidopsis thaliana
  misc_feature (1)..(377): Homolog of NCBI NO: 18412253 NR Description: polygalacturonase, putative; protein id: supported by cDNA: gi_13358184 [Arabidopsis thaliana] AT3g62110 [Arabidopsis thaliana] >gi|23397166|gb|AAN31866.1|
  misc_feature (1)..(377): Homolog of NCBI NO: 11263971 NR Description: hypothetical protein T17J13.70 - Arabidopsis >gi|6899921|emb|CAB71871.1| putative protein [Arabidopsis
  misc_feature (1)..(365): Homolog of NCBI NO: 40714685 NR Description: putative polygalacturonase [Oryza sativa
  misc_feature (1)..(365): Homolog of NCBI NO: 15236625 NR Description: polygalacturonase, putative; protein id: supported by cDNA: gi_17065241 [Arabidopsis thaliana]
MATDGGAQLVVPPGKWLTGSFNLTSHFTLFIQRGATILASQDESEWPVIAPLPSYGKGRDGTGTGRFNSLISGTNLTDVVITGNNGTINGQGQYWWDKFKKKQFKITRPYLIEILFSKNIQISNITLIDSPSWNIHPVYCNSVIVKSVTVLAPVTVPNTDGINPDSCTNTLIEDCYIVSGDDCIAVKSGWDQYGIKFGMPTQQLSIRRLTCISPKSAGVALGSEMSGGIKDVRIEDVTLTNTESAIRIKTAVGRGAYVKDIYARRITMKTMKYVFWMSGNYGSHPDEGFDPKALPEITNINYRDMTAENVTMSASLDGIDKDPFTGICISNVTIALAAKAKKMQWNCTDVAGVTSRVTPEPCSLLPEKKAQAKNVDCAFPSDLIPIESVVLKKCFL

SEQ ID NO: 90456 - DNA, 1365 bp, Arabidopsis thaliana
  misc_feature (1)..(1365): Ceres Seq. ID no. 12724024
  misc_feature: MA Experiment ID: 20000169 Result: Down-regulated in Transcription
  misc_feature: MA Experiment 20000169 PARAMETER Experiment Name: At_100uM_ABA_P Parameter: Age (day) Value: 14
  misc_feature: MA Experiment 20000169 PARAMETER Experiment Name: At_100uM_ABA_P Parameter: Organism Value: A. thaliana
  misc_feature: MA Experiment 20000169 PARAMETER Experiment Name: At_100uM_ABA_P Parameter: Plant Line Value: WS
  misc_feature: MA Experiment 20000169 PARAMETER Experiment Name: At_100uM_ABA_P Parameter: Timepoint (hr) Value: 6
  misc_feature: MA Experiment 20000169 PARAMETER Experiment Name: At_100uM_ABA_P Parameter: Tissue Value: Aerial
  misc_feature: MA Experiment 20000169 PARAMETER Experiment Name: At_100uM_ABA_P Parameter: Treatment Value: 100uM ABA vs. No Treatment
  misc_feature: MA Experiment ID: 20000171 Result: Down-regulated in Transcription
  misc_feature: MA Experiment 20000171 PARAMETER Experiment Name: At_42deg_Heat_P Parameter: Age (day) Value: 14
  misc_feature: MA Experiment 20000171 PARAMETER Experiment Name: At_42deg_Heat_P Parameter: Organism Value: A. thaliana
  misc_feature: MA Experiment 20000171 PARAMETER Experiment Name: At_42deg_Heat_P Parameter: Plant Line Value: WS
  misc_feature: MA Experiment 20000171 PARAMETER Experiment Name: At_42deg_Heat_P Parameter: Temperature (deg C) Value: 42 vs. 22
  misc_feature: MA Experiment 20000171 PARAMETER Experiment Name: At_42deg_Heat_P Parameter: Timepoint (hr) Value: 1
  misc_feature: MA Experiment 20000171 PARAMETER Experiment Name: At_42deg_Heat_P Parameter: Tissue Value: Aerial
  misc_feature: MA Experiment ID: 20000173 Result: Down-regulated in Transcription
  misc_feature: MA Experiment 20000173 PARAMETER Experiment Name: At_42deg_Heat_P Parameter: Age (day) Value: 14
  misc_feature: MA Experiment 20000173 PARAMETER Experiment Name: At_42deg_Heat_P Parameter: Organism Value: A. thaliana
  misc_feature: MA Experiment 20000173 PARAMETER Experiment Name: At_42deg_Heat_P Parameter: Plant Line Value: WS
  misc_feature: MA Experiment 20000173 PARAMETER Experiment Name: At_42deg_Heat_P Parameter: Temperature (deg C) Value: 42 vs. 22
  misc_feature: MA Experiment 20000173 PARAMETER Experiment Name: At_42deg_Heat_P Parameter: Timepoint (hr) Value: 6
  misc_feature: MA Experiment 20000173 PARAMETER Experiment Name: At_42deg_Heat_P Parameter: Tissue Value: Aerial
  misc_feature: MA Experiment ID: 20000184 Result: Down-regulated in Transcription
  misc_feature: MA Experiment 20000184 PARAMETER Experiment Name: At_Shoots__P Parameter: Age (day) Value: 7
  misc_feature: MA Experiment 20000184 PARAMETER Experiment Name: At_Shoots__P Parameter: Tissue Value: Shoots vs. Whole Plant
  misc_feature: MA Experiment ID: 20000185 Result: Down-regulated in Transcription
  misc_feature: MA Experiment 20000185 PARAMETER Experiment Name: At_Roots__P Parameter: Age (day) Value: 7 vs. 21
  misc_feature: MA Experiment 20000185 PARAMETER Experiment Name: At_Roots__P Parameter: Organism Value: A. thaliana
  misc_feature: MA Experiment 20000185 PARAMETER Experiment Name: At_Roots__P Parameter: Tissue Value: Roots vs. Whole Plant
  misc_feature: MA Experiment ID: 20000234 Result: Down-regulated in Transcription
  misc_feature: MA Experiment 20000234 PARAMETER Experiment Name: At_Siliques_P Parameter: Age (day) Value: 21
  misc_feature: MA Experiment 20000234 PARAMETER Experiment Name: At_Siliques_P Parameter: Organism Value: A. thaliana
  misc_feature: MA Experiment 20000234 PARAMETER Experiment Name: At_Siliques_P Parameter: Plant Line Value: WS
  misc_feature: MA Experiment 20000234 PARAMETER Experiment Name: At_Siliques_P Parameter: Tissue Value: Less Than 5mm Siliques vs. Whole Plant
  misc_feature: MA Experiment ID: 20000235 Result: Down-regulated in Transcription
  misc_feature: MA Experiment 20000235 PARAMETER Experiment Name: At_Siliques_P Parameter: Age (day) Value: 21
  misc_feature: MA Experiment 20000235 PARAMETER Experiment Name: At_Siliques_P Parameter: Organism Value: A. thaliana
  misc_feature: MA Experiment 20000235 PARAMETER Experiment Name: At_Siliques_P Parameter: Plant Line Value: WS
  misc_feature: MA Experiment 20000235 PARAMETER Experiment Name: At_Siliques_P Parameter: Tissue Value: 5-10mm Siliques vs. Whole Plant
  misc_feature: MA Experiment ID: 20000264 Result: Down-regulated in Transcription
  misc_feature: MA Experiment 20000264 PARAMETER Experiment Name: At_Open_Flower_P Parameter: Age (day) Value: 21
  misc_feature: MA Experiment 20000264 PARAMETER Experiment Name: At_Open_Flower_P Parameter: Plant Line Value: WS
  misc_feature: MA Experiment 20000264 PARAMETER Experiment Name: At_Open_Flower_P Parameter: Tissue Value: Open Flower vs. Whole Plant
  misc_feature: MA Experiment ID: 20000265 Result: Down-regulated in Transcription
  misc_feature: MA Experiment 20000265 PARAMETER Experiment Name: At_Open_Flower_P Parameter: Age (day) Value: 21
  misc_feature: MA Experiment 20000265 PARAMETER Experiment Name: At_Open_Flower_P Parameter: Plant Line Value: WS
  misc_feature: MA Experiment 20000265 PARAMETER Experiment Name: At_Open_Flower_P Parameter: Tissue Value: Closed Flower vs. Whole Plant
  misc_feature: MA Experiment ID: 20000286 Result: Down-regulated in Transcription
  misc_feature: MA Experiment 20000286 PARAMETER Experiment Name: At_Open_Flower_P Parameter: Age (day) Value: 21
  misc_feature: MA Experiment 20000286 PARAMETER Experiment Name: At_Open_Flower_P Parameter: Plant Line Value: WS
  misc_feature: MA Experiment 20000286 PARAMETER Experiment Name: At_Open_Flower_P Parameter: Tissue Value: Half Open vs. Whole Plant
  misc_feature: MA Experiment ID: 20000439 Result: Down-regulated in Transcription
  misc_feature: MA Experiment 20000439 PARAMETER Experiment Name: At_Roots__P Parameter: Age (day) Value: 14 vs. 21
  misc_feature: MA Experiment 20000439 PARAMETER Experiment Name: At_Roots__P Parameter: Organism Value: A. thaliana
  misc_feature: MA Experiment 20000439 PARAMETER Experiment Name: At_Roots__P Parameter: Tissue Value: Roots vs. Whole Plant
  misc_feature: MA Experiment ID: 20000441 Result: Up-regulated in Transcription
  misc_feature: MA Experiment 20000441 PARAMETER Experiment Name: At_1uM_BR-BRZ__P Parameter: Tissue Value: Shoot Apices
  misc_feature: MA Experiment 20000441 PARAMETER Experiment Name: At_1uM_BR-BRZ__P Parameter: Treatment Value: 1uM BR vs. No Treatment
  misc_feature: MA Experiment ID: 20000453 Result: Down-regulated in Transcription
  misc_feature: MA Experiment 20000453 PARAMETER Experiment Name: At_100uM_ABA_P Parameter: Age (day) Value: 15
  misc_feature: MA Experiment 20000453 PARAMETER Experiment Name: At_100uM_ABA_P Parameter: Organism Value: A. thaliana
  misc_feature: MA Experiment 20000453 PARAMETER Experiment Name: At_100uM_ABA_P Parameter: Plant Line Value: WS
  misc_feature: MA Experiment 20000453 PARAMETER Experiment Name: At_100uM_ABA_P Parameter: Timepoint (hr) Value: 24
  misc_feature: MA Experiment 20000453 PARAMETER Experiment Name: At_100uM_ABA_P Parameter: Tissue Value: Aerial
  misc_feature: MA Experiment 20000453 PARAMETER Experiment Name: At_100uM_ABA_P Parameter: Treatment Value: 100uM ABA vs. No Treatment
  misc_feature: MA Experiment ID: 20000455 Result: Down-regulated in Transcription
  misc_feature: MA Experiment 20000455 PARAMETER Experiment Name: At_100uM_ABA_P Parameter: Age (day) Value: 16
  misc_feature: MA Experiment 20000455 PARAMETER Experiment Name: At_100uM_ABA_P Parameter: Organism Value: A. thaliana
  misc_feature: MA Experiment 20000455 PARAMETER Experiment Name: At_100uM_ABA_P Parameter: Plant Line Value: WS
  misc_feature: MA Experiment 20000455 PARAMETER Experiment Name: At_100uM_ABA_P Parameter: Timepoint (hr) Value: 48
  misc_feature: MA Experiment 20000455 PARAMETER Experiment Name: At_100uM_ABA_P Parameter: Tissue Value: Aerial
  misc_feature: MA Experiment 20000455 PARAMETER Experiment Name: At_100uM_ABA_P Parameter: Treatment Value: 100uM ABA vs. No Treatment
  misc_feature: MA Experiment ID: 20000794 Result: Down-regulated in Transcription
  misc_feature: MA Experiment 20000794 PARAMETER Experiment Name: At_Petals_P Parameter: Age (day) Value: 23-25 days
  misc_feature: MA Experiment 20000794 PARAMETER Experiment Name: At_Petals_P Parameter: Plant Line Value: WS
  misc_feature: MA Experiment 20000794 PARAMETER Experiment Name: At_Petals_P Parameter: Tissue Value: Petals vs. Whole plant
  misc_feature: MA Experiment ID: 20001248 Result: Up-regulated in Transcription
  misc_feature: MA Experiment 20001248 PARAMETER Experiment Name: At_Far-red-induction_P Parameter: Age (day) Value: 7
  misc_feature: MA Experiment 20001248 PARAMETER Experiment Name: At_Far-red-induction_P Parameter: Light Value: Far-red vs. White
  misc_feature: MA Experiment 20001248 PARAMETER Experiment Name: At_Far-red-induction_P Parameter: Organism Value: A. thaliana
  misc_feature: MA Experiment 20001248 PARAMETER Experiment Name: At_Far-red-induction_P Parameter: Plant Line Value: Columbia
  misc_feature: MA Experiment 20001248 PARAMETER Experiment Name: At_Far-red-induction_P Parameter: Timepoint (hr) Value: 4
  misc_feature: MA Experiment 20001248 PARAMETER Experiment Name: At_Far-red-induction_P Parameter: Tissue Value: Whole Plant
  misc_feature: MA Experiment ID: 20001554 Result: Down-regulated in Transcription
  misc_feature: MA Experiment 20001554 PARAMETER Experiment Name: At_Drought_Soil_Dry_P Parameter: Age (day) Value: 21
  misc_feature: MA Experiment 20001554 PARAMETER Experiment Name: At_Drought_Soil_Dry_P Parameter: Organism Value: A. thaliana
  misc_feature: MA Experiment 20001554 PARAMETER Experiment Name: At_Drought_Soil_Dry_P Parameter: Plant Line Value: WS
  misc_feature: MA Experiment 20001554 PARAMETER Experiment Name: At_Drought_Soil_Dry_P Parameter: Post Timepoint (hr) Value: None
  misc_feature: MA Experiment 20001554 PARAMETER Experiment Name: At_Drought_Soil_Dry_P Parameter: Post-Treatment Value: None
  misc_feature: MA Experiment 20001554 PARAMETER Experiment Name: At_Drought_Soil_Dry_P Parameter: Timepoint (day) Value: 7
  misc_feature: MA Experiment 20001554 PARAMETER Experiment Name: At_Drought_Soil_Dry_P Parameter: Treatment Value: Drought vs. No Drought
  misc_feature: MA Experiment ID: 20001555 Result: Down-regulated in Transcription
  misc_feature: MA Experiment 20001555 PARAMETER Experiment Name: At_Drought_Soil_Dry_P Parameter: Age (day) Value: 24
  misc_feature: MA Experiment 20001555 PARAMETER Experiment Name: At_Drought_Soil_Dry_P Parameter: Organism Value: A. thaliana
  misc_feature: MA Experiment 20001555 PARAMETER Experiment Name: At_Drought_Soil_Dry_P Parameter: Plant Line Value: WS
  misc_feature: MA Experiment 20001555 PARAMETER Experiment Name: At_Drought_Soil_Dry_P Parameter: Post Timepoint (hr) Value: None
  misc_feature: MA Experiment 20001555 PARAMETER Experiment Name: At_Drought_Soil_Dry_P Parameter: Post-Treatment Value: None
  misc_feature: MA Experiment 20001555 PARAMETER Experiment Name: At_Drought_Soil_Dry_P Parameter: Timepoint (day) Value: 10
  misc_feature: MA Experiment 20001555 PARAMETER Experiment Name: At_Drought_Soil_Dry_P Parameter: Treatment Value: Drought vs. No Drought
  misc_feature: MA Experiment ID: 20001556 Result: Down-regulated in Transcription
  misc_feature: MA Experiment 20001556 PARAMETER Experiment Name: At_Drought_Soil_Dry_P Parameter: Age (day) Value: 26
  misc_feature: MA Experiment 20001556 PARAMETER Experiment Name: At_Drought_Soil_Dry_P Parameter: Organism Value: A. thaliana
  misc_feature: MA Experiment 20001556 PARAMETER Experiment Name: At_Drought_Soil_Dry_P Parameter: Plant Line Value: WS
  misc_feature: MA Experiment 20001556 PARAMETER Experiment Name: At_Drought_Soil_Dry_P Parameter: Post Timepoint (hr) Value: None
  misc_feature: MA Experiment 20001556 PARAMETER Experiment Name: At_Drought_Soil_Dry_P Parameter: Post-Treatment Value: None
  misc_feature: MA Experiment 20001556 PARAMETER Experiment Name: At_Drought_Soil_Dry_P Parameter: Timepoint (day) Value: 12
  misc_feature: MA Experiment 20001556 PARAMETER Experiment Name: At_Drought_Soil_Dry_P Parameter: Treatment Value: Drought vs. No Drought
  misc_feature: MA Experiment ID: 20001757 Result: Up-regulated in Transcription
  misc_feature: MA Experiment 20001757 PARAMETER Experiment Name: At_50mM_NH4NO3_L-to-H_P Parameter: Timepoint (hr) Value: 6
  misc_feature: MA Experiment 20001757 PARAMETER Experiment Name: At_50mM_NH4NO3_L-to-H_P Parameter: Tissue Value: Leaf
  misc_feature: MA Experiment 20001757 PARAMETER Experiment Name: At_50mM_NH4NO3_L-to-H_P Parameter: Treatment Value: 50mM NH4NO3 vs 100mM Mannitol
atcttctccgttaaacccatttaaatagttttcattgtccttgtgaaaaatgcaattctcttcatcttctattacttctttcacttggacagttttaatcacagtgggatgtcttatgctttgtgcgtctttctccgatgctcaacttacccctactttttacgacacttcatgtcctaccgtcaccaacattgtaagagataccattgtcaacgagctaagatcggaccctcgtatcgccgggagcatccttcgtcttcacttccatgactgctttgttaatggttgtgatgcttcgatcttgttagacaacacgacatcatttcgaacagagaaagatgcacttggaaatgcaaattcagcccgaggatttccagtgattgatagaatgaaagctgcggtggagagggcatgcccaagaaccgtttcatgcgcagatatgctcaccattgctgctcaacaatctgtcactttggcaggaggtccttcttggaaggttcctttagggagaagagacagcttacaagcatttctagatcttgctaacgcaaatcttccagctccattcttcacacttccacagcttaaagccaacttcaaaaatgttggcctcgatcgtccttctgatcttgttgcgctctccggggctcacacatttggtaaaaatcaatgtcgattcattatggacagattatacaactttagcaacactggattacctgaccctacactcaacactacttacctccaaactcttcgtggtcaatgtcctcgcaatggtaatcaaagcgtcttagtggatttcgatctgcgtacgcctttggttttcgacaacaaatactatgtgaatcttaaagagcaaaaaggtcttatccagagcgaccaagagttgttctctagccccaatgccactgacacaatccccttggtgagagcatatgctgatggcacacaaacattcttcaatgcattcgtggaggcaatgaataggatgggaaatattacaccaactacaggaactcaaggacaaatcaggttgaattgtagagtggtgaactccaactctctactccatgatgtggtggatatcgttgactttgtaagttctatgtgagaatagttgactcaatatctggcgaccagactatatgttaagataaataagcgggatctcaagttgttacttgagcaggagcagattgtattggtgtttatagtatccaagtagttctctgttttttttttatattggcctttgatagcgttttgttaatcggtctaagcttctatggttttggactgttttatcctaataaatatgacaagataaaacgtttatgttatttgaaaatattttgtcctacg

SEQ ID NO: 90457 - protein, 354 aa, Arabidopsis thaliana
  peptide (1)..(354): Ceres Seq. ID no. 12724025
  misc_feature (49)..(300): Pfam Name: Peroxidase Pfam Description: Peroxidase
  misc_feature (1)..(354): Homolog of NCBI NO: 15229084 NR Description: peroxidase; protein id: At3g49110.1, supported by gi_15146325, supported by cDNA: gi_15450610 [Arabidopsis >gi|129815|sp|P24101|PE33_ARATH Peroxidase 33 precursor (Atperox
  misc_feature (1)..(354): Homolog of NCBI NO: 15229095 NR Description: peroxidase, putative; protein id: At3g49120.1, by cDNA: 39678., supported by cDNA: gi_11908065, supported by gi_12642879, supported by cDNA: gi_13265526, supported by cDNA:
  misc_feature (1)..(354): Homolog of NCBI NO: 480907 NR Description: peroxidase (EC 1.11.1.7) Cb - Arabidopsis
  misc_feature (5)..(354): Homolog of NCBI NO: 129814 NR Description: Peroxidase C1B precursor >gi|81666|pir||S00626
  misc_feature (1)..(354): Homolog of NCBI NO: 30690396 NR Description: peroxidase, putative [Arabidopsis thaliana] peroxidase [Arabidopsis thaliana] >gi|19347733|gb|AAL86292.1| protein [Arabidopsis thaliana] >gi|22136690|gb|AAM91664.1|
  misc_feature (1)..(354): Homolog of NCBI NO: 25453209 NR Description: Peroxidase 32 precursor (Atperox P32) (PRXR3) >gi|1402908|emb|CAA66959.1| peroxidase [Arabidopsis thaliana] peroxidase ATP16a [Arabidopsis thaliana]
  misc_feature (1)..(354): Homolog of NCBI NO: 129813 NR Description: PEROXIDASE C1A PRECURSOR >gi|2144377|pir||OPRHC
  misc_feature (1)..(354): Homolog of NCBI NO: 21592888 NR Description: peroxidase [Arabidopsis thaliana]
  misc_feature (1)..(354): Homolog of NCBI NO: 168241 NR Description: HRPC1
  misc_feature (23)..(354): Homolog of NCBI NO: 129816 NR Description: Peroxidase C1C precursor >gi|81668|pir||S00627
MQFSSSSITSFTWTVLITVGCLMLCASFSDAQLTPTFYDTSCPTVTNIVRDTIVNELRSDPRIAGSILRLHFHDCFVNGCDASILLDNTTSFRTEKDALGNANSARGFPVIDRMKAAVERACPRTVSCADMLTIAAQQSVTLAGGPSWKVPLGRRDSLQAFLDLANANLPAPFFTLPQLKANFKNVGLDRPSDLVALSGAHTFGKNQCRFIMDRLYNFSNTGLPDPTLNTTYLQTLRGQCPRNGNQSVLVDFDLRTPLVFDNKYYVNLKEQKGLIQSDQELFSSPNATDTIPLVRAYADGTQTFFNAFVEAMNRMGNITPTTGTQGQIRLNCRVVNSNSLLHDVVDIVDFVSSM

SEQ ID NO: 90458 - protein, 332 aa, Arabidopsis thaliana
  peptide (1)..(332): Ceres Seq. ID no. 12724026
  misc_feature (27)..(278): Pfam Name: Peroxidase Pfam Description: Peroxidase
  misc_feature (1)..(332): Homolog of NCBI NO: 15229084 NR Description: peroxidase; protein id: At3g49110.1, supported by gi_15146325, supported by cDNA: gi_15450610 [Arabidopsis >gi|129815|sp|P24101|PE33_ARATH Peroxidase 33 precursor (Atperox
  misc_feature (1)..(332): Homolog of NCBI NO: 15229095 NR Description: peroxidase, putative; protein id: At3g49120.1, by cDNA: 39678., supported by cDNA: gi_11908065, supported by gi_12642879, supported by cDNA: gi_13265526, supported by cDNA:
  misc_feature (1)..(332): Homolog of NCBI NO: 480907 NR Description: peroxidase (EC 1.11.1.7) Cb - Arabidopsis
  misc_feature (1)..(332): Homolog of NCBI NO: 129814 NR Description: Peroxidase C1B precursor >gi|81666|pir||S00626
  misc_feature (1)..(332): Homolog of NCBI NO: 30690396 NR Description: peroxidase, putative [Arabidopsis thaliana] peroxidase [Arabidopsis thaliana] >gi|19347733|gb|AAL86292.1| protein [Arabidopsis thaliana] >gi|22136690|gb|AAM91664.1|
  misc_feature (1)..(332): Homolog of NCBI NO: 25453209 NR Description: Peroxidase 32 precursor (Atperox P32) (PRXR3) >gi|1402908|emb|CAA66959.1| peroxidase [Arabidopsis thaliana] peroxidase ATP16a [Arabidopsis thaliana]
  misc_feature (1)..(332): Homolog of NCBI NO: 129813 NR Description: PEROXIDASE C1A PRECURSOR >gi|2144377|pir||OPRHC
  misc_feature (1)..(332): Homolog of NCBI NO: 21592888 NR Description: peroxidase [Arabidopsis thaliana]
  misc_feature (1)..(332): Homolog of NCBI NO: 168241 NR Description: HRPC1
  misc_feature (1)..(332): Homolog of NCBI NO: 129816 NR Description: Peroxidase C1C precursor >gi|81668|pir||S00627
MLCASFSDAQLTPTFYDTSCPTVTNIVRDTIVNELRSDPRIAGSILRLHFHDCFVNGCDASILLDNTTSFRTEKDALGNANSARGFPVIDRMKAAVERACPRTVSCADMLTIAAQQSVTLAGGPSWKVPLGRRDSLQAFLDLANANLPAPFFTLPQLKANFKNVGLDRPSDLVALSGAHTFGKNQCRFIMDRLYNFSNTGLPDPTLNTTYLQTLRGQCPRNGNQSVLVDFDLRTPLVFDNKYYVNLKEQKGLIQSDQELFSSPNATDTIPLVRAYADGTQTFFNAFVEAMNRMGNITPTTGTQGQIRLNCRVVNSNSLLHDVVDIVDFVSSM

SEQ ID NO: 90459 - protein, 241 aa, Arabidopsis thaliana
  peptide (1)..(241): Ceres Seq. ID no. 12724027
  misc_feature (1)..(187): Pfam Name: Peroxidase Pfam Description: Peroxidase
  misc_feature (1)..(241): Homolog of NCBI NO: 15229084 NR Description: peroxidase; protein id: At3g49110.1, supported by gi_15146325, supported by cDNA: gi_15450610 [Arabidopsis >gi|129815|sp|P24101|PE33_ARATH Peroxidase 33 precursor (Atperox
  misc_feature (1)..(241): Homolog of NCBI NO: 15229095 NR Description: peroxidase, putative; protein id: At3g49120.1, by cDNA: 39678., supported by cDNA: gi_11908065, supported by gi_12642879, supported by cDNA: gi_13265526, supported by cDNA:
  misc_feature (1)..(241): Homolog of NCBI NO: 480907 NR Description: peroxidase (EC 1.11.1.7) Cb - Arabidopsis
  misc_feature (1)..(241): Homolog of NCBI NO: 129814 NR Description: Peroxidase C1B precursor >gi|81666|pir||S00626
  misc_feature (1)..(241): Homolog of NCBI NO: 30690396 NR Description: peroxidase, putative [Arabidopsis thaliana] peroxidase [Arabidopsis thaliana] >gi|19347733|gb|AAL86292.1| protein [Arabidopsis thaliana] >gi|22136690|gb|AAM91664.1|
  misc_feature (1)..(241): Homolog of NCBI NO: 25453209 NR Description: Peroxidase 32 precursor (Atperox P32) (PRXR3) >gi|1402908|emb|CAA66959.1| peroxidase [Arabidopsis thaliana] peroxidase ATP16a [Arabidopsis thaliana]
  misc_feature (1)..(241): Homolog of NCBI NO: 129813 NR Description: PEROXIDASE C1A PRECURSOR >gi|2144377|pir||OPRHC
  misc_feature (1)..(241): Homolog of NCBI NO: 21592888 NR Description: peroxidase [Arabidopsis thaliana]
  misc_feature (1)..(241): Homolog of NCBI NO: 168241 NR Description: HRPC1
  misc_feature (1)..(241): Homolog of NCBI NO: 129816 NR Description: Peroxidase C1C precursor >gi|81668|pir||S00627
MKAAVERACPRTVSCADMLTIAAQQSVTLAGGPSWKVPLGRRDSLQAFLDLANANLPAPFFTLPQLKANFKNVGLDRPSDLVALSGAHTFGKNQCRFIMDRLYNFSNTGLPDPTLNTTYLQTLRGQCPRNGNQSVLVDFDLRTPLVFDNKYYVNLKEQKGLIQSDQELFSSPNATDTIPLVRAYADGTQTFFNAFVEAMNRMGNITPTTGTQGQIRLNCRVVNSNSLLHDVVDIVDFVSSM

SEQ ID NO: 90460 - DNA, 1758 bp, Arabidopsis thaliana
  misc_feature (1)..(1758): Ceres Seq. ID no. 12724048
  misc_feature: MA Experiment ID: 20000184 Result: Up-regulated in Transcription
  misc_feature: MA Experiment 20000184 PARAMETER Experiment Name: At_Shoots__P Parameter: Age (day) Value: 7
  misc_feature: MA Experiment 20000184 PARAMETER Experiment Name: At_Shoots__P Parameter: Tissue Value: Shoots vs. Whole Plant
agaagaacactaaagacaaaaattaaaccctcacactcacagagaccggagaagaagcagagagaaagagagagagagagattcaccggtgataacattgaagcagaaagattctccggtgataacattgaagctgaggagcaatgtatccgactggtcaacagatttcgtttcagaccactccgttgaatgttcaagatccaacaaggatgatgaatttggatcaatcttcaccagttgcaagaaatgaaactcagaatggaggaggcattgctcacgctgagtttgctatgttcaattccaagaggcttgaatctgatcttgaagctatgggtaacaaaatcaaacagcatgaggataatctcaagtttctcaagtctcagaaaaacaaaatggatgaagctatcgtcgacttgcaagttcatatgagtaagcttaactcgtctcctactcctagaagtgaaaactctgataacagtcttcagggtgaagatatcaatgcacagatccttcgccacgaaaactcagctgctggagttttaagtctggttgagactcttcatggtgctcaagcttctcagttgatgttgacaaaaggtgttgttggtgttgtagcgaaacttgggaaggtcaatgatgaaaatctcagccagattttgtcgaattatttggggactcgctcaatgttggcagttgtatgcaggaattatgaaagtgttacggctttagaggcttatgataaccatggcaacattgatataaatgctggccttcattgccttggctcttcgattggaagagagattggagacagttttgatgccatctgccttgaaaacctgaggccgtatgttggtcagcacatagctgatgatctgcaaagaaggcttgatcttctgaaaccaaaattacctaatggtgagtgtcctcccgggtttctcggatttgcagtgaatatgatacagatcgatccagcttacttgctctgtgtcacatcatatggatatggtcttcgtgagaccttgttctacaatctattctctcgccttcaagtttacaaaacaagggccgatatgattagtgccctcccatgcataagtgatggtgcggtatctttggatggaggaatcatcaggaaaacggggatcttcaatcttggaaaccgtgatgaggtgaacgtgagatttgcaaagccaactgcttctcgcacgatggacaactatagtgaggcggagaagaaaatgaaagagctgaaatggaaaaaggagaaaacgctggaggacattaagcgggagcaagtgctccgtgagcatgccgtcttcaactttggcaagaagaaagaagaatttgttcgatgcttggctcagagttcatgcactaatcagccaatgaacacacccagatgaaaaaaaagcaagcaaagaagcatagagctcggagttacagtgacccttgcttctataggaagcctattttgactataagtaggaagcctattttgactataagaacttgtttccagctaagtttttgatagattgcttccatggaatgcatcttatcagatatactagattttaataaatttccttgaagggtagtagatcggttagttttggttatgctgtttccaatctctgtctgttttgcttttgacttgaccagtttgctgtgtacataatcaatcttctaggctttctaatcagatgctcagtttctattgcttcatgtagttggaatacagtctttcctcacttc

SEQ ID NO: 90461 - protein, 420 aa, Arabidopsis thaliana
  peptide (1)..(420): Ceres Seq. ID no. 12724049
  misc_feature (1)..(420): Homolog of NCBI NO: 18408807 NR Description: expressed protein; protein id: At3g49250.1, by cDNA: gi_15146293, supported by cDNA: gi_19699161 [Arabidopsis >gi|15146294|gb|AAK83630.1| AT3g49250/F2K15_110 [Arabidopsis
  misc_feature (73)..(414): Homolog of NCBI NO: 11285606 NR Description: hypothetical protein F2K15.110 - Arabidopsis >gi|6723395|emb|CAB66404.1| hypothetical protein [Arabidopsis
  misc_feature (1)..(170): Homolog of NCBI NO: 11285606 NR Description: hypothetical protein F2K15.110 - Arabidopsis >gi|6723395|emb|CAB66404.1| hypothetical protein [Arabidopsis
  misc_feature (87)..(238): Homolog of NCBI NO: 34904396 NR Description: unnamed protein product [Oryza sativa (japonica group)] >gi|7339694|dbj|BAA92899.1| unnamed protein product
  misc_feature (325)..(408): Homolog of NCBI NO: 34904396 NR Description: unnamed protein product [Oryza sativa (japonica group)] >gi|7339694|dbj|BAA92899.1| unnamed protein product
  misc_feature (71)..(402): Homolog of NCBI NO: 15237930 NR Description: putative protein; protein id: At5g24280.1 thaliana] >gi|10177088|dbj|BAB10394.1|
  misc_feature (225)..(394): Homolog of NCBI NO: 10177087 NR Description: contains similarity to En/Spm-like transposon
  misc_feature (20)..(188): Homolog of NCBI NO: 10177087 NR Description: contains similarity to En/Spm-like transposon
MYPTGQQISFQTTPLNVQDPTRMMNLDQSSPVARNETQNGGGIAHAEFAMFNSKRLESDLEAMGNKIKQHEDNLKFLKSQKNKMDEAIVDLQVHMSKLNSSPTPRSENSDNSLQGEDINAQILRHENSAAGVLSLVETLHGAQASQLMLTKGVVGVVAKLGKVNDENLSQILSNYLGTRSMLAVVCRNYESVTALEAYDNHGNIDINAGLHCLGSSIGREIGDSFDAICLENLRPYVGQHIADDLQRRLDLLKPKLPNGECPPGFLGFAVNMIQIDPAYLLCVTSYGYGLRETLFYNLFSRLQVYKTRADMISALPCISDGAVSLDGGIIRKTGIFNLGNRDEVNVRFAKPTASRTMDNYSEAEKKMKELKWKKEKTLEDIKREQVLREHAVFNFGKKKEEFVRCLAQSSCTNQPMNTPR

SEQ ID NO: 90462 - protein, 398 aa, Arabidopsis thaliana
  peptide (1)..(398): Ceres Seq. ID no. 12724050
  misc_feature (1)..(398): Homolog of NCBI NO: 18408807 NR Description: expressed protein; protein id: At3g49250.1, by cDNA: gi_15146293, supported by cDNA: gi_19699161 [Arabidopsis >gi|15146294|gb|AAK83630.1| AT3g49250/F2K15_110 [Arabidopsis
  misc_feature (51)..(392): Homolog of NCBI NO: 11285606 NR Description: hypothetical protein F2K15.110 - Arabidopsis >gi|6723395|emb|CAB66404.1| hypothetical protein [Arabidopsis
  misc_feature (1)..(148): Homolog of NCBI NO: 11285606 NR Description: hypothetical protein F2K15.110 - Arabidopsis >gi|6723395|emb|CAB66404.1| hypothetical protein [Arabidopsis
  misc_feature (65)..(216): Homolog of NCBI NO: 34904396 NR Description: unnamed protein product [Oryza sativa (japonica group)] >gi|7339694|dbj|BAA92899.1| unnamed protein product
  misc_feature (303)..(386): Homolog of NCBI NO: 34904396 NR Description: unnamed protein product [Oryza sativa (japonica group)] >gi|7339694|dbj|BAA92899.1| unnamed protein product
  misc_feature (49)..(380): Homolog of NCBI NO: 15237930 NR Description: putative protein; protein id: At5g24280.1 thaliana] >gi|10177088|dbj|BAB10394.1|
  misc_feature (203)..(372): Homolog of NCBI NO: 10177087 NR Description: contains similarity to En/Spm-like transposon
  misc_feature (1)..(166): Homolog of NCBI NO: 10177087 NR Description: contains similarity to En/Spm-like transposon
MMNLDQSSPVARNETQNGGGIAHAEFAMFNSKRLESDLEAMGNKIKQHEDNLKFLKSQKNKMDEAIVDLQVHMSKLNSSPTPRSENSDNSLQGEDINAQILRHENSAAGVLSLVETLHGAQASQLMLTKGVVGVVAKLGKVNDENLSQILSNYLGTRSMLAVVCRNYESVTALEAYDNHGNIDINAGLHCLGSSIGREIGDSFDAICLENLRPYVGQHIADDLQRRLDLLKPKLPNGECPPGFLGFAVNMIQIDPAYLLCVTSYGYGLRETLFYNLFSRLQVYKTRADMISALPCISDGAVSLDGGIIRKTGIFNLGNRDEVNVRFAKPTASRTMDNYSEAEKKMKELKWKKEKTLEDIKREQVLREHAVFNFGKKKEEFVRCLAQSSCTNQPMNTPR

SEQ ID NO: 90463 - protein, 397 aa, Arabidopsis thaliana
  peptide (1)..(397): Ceres Seq. ID no. 12724051
  misc_feature (1)..(397): Homolog of NCBI NO: 18408807 NR Description: expressed protein; protein id: At3g49250.1, by cDNA: gi_15146293, supported by cDNA: gi_19699161 [Arabidopsis >gi|15146294|gb|AAK83630.1| AT3g49250/F2K15_110 [Arabidopsis
  misc_feature (50)..(391): Homolog of NCBI NO: 11285606 NR Description: hypothetical protein F2K15.110 - Arabidopsis >gi|6723395|emb|CAB66404.1| hypothetical protein [Arabidopsis
  misc_feature (1)..(147): Homolog of NCBI NO: 11285606 NR Description: hypothetical protein F2K15.110 - Arabidopsis >gi|6723395|emb|CAB66404.1| hypothetical protein [Arabidopsis
  misc_feature (64)..(215): Homolog of NCBI NO: 34904396 NR Description: unnamed protein product [Oryza sativa (japonica group)] >gi|7339694|dbj|BAA92899.1| unnamed protein product
  misc_feature (302)..(385): Homolog of NCBI NO: 34904396 NR Description: unnamed protein product [Oryza sativa (japonica group)] >gi|7339694|dbj|BAA92899.1| unnamed protein product
  misc_feature (48)..(379): Homolog of NCBI NO: 15237930 NR Description: putative protein; protein id: At5g24280.1 thaliana] >gi|10177088|dbj|BAB10394.1|
  misc_feature (202)..(371): Homolog of NCBI NO: 10177087 NR Description: contains similarity to En/Spm-like transposon
  misc_feature (1)..(165): Homolog of NCBI NO: 10177087 NR Description: contains similarity to En/Spm-like transposon
MNLDQSSPVARNETQNGGGIAHAEFAMFNSKRLESDLEAMGNKIKQHEDNLKFLKSQKNKMDEAIVDLQVHMSKLNSSPTPRSENSDNSLQGEDINAQILRHENSAAGVLSLVETLHGAQASQLMLTKGVVGVVAKLGKVNDENLSQILSNYLGTRSMLAVVCRNYESVTALEAYDNHGNIDINAGLHCLGSSIGREIGDSFDAICLENLRPYVGQHIADDLQRRLDLLKPKLPNGECPPGFLGFAVNMIQIDPAYLLCVTSYGYGLRETLFYNLFSRLQVYKTRADMISALPCISDGAVSLDGGIIRKTGIFNLGNRDEVNVRFAKPTASRTMDNYSEAEKKMKELKWKKEKTLEDIKREQVLREHAVFNFGKKKEEFVRCLAQSSCTNQPMNTPR

SEQ ID NO: 90464 - DNA, 939 bp, Arabidopsis thaliana
  misc_feature (1)..(939): Ceres Seq. ID no. 12724052
  misc_feature: MA Experiment ID: 20000328 Result: Down-regulated in Transcription
  misc_feature: MA Experiment 20000328 PARAMETER Experiment Name: At_42deg_Heat_Sub_P Parameter: Age (day) Value: 14
  misc_feature: MA Experiment 20000328 PARAMETER Experiment Name: At_42deg_Heat_Sub_P Parameter: Organism Value: A. thaliana
  misc_feature: MA Experiment 20000328 PARAMETER Experiment Name: At_42deg_Heat_Sub_P Parameter: Plant Line Value: WS
  misc_feature: MA Experiment 20000328 PARAMETER Experiment Name: At_42deg_Heat_Sub_P Parameter: Temperature (deg C) Value: 42 vs. 22
  misc_feature: MA Experiment 20000328 PARAMETER Experiment Name: At_42deg_Heat_Sub_P Parameter: Timepoint (hr) Value: 6
  misc_feature: MA Experiment 20000328 PARAMETER Experiment Name: At_42deg_Heat_Sub_P Parameter: Tissue Value: Aerial
  misc_feature: MA Experiment ID: 20000355 Result: Up-regulated in Transcription
  misc_feature: MA Experiment 20000355 PARAMETER Experiment Name: At_Siliques_Sub_P Parameter: Age (day) Value: 21
  misc_feature: MA Experiment 20000355 PARAMETER Experiment Name: At_Siliques_Sub_P Parameter: Organism Value: A. thaliana
  misc_feature: MA Experiment 20000355 PARAMETER Experiment Name: At_Siliques_Sub_P Parameter: Plant Line Value: WS
  misc_feature: MA Experiment 20000355 PARAMETER Experiment Name: At_Siliques_Sub_P Parameter: Tissue Value: Less Than 5mm Siliques vs. Whole Plant
  misc_feature: MA Experiment ID: 20000440 Result: Up-regulated in Transcription
  misc_feature: MA Experiment 20000440 PARAMETER Experiment Name: At_Closed-Flower__Sub_P Parameter: Tissue Value: Closed Flower vs. Whole Plant
atgcctgcgtcacatgaagcttcaaattacgatgaggtttctatgcagcaaagtatgctcttctctgatggtcttcaggacttgaagaatctgcgagcgcagttgtattcagcagccgagtatttcgaactatcttacacaaccgatgataaaaagcagattgttgtagagacactgaaagactacgctgtgaaggctctggtgaatacagttgaccatttaggctctgttacatataaagtgaatgactttatcgatgaaaaagtcgatgaagtatcagagaccgagctgcgagtatcttgcatcgaacagaggctaagaatgtgccaagagtatatggatcatgaagggcgttcacagcaatcacttgttattgacactccaaagttccataaacgatacatcttacccgcgggtgaaattatgactgctacaaatcttgaaaagcttaagtactttggaagcagtttagaggatgcagatgattggaaccaattccgaaatgctgttcgtgctacaatccgggaaacgcctccaccacctgttagaaaatcaacatctcagagttcatctccacggcaaccacctcaacgatcagcaaccttttcgtttacctctaccattccaaagaaagaacaagataagagatcagtttcaccgcatcggtttccactactaagatctggatcagtcgctaccaggaagtcagcatcaatcagccgaccaacgacaccaagcaagagcagatctataactcctatacggtatccatcagaaccaagaagatcggcttcggtccgagtcgcattcgagaaagataaccagaaagaaacagagcagcaacaaccgagcaagagcaaacgattgctcaaggctttgcttagtcgacgcaaaaccaagaaagatgacactctctacactttcttggacgaatactga

SEQ ID NO: 90465 - protein, 312 aa, Arabidopsis thaliana
  peptide (1)..(312): Ceres Seq. ID no. 12724053
  misc_feature (1)..(312): Homolog of NCBI NO: 15229112 NR Description: putative protein; protein id: At3g49290.1
  misc_feature (1)..(312): Homolog of NCBI NO: 30689382 NR Description: expressed protein [Arabidopsis thaliana]
  misc_feature (1)..(312): Homolog of NCBI NO: 10177091 NR Description: emb|CAB66408.1~gene_id:MOP9.13~strong similarity
  misc_feature (136)..(312): Homolog of NCBI NO: 26451274 NR Description: unknown protein [Arabidopsis thaliana]
  misc_feature (3)..(140): Homolog of NCBI NO: 34913914 NR Description: OSJNBa0066C06.8 [Oryza sativa (japonica
  misc_feature (256)..(312): Homolog of NCBI NO: 34913914 NR Description: OSJNBa0066C06.8 [Oryza sativa (japonica
  misc_feature (5)..(265): Homolog of NCBI NO: 21618229 NR Description: unknown [Arabidopsis thaliana]
  misc_feature (5)..(265): Homolog of NCBI NO: 15238265 NR Description: putative protein; protein id: At5g42030.1, by cDNA: 106836. [Arabidopsis thaliana] emb|CAB66408.1~gene_id:MJC20.13~similar to unknown protein
  misc_feature (7)..(276): Homolog of NCBI NO: 34904432 NR Description: unnamed protein product [Oryza sativa (japonica group)] >gi|7339712|dbj|BAA92917.1| unnamed protein product
  misc_feature (7)..(301): Homolog of NCBI NO: 18407012 NR Description: expressed protein; protein id: At2g46225.1, by cDNA: 13319. [Arabidopsis thaliana] expressed protein [Arabidopsis thaliana]
MPASHEASNYDEVSMQQSMLFSDGLQDLKNLRAQLYSAAEYFELSYTTDDKKQIVVETLKDYAVKALVNTVDHLGSVTYKVNDFIDEKVDEVSETELRVSCIEQRLRMCQEYMDHEGRSQQSLVIDTPKFHKRYILPAGEIMTATNLEKLKYFGSSLEDADDWNQFRNAVRATIRETPPPPVRKSTSQSSSPRQPPQRSATFSFTSTIPKKEQDKRSVSPHRFPLLRSGSVATRKSASISRPTTPSKSRSITPIRYPSEPRRSASVRVAFEKDNQKETEQQQPSKSKRLLKALLSRRKTKKDDTLYTFLDEY

SEQ ID NO: 90466 - protein, 298 aa, Arabidopsis thaliana
  peptide (1)..(298): Ceres Seq. ID no. 12724054
  misc_feature (1)..(298): Homolog of NCBI NO: 15229112 NR Description: putative protein; protein id: At3g49290.1
  misc_feature (1)..(298): Homolog of NCBI NO: 30689382 NR Description: expressed protein [Arabidopsis thaliana]
  misc_feature (1)..(298): Homolog of NCBI NO: 10177091 NR Description: emb|CAB66408.1~gene_id:MOP9.13~strong similarity
  misc_feature (122)..(298): Homolog of NCBI NO: 26451274 NR Description: unknown protein [Arabidopsis thaliana]
  misc_feature (1)..(126): Homolog of NCBI NO: 34913914 NR Description: OSJNBa0066C06.8 [Oryza sativa (japonica
  misc_feature (242)..(298): Homolog of NCBI NO: 34913914 NR Description: OSJNBa0066C06.8 [Oryza sativa (japonica
  misc_feature (1)..(251): Homolog of NCBI NO: 21618229 NR Description: unknown [Arabidopsis thaliana]
  misc_feature (1)..(251): Homolog of NCBI NO: 15238265 NR Description: putative protein; protein id: At5g42030.1, by cDNA: 106836. [Arabidopsis thaliana] emb|CAB66408.1~gene_id:MJC20.13~similar to unknown protein
  misc_feature (1)..(262): Homolog of NCBI NO: 34904432 NR Description: unnamed protein product [Oryza sativa (japonica group)] >gi|7339712|dbj|BAA92917.1| unnamed protein product
  misc_feature (1)..(287): Homolog of NCBI NO: 18407012 NR Description: expressed protein; protein id: At2g46225.1, by cDNA: 13319. [Arabidopsis thaliana] expressed protein [Arabidopsis thaliana]
MQQSMLFSDGLQDLKNLRAQLYSAAEYFELSYTTDDKKQIVVETLKDYAVKALVNTVDHLGSVTYKVNDFIDEKVDEVSETELRVSCIEQRLRMCQEYMDHEGRSQQSLVIDTPKFHKRYILPAGEIMTATNLEKLKYFGSSLEDADDWNQFRNAVRATIRETPPPPVRKSTSQSSSPRQPPQRSATFSFTSTIPKKEQDKRSVSPHRFPLLRSGSVATRKSASISRPTTPSKSRSITPIRYPSEPRRSASVRVAFEKDNQKETEQQQPSKSKRLLKALLSRRKTKKDDTLYTFLDEY

SEQ ID NO: 90467 - protein, 294 aa, Arabidopsis thaliana
  peptide (1)..(294): Ceres Seq. ID no. 12724055
  misc_feature (1)..(294): Homolog of NCBI NO: 15229112 NR Description: putative protein; protein id: At3g49290.1
  misc_feature (1)..(294): Homolog of NCBI NO: 30689382 NR Description: expressed protein [Arabidopsis thaliana]
  misc_feature (1)..(294): Homolog of NCBI NO: 10177091 NR Description: emb|CAB66408.1~gene_id:MOP9.13~strong similarity
  misc_feature (118)..(294): Homolog of NCBI NO: 26451274 NR Description: unknown protein [Arabidopsis thaliana]
  misc_feature (1)..(122): Homolog of NCBI NO: 34913914 NR Description: OSJNBa0066C06.8 [Oryza sativa (japonica
  misc_feature (238)..(294): Homolog of NCBI NO: 34913914 NR Description: OSJNBa0066C06.8 [Oryza sativa (japonica
  misc_feature (1)..(247): Homolog of NCBI NO: 21618229 NR Description: unknown [Arabidopsis thaliana]
  misc_feature (1)..(247): Homolog of NCBI NO: 15238265 NR Description: putative protein; protein id: At5g42030.1, by cDNA: 106836. [Arabidopsis thaliana] emb|CAB66408.1~gene_id:MJC20.13~similar to unknown protein
  misc_feature (1)..(258): Homolog of NCBI NO: 34904432 NR Description: unnamed protein product [Oryza sativa (japonica group)] >gi|7339712|dbj|BAA92917.1| unnamed protein product
  misc_feature (1)..(283): Homolog of NCBI NO: 18407012 NR Description: expressed protein; protein id: At2g46225.1, by cDNA: 13319. [Arabidopsis thaliana] expressed protein [Arabidopsis thaliana]
MLFSDGLQDLKNLRAQLYSAAEYFELSYTTDDKKQIVVETLKDYAVKALVNTVDHLGSVTYKVNDFIDEKVDEVSETELRVSCIEQRLRMCQEYMDHEGRSQQSLVIDTPKFHKRYILPAGEIMTATNLEKLKYFGSSLEDADDWNQFRNAVRATIRETPPPPVRKSTSQSSSPRQPPQRSATFSFTSTIPKKEQDKRSVSPHRFPLLRSGSVATRKSASISRPTTPSKSRSITPIRYPSEPRRSASVRVAFEKDNQKETEQQQPSKSKRLLKALLSRRKTKKDDTLYTFLDEY

SEQ ID NO: 90468 - DNA, 1026 bp, Arabidopsis thaliana
  misc_feature (1)..(1026): Ceres Seq. ID no. 12724060
  misc_feature: MA Experiment ID: 20000315 Result: Down-regulated in Transcription
  misc_feature: MA Experiment 20000315 PARAMETER Experiment Name: At_14day_Shoots-Roots_Sub_P Parameter: Age (day) Value: 14
  misc_feature: MA Experiment 20000315 PARAMETER Experiment Name: At_14day_Shoots-Roots_Sub_P Parameter: Organism Value: A. thaliana
  misc_feature: MA Experiment 20000315 PARAMETER Experiment Name: At_14day_Shoots-Roots_Sub_P Parameter: Plant Line Value: WS
  misc_feature: MA Experiment 20000315 PARAMETER Experiment Name: At_14day_Shoots-Roots_Sub_P Parameter: Tissue Value: Shoots vs. Whole Plant
  misc_feature: MA Experiment ID: 20000328 Result: Up-regulated in Transcription
  misc_feature: MA Experiment 20000328 PARAMETER Experiment Name: At_42deg_Heat_Sub_P Parameter: Age (day) Value: 14
  misc_feature: MA Experiment 20000328 PARAMETER Experiment Name: At_42deg_Heat_Sub_P Parameter: Organism Value: A. thaliana
  misc_feature: MA Experiment 20000328 PARAMETER Experiment Name: At_42deg_Heat_Sub_P Parameter: Plant Line Value: WS
  misc_feature: MA Experiment 20000328 PARAMETER Experiment Name: At_42deg_Heat_Sub_P Parameter: Temperature (deg C) Value: 42 vs. 22
  misc_feature: MA Experiment 20000328 PARAMETER Experiment Name: At_42deg_Heat_Sub_P Parameter: Timepoint (hr) Value: 6
  misc_feature: MA Experiment 20000328 PARAMETER Experiment Name: At_42deg_Heat_Sub_P Parameter: Tissue Value: Aerial
  misc_feature: MA Experiment ID: 20000355 Result: Down-regulated in Transcription
  misc_feature: MA Experiment 20000355 PARAMETER Experiment Name: At_Siliques_Sub_P Parameter: Age (day) Value: 21
  misc_feature: MA Experiment 20000355 PARAMETER Experiment Name: At_Siliques_Sub_P Parameter: Organism Value: A. thaliana
  misc_feature: MA Experiment 20000355 PARAMETER Experiment Name: At_Siliques_Sub_P Parameter: Plant Line Value: WS
  misc_feature: MA Experiment 20000355 PARAMETER Experiment Name: At_Siliques_Sub_P Parameter: Tissue Value: Less Than 5mm Siliques vs. Whole Plant
  misc_feature: MA Experiment ID: 20000440 Result: Down-regulated in Transcription
  misc_feature: MA Experiment 20000440 PARAMETER Experiment Name: At_Closed-Flower__Sub_P Parameter: Tissue Value: Closed Flower vs. Whole Plant
atgacttcgatcgttttctttcttctagccattcttttgagttccagaacttcaggagtcacatctcgtggcgggctctttgaagcttctgccgtagagaaacatgagcaatggatgtctcgattcaatcgcgtgtactcagacgattctgagaaaacgagtaggttcgagatctttacgaataacttaaagtttgtcgagagcatcaatatgaatacgaacaaaacgtacacgttggatgttaacgagttctctgatctcaccgacgaggaatttaaggcgaggtacacggggctggtggtgcccgaaggtatgaccagaatttcaacaactgattctcatgaaacggtatcgtttagatatgaaaacgttggtgaaaccggtgagagcatggattggatacaggaaggggctgttacatccgttaagcaccaacaacaatgtggatgttgctgggctttctcggcggtggcagcagtggaaggcatgacgaagattgcgaatggagagcttgtatcgctgtctgagcagcaactgttggattgtagtacggaaaacaatggatgtggcggagggataatgtggaaagctttcgactacattaaagaaaaccaaggtatcaccacagaggataactatccttaccaaggagcacaacaaacatgtgagtcaaatcatctagctgctgctaccatcagcggatacgaaacggttccccaaaatgacgaggaagcattgctaaaagcagtgtctcaacagcctgtttccgtggcgatcgaagggtcaggatatgagtttatacactactcgggagggatatttaacggagagtgtgggacgcagcttactcatgcagttactatagttggttatggggtgagcgaagaaggcatcaagtattggttgttgaagaactcatggggagaatcttggggagaaaatggttatatgagaatcatgagagacgtagattcacctcagggaatgtgtggtttggccagccttgcttactatccagttgcttga

SEQ ID NO: 90469 - protein, 341 aa, Arabidopsis thaliana
  peptide (1)..(341): Ceres Seq. ID no. 12724061
  misc_feature (127)..(340): Pfam Name: Papain family cysteine protease Pfam Description: Papain family cysteine protease
  misc_feature (1)..(341): Homolog of NCBI NO: 18408828 NR Description: cysteine protease; protein id: At3g49340.1
  misc_feature (1)..(341): Homolog of NCBI NO: 18401420 NR Description: cysteine proteinase; protein id: At2g27420.1, by cDNA: gi_17381153, supported by cDNA: gi_20465848 [Arabidopsis >gi|25289995|pir||F84672 probable cysteine proteinase cysteine
  misc_feature (4)..(341): Homolog of NCBI NO: 18403438 NR Description: cysteine proteinase; protein id: At2g34080.1
  misc_feature (1)..(341): Homolog of NCBI NO: 30690594 NR Description: cysteine proteinase [Arabidopsis thaliana]
  misc_feature (13)..(341): Homolog of NCBI NO: 25289991 NR Description: cysteine proteinase (EC 3.4.22.-) [similarity] - thaliana >gi|9502421|gb|AAF88120.1|AC021043_13 Putative cysteine
  misc_feature (8)..(341): Homolog of NCBI NO: 18396939 NR Description: cysteine protease; protein id: At1g29080.1
  misc_feature (8)..(341): Homolog of NCBI NO: 13491750 NR Description: cysteine protease [Ipomoea batatas]
  misc_feature (8)..(341): Homolog of NCBI NO: 24285904 NR Description: cysteine proteinase precursor [Ipomoea batatas]
  misc_feature (8)..(341): Homolog of NCBI NO: 535454 NR Description: cysteine proteinase
  misc_feature (20)..(341): Homolog of NCBI NO: 34329348 NR Description: putative cysteine proteinase [Medicago truncatula]
MTSIVFFLLAILLSSRTSGVTSRGGLFEASAVEKHEQWMSRFNRVYSDDSEKTSRFEIFTNNLKFVESINMNTNKTYTLDVNEFSDLTDEEFKARYTGLVVPEGMTRISTTDSHETVSFRYENVGETGESMDWIQEGAVTSVKHQQQCGCCWAFSAVAAVEGMTKIANGELVSLSEQQLLDCSTENNGCGGGIMWKAFDYIKENQGITTEDNYPYQGAQQTCESNHLAAATISGYETVPQNDEEALLKAVSQQPVSVAIEGSGYEFIHYSGGIFNGECGTQLTHAVTIVGYGVSEEGIKYWLLKNSWGESWGENGYMRIMRDVDSPQGMCGLASLAYYPVA

SEQ ID NO: 90470 - protein, 303 aa, Arabidopsis thaliana
  peptide (1)..(303): Ceres Seq. ID no. 12724062
  misc_feature (89)..(302): Pfam Name: Papain family cysteine protease Pfam Description: Papain family cysteine protease
  misc_feature (1)..(303): Homolog of NCBI NO: 18408828 NR Description: cysteine protease; protein id: At3g49340.1
  misc_feature (1)..(303): Homolog of NCBI NO: 18401420 NR Description: cysteine proteinase; protein id: At2g27420.1, by cDNA: gi_17381153, supported by cDNA: gi_20465848 [Arabidopsis >gi|25289995|pir||F84672 probable cysteine proteinase cysteine
  misc_feature (1)..(303): Homolog of NCBI NO: 18403438 NR Description: cysteine proteinase; protein id: At2g34080.1
  misc_feature (1)..(303): Homolog of NCBI NO: 30690594 NR Description: cysteine proteinase [Arabidopsis thaliana]
  misc_feature (1)..(303): Homolog of NCBI NO: 25289991 NR Description: cysteine proteinase (EC 3.4.22.-) [similarity] - thaliana >gi|9502421|gb|AAF88120.1|AC021043_13 Putative cysteine
  misc_feature (1)..(303): Homolog of NCBI NO: 18396939 NR Description: cysteine protease; protein id: At1g29080.1
  misc_feature (1)..(303): Homolog of NCBI NO: 13491750 NR Description: cysteine protease [Ipomoea batatas]
  misc_feature (1)..(303): Homolog of NCBI NO: 24285904 NR Description: cysteine proteinase precursor [Ipomoea batatas]
  misc_feature (1)..(303): Homolog of NCBI NO: 535454 NR Description: cysteine proteinase
  misc_feature (1)..(303): Homolog of NCBI NO: 34329348 NR Description: putative cysteine proteinase [Medicago truncatula]
MSRFNRVYSDDSEKTSRFEIFTNNLKFVESINMNTNKTYTLDVNEFSDLTDEEFKARYTGLVVPEGMTRISTTDSHETVSFRYENVGETGESMDWIQEGAVTSVKHQQQCGCCWAFSAVAAVEGMTKIANGELVSLSEQQLLDCSTENNGCGGGIMWKAFDYIKENQGITTEDNYPYQGAQQTCESNHLAAATISGYETVPQNDEEALLKAVSQQPVSVAIEGSGYEFIHYSGGIFNGECGTQLTHAVTIVGYGVSEEGIKYWLLKNSWGESWGENGYMRIMRDVDSPQGMCGLASLAYYPVA

SEQ ID NO: 90471 - protein, 271 aa, Arabidopsis thaliana
  peptide (1)..(271): Ceres Seq. ID no. 12724063
  misc_feature (57)..(270): Pfam Name: Papain family cysteine protease Pfam Description: Papain family cysteine protease
  misc_feature (1)..(271): Homolog of NCBI NO: 18408828 NR Description: cysteine protease; protein id: At3g49340.1
  misc_feature (1)..(271): Homolog of NCBI NO: 18401420 NR Description: cysteine proteinase; protein id: At2g27420.1, by cDNA: gi_17381153, supported by cDNA: gi_20465848 [Arabidopsis >gi|25289995|pir||F84672 probable cysteine proteinase cysteine
  misc_feature (1)..(271): Homolog of NCBI NO: 18403438 NR Description: cysteine proteinase; protein id: At2g34080.1
  misc_feature (1)..(271): Homolog of NCBI NO: 30690594 NR Description: cysteine proteinase [Arabidopsis thaliana]
  misc_feature (1)..(271): Homolog of NCBI NO: 25289991 NR Description: cysteine proteinase (EC 3.4.22.-) [similarity] - thaliana >gi|9502421|gb|AAF88120.1|AC021043_13 Putative cysteine
  misc_feature (1)..(271): Homolog of NCBI NO: 18396939 NR Description: cysteine protease; protein id: At1g29080.1
  misc_feature (1)..(271): Homolog of NCBI NO: 13491750 NR Description: cysteine protease [Ipomoea batatas]
  misc_feature (1)..(271): Homolog of NCBI NO: 24285904 NR Description: cysteine proteinase precursor [Ipomoea batatas]
  misc_feature (1)..(271): Homolog of NCBI NO: 535454 NR Description: cysteine proteinase
  misc_feature (1)..(271): Homolog of NCBI NO: 34329348 NR Description: putative cysteine proteinase [Medicago truncatula]
MNTNKTYTLDVNEFSDLTDEEFKARYTGLVVPEGMTRISTTDSHETVSFRYENVGETGESMDWIQEGAVTSVKHQQQCGCCWAFSAVAAVEGMTKIANGELVSLSEQQLLDCSTENNGCGGGIMWKAFDYIKENQGITTEDNYPYQGAQQTCESNHLAAATISGYETVPQNDEEALLKAVSQQPVSVAIEGSGYEFIHYSGGIFNGECGTQLTHAVTIVGYGVSEEGIKYWLLKNSWGESWGENGYMRIMRDVDSPQGMCGLASLAYYPVA

SEQ ID NO: 90472 - DNA, 1785 bp, Arabidopsis thaliana
  misc_feature (1)..(1785): Ceres Seq. ID no. 12724064
  misc_feature: MA Experiment ID: 20000307 Result: Up-regulated in Transcription
  misc_feature: MA Experiment 20000307 PARAMETER Experiment Name: At_Germinating_Seeds_Sub_P Parameter: Age (hr) Value: 24 vs. 0
  misc_feature: MA Experiment 20000307 PARAMETER Experiment Name: At_Germinating_Seeds_Sub_P Parameter: Organism Value: A. thaliana
  misc_feature: MA Experiment 20000307 PARAMETER Experiment Name: At_Germinating_Seeds_Sub_P Parameter: Plant Line Value: WS
  misc_feature: MA Experiment 20000307 PARAMETER Experiment Name: At_Germinating_Seeds_Sub_P Parameter: Tissue Value: Germinating Seeds
  misc_feature: MA Experiment ID: 20000314 Result: Up-regulated in Transcription
  misc_feature: MA Experiment 20000314 PARAMETER Experiment Name: At_14day_Shoots-Roots_Sub_P Parameter: Age (day) Value: 14
  misc_feature: MA Experiment 20000314 PARAMETER Experiment Name: At_14day_Shoots-Roots_Sub_P Parameter: Organism Value: A. thaliana
  misc_feature: MA Experiment 20000314 PARAMETER Experiment Name: At_14day_Shoots-Roots_Sub_P Parameter: Plant Line Value: WS
  misc_feature: MA Experiment 20000314 PARAMETER Experiment Name: At_14day_Shoots-Roots_Sub_P Parameter: Tissue Value: Roots vs. Whole Plant
  misc_feature: MA Experiment ID: 20000315 Result: Down-regulated in Transcription
  misc_feature: MA Experiment 20000315 PARAMETER Experiment Name: At_14day_Shoots-Roots_Sub_P Parameter: Age (day) Value: 14
  misc_feature: MA Experiment 20000315 PARAMETER Experiment Name: At_14day_Shoots-Roots_Sub_P Parameter: Organism Value: A. thaliana
  misc_feature: MA Experiment 20000315 PARAMETER Experiment Name: At_14day_Shoots-Roots_Sub_P Parameter: Plant Line Value: WS
  misc_feature: MA Experiment 20000315 PARAMETER Experiment Name: At_14day_Shoots-Roots_Sub_P Parameter: Tissue Value: Shoots vs. Whole Plant
  misc_feature: MA Experiment ID: 20000328 Result: Down-regulated in Transcription
  misc_feature: MA Experiment 20000328 PARAMETER Experiment Name: At_42deg_Heat_Sub_P Parameter: Age (day) Value: 14
  misc_feature: MA Experiment 20000328 PARAMETER Experiment Name: At_42deg_Heat_Sub_P Parameter: Organism Value: A. thaliana
  misc_feature: MA Experiment 20000328 PARAMETER Experiment Name: At_42deg_Heat_Sub_P Parameter: Plant Line Value: WS
  misc_feature: MA Experiment 20000328 PARAMETER Experiment Name: At_42deg_Heat_Sub_P Parameter: Temperature (deg C) Value: 42 vs. 22
  misc_feature: MA Experiment 20000328 PARAMETER Experiment Name: At_42deg_Heat_Sub_P Parameter: Timepoint (hr) Value: 6
  misc_feature: MA Experiment 20000328 PARAMETER Experiment Name: At_42deg_Heat_Sub_P Parameter: Tissue Value: Aerial
atgggccactgttacagccggaacatttccaccgtcgacgacgacgacgaaatcccctccgcaaccgctcagttaccacatcggtcacaccaaaaccaccaccagacttcatcatcatcatcaattccccagtctccggctacttcagaagtcaacccttacaacatcagcccatttcaaagcccgttaccggcgggagtagctccatctccggcgagaactccgggaagaaaattcaaatggccattcccgcctccttcacctgcgaaaccgattatggcggctttaagacggcgacgaggtacagcaccacatcctcgggatggtccgatccctgaggatagtgaagccggcggaagcggcggcggaatcggagaaaggttagataaaaatttcggatttgcgaagaattttgaaggtaagtatgagcttgggagagaagtaggtcgagggcattttggtcatacttgttgggctaaagctaagaaagggaagatcaaaggtcaaacagttgcagtcaaaatcatctctaaatctaagatgacatcagctttgtcgattgaagatgttcgtcgagaggtgaagttgttgaaagctttgtctgggcatagtcacatggttaagttctatgatgtgtttgaggattcggataatgtctttgttgttatggagttatgtgaaggtggagagctattggacagtattttggcgagaggtggtcgatatccggaagcagaagctaagcgtattcttgtacagattttatctgcaactgcttttttccatcttcaaggtgttgtgcaccgtgatctgaaaccggagaattttctctttacaagcaaaaatgaggatgcagtactcaaggttatagattttggcttgtctgattacgctagatttgatcagcgtctcaacgatgtggtaggaagtgcatactatgttgcacctgaagtacttcacagatcctatagcaccgaagcagatatatggagcattggtgtcatatcttacatattactctgtggaagtagacctttttacggaagaaccgagtctgcaatttttcgttgtgtgcttagagcgaacccgaatttcgacgatttgccgtggccttcaatatctcctattgccaaagactttgtgaaaaggcttttgaataaagaccataggaaaagaatgacagctgctcaagctttagctcatccatggcttcgagatgaaaatcctggtttacttctggatttctctatctacaaattggtgaagtcttatattcgtgcatcgcctttccgaagagcagcacttaagtctctatccaaagctatacccgaagaggaactcgtgttccttaaagcacagtttatgctcttggagccagaagatggaggcttgcatcttcacaatttcaccacggctctgacaagatatgctacggatgctatgatcgaatctagacttcctgacatattaaacatgatgcaaccattggcacataagaaacttgattttgaagagttttgtgcggcttcagtcagcgtttatcaacttgaggctcttgaagaatgggaacagatcgcaacggtagcctttgaacactttgaaagtgaaggaagccgagccatttcggtccaagaactcgccgaggagatgagtttgggaccaaatgcgtatcctctgctcaaggattggatccgtagtttagatgggaagctgaatttcttaggttacgccaagttcttgcacggtgtgactgttcgaagctcgagctcgagaccaatgagatga

SEQ ID NO: 90473 - protein, 594 aa, Arabidopsis thaliana
  peptide (1)..(594): Ceres Seq. ID no. 12724065
  misc_feature (142)..(404): Pfam Name: Protein kinase domain Pfam Description: Protein kinase domain
  misc_feature (1)..(594): Homolog of NCBI NO: 16904222 NR Description: calcium/calmodulin-dependent protein kinase CaMK1
  misc_feature (48)..(594): Homolog of NCBI NO: 19547871 NR Description: serine/threonine protein kinase pk23
  misc_feature (166)..(592): Homolog of NCBI NO: 30689449 NR Description: calcium-dependent protein kinase, putative (CDPK)
  misc_feature (166)..(592): Homolog of NCBI NO: 22136058 NR Description: calcium dependent protein kinase-like protein
  misc_feature (141)..(592): Homolog of NCBI NO: 4741927 NR Description: calcium dependent protein kinase CP4 [Arabidopsis
  misc_feature (1)..(591): Homolog of NCBI NO: 7446431 NR Description: calcium-dependent protein kinase-related protein
  misc_feature (32)..(591): Homolog of NCBI NO: 7446432 NR Description: calcium/calmodulin-dependent protein kinase
  misc_feature (1)..(591): Homolog of NCBI NO: 9858873 NR Description: calcium/calmodulin dependent protein kinase MCK2
  misc_feature (1)..(592): Homolog of NCBI NO: 18087555 NR Description: At2g46700/T3A4.8 [Arabidopsis thaliana]
  misc_feature (45)..(591): Homolog of NCBI NO: 37535966 NR Description: putative kinase [Oryza sativa (japonica
MGHCYSRNISTVDDDDEIPSATAQLPHRSHQNHHQTSSSSSIPQSPATSEVNPYNISPFQSPLPAGVAPSPARTPGRKFKWPFPPPSPAKPIMAALRRRRGTAPHPRDGPIPEDSEAGGSGGGIGERLDKNFGFAKNFEGKYELGREVGRGHFGHTCWAKAKKGKIKGQTVAVKIISKSKMTSALSIEDVRREVKLLKALSGHSHMVKFYDVFEDSDNVFVVMELCEGGELLDSILARGGRYPEAEAKRILVQILSATAFFHLQGVVHRDLKPENFLFTSKNEDAVLKVIDFGLSDYARFDQRLNDVVGSAYYVAPEVLHRSYSTEADIWSIGVISYILLCGSRPFYGRTESAIFRCVLRANPNFDDLPWPSISPIAKDFVKRLLNKDHRKRMTAAQALAHPWLRDENPGLLLDFSIYKLVKSYIRASPFRRAALKSLSKAIPEEELVFLKAQFMLLEPEDGGLHLHNFTTALTRYATDAMIESRLPDILNMMQPLAHKKLDFEEFCAASVSVYQLEALEEWEQIATVAFEHFESEGSRAISVQELAEEMSLGPNAYPLLKDWIRSLDGKLNFLGYAKFLHGVTVRSSSSRPMR

SEQ ID NO: 90474 - protein, 502 aa, Arabidopsis thaliana
  peptide (1)..(502): Ceres Seq. ID no. 12724066
  misc_feature (50)..(312): Pfam Name: Protein kinase domain Pfam Description: Protein kinase domain
  misc_feature (1)..(502): Homolog of NCBI NO: 16904222 NR Description: calcium/calmodulin-dependent protein kinase CaMK1
  misc_feature (1)..(502): Homolog of NCBI NO: 19547871 NR Description: serine/threonine protein kinase pk23
  misc_feature (74)..(500): Homolog of NCBI NO: 30689449 NR Description: calcium-dependent protein kinase, putative (CDPK)
  misc_feature (74)..(500): Homolog of NCBI NO: 22136058 NR Description: calcium dependent protein kinase-like protein
  misc_feature (49)..(500): Homolog of NCBI NO: 4741927 NR Description: calcium dependent protein kinase CP4 [Arabidopsis
  misc_feature (1)..(499): Homolog of NCBI NO: 7446431 NR Description: calcium-dependent protein kinase-related protein
  misc_feature (1)..(499): Homolog of NCBI NO: 7446432 NR Description: calcium/calmodulin-dependent protein kinase
  misc_feature (1)..(499): Homolog of NCBI NO: 9858873 NR Description: calcium/calmodulin dependent protein kinase MCK2
  misc_feature (1)..(500): Homolog of NCBI NO: 18087555 NR Description: At2g46700/T3A4.8 [Arabidopsis thaliana]
  misc_feature (1)..(499): Homolog of NCBI NO: 37535966 NR Description: putative kinase [Oryza sativa (japonica
MAALRRRRGTAPHPRDGPIPEDSEAGGSGGGIGERLDKNFGFAKNFEGKYELGREVGRGHFGHTCWAKAKKGKIKGQTVAVKIISKSKMTSALSIEDVRREVKLLKALSGHSHMVKFYDVFEDSDNVFVVMELCEGGELLDSILARGGRYPEAEAKRILVQILSATAFFHLQGVVHRDLKPENFLFTSKNEDAVLKVIDFGLSDYARFDQRLNDVVGSAYYVAPEVLHRSYSTEADIWSIGVISYILLCGSRPFYGRTESAIFRCVLRANPNFDDLPWPSISPIAKDFVKRLLNKDHRKRMTAAQALAHPWLRDENPGLLLDFSIYKLVKSYIRASPFRRAALKSLSKAIPEEELVFLKAQFMLLEPEDGGLHLHNFTTALTRYATDAMIESRLPDILNMMQPLAHKKLDFEEFCAASVSVYQLEALEEWEQIATVAFEHFESEGSRAISVQELAEEMSLGPNAYPLLKDWIRSLDGKLNFLGYAKFLHGVTVRSSSSRPMR

SEQ ID NO: 90475 - protein, 414 aa, Arabidopsis thaliana
  peptide (1)..(414): Ceres Seq. ID no. 12724067
  misc_feature (1)..(224): Pfam Name: Protein kinase domain Pfam Description: Protein kinase domain
  misc_feature (1)..(414): Homolog of NCBI NO: 16904222 NR Description: calcium/calmodulin-dependent protein kinase CaMK1
  misc_feature (1)..(414): Homolog of NCBI NO: 19547871 NR Description: serine/threonine protein kinase pk23
  misc_feature (1)..(412): Homolog of NCBI NO: 30689449 NR Description: calcium-dependent protein kinase, putative (CDPK)
  misc_feature (1)..(412): Homolog of NCBI NO: 22136058 NR Description: calcium dependent protein kinase-like protein
  misc_feature (1)..(412): Homolog of NCBI NO: 4741927 NR Description: calcium dependent protein kinase CP4 [Arabidopsis
  misc_feature (1)..(411): Homolog of NCBI NO: 7446431 NR Description: calcium-dependent protein kinase-related protein
  misc_feature (1)..(411): Homolog of NCBI NO: 7446432 NR Description: calcium/calmodulin-dependent protein kinase
  misc_feature (1)..(411): Homolog of NCBI NO: 9858873 NR Description: calcium/calmodulin dependent protein kinase MCK2
  misc_feature (1)..(412): Homolog of NCBI NO: 18087555 NR Description: At2g46700/T3A4.8 [Arabidopsis thaliana]
  misc_feature (1)..(411): Homolog of NCBI NO: 37535966 NR Description: putative kinase [Oryza sativa (japonica
MTSALSIEDVRREVKLLKALSGHSHMVKFYDVFEDSDNVFVVMELCEGGELLDSILARGGRYPEAEAKRILVQILSATAFFHLQGVVHRDLKPENFLFTSKNEDAVLKVIDFGLSDYARFDQRLNDVVGSAYYVAPEVLHRSYSTEADIWSIGVISYILLCGSRPFYGRTESAIFRCVLRANPNFDDLPWPSISPIAKDFVKRLLNKDHRKRMTAAQALAHPWLRDENPGLLLDFSIYKLVKSYIRASPFRRAALKSLSKAIPEEELVFLKAQFMLLEPEDGGLHLHNFTTALTRYATDAMIESRLPDILNMMQPLAHKKLDFEEFCAASVSVYQLEALEEWEQIATVAFEHFESEGSRAISVQELAEEMSLGPNAYPLLKDWIRSLDGKLNFLGYAKFLHGVTVRSSSSRPMR

SEQ ID NO: 90476 - DNA, 1026 bp, Arabidopsis thaliana
  misc_feature (1)..(1026): Ceres Seq. ID no. 12724068
  misc_feature: MA Experiment ID: 20001557 Result: Up-regulated in Transcription
  misc_feature: MA Experiment 20001557 PARAMETER Experiment Name: At_Drought_Soil_Dry_P Parameter: Age (day) Value: 27
  misc_feature: MA Experiment 20001557 PARAMETER Experiment Name: At_Drought_Soil_Dry_P Parameter: Organism Value: A. thaliana
  misc_feature: MA Experiment 20001557 PARAMETER Experiment Name: At_Drought_Soil_Dry_P Parameter: Plant Line Value: WS
  misc_feature: MA Experiment 20001557 PARAMETER Experiment Name: At_Drought_Soil_Dry_P Parameter: Post Timepoint (hr) Value: 3
  misc_feature: MA Experiment 20001557 PARAMETER Experiment Name: At_Drought_Soil_Dry_P Parameter: Post-Treatment Value: Re-Water vs. No Drought
  misc_feature: MA Experiment 20001557 PARAMETER Experiment Name: At_Drought_Soil_Dry_P Parameter: Timepoint (day) Value: 13
  misc_feature: MA Experiment 20001557 PARAMETER Experiment Name: At_Drought_Soil_Dry_P Parameter: Treatment Value: Drought vs. No Drought
  misc_feature: MA Experiment ID: 20001757 Result: Up-regulated in Transcription
  misc_feature: MA Experiment 20001757 PARAMETER Experiment Name: At_50mM_NH4NO3_L-to-H_P Parameter: Timepoint (hr) Value: 6
  misc_feature: MA Experiment 20001757 PARAMETER Experiment Name: At_50mM_NH4NO3_L-to-H_P Parameter: Tissue Value: Leaf
  misc_feature: MA Experiment 20001757 PARAMETER Experiment Name: At_50mM_NH4NO3_L-to-H_P Parameter: Treatment Value: 50mM NH4NO3 vs 100mM Mannitol
atgagtgggcgattttctcggtcaatctatgttggtaacttgcccggtgacattagggaacatgagattgaagatatcttttacaagtatggccgcattgtcgatattgaattgaaggttccacctcggcctccatgttattgctttgttgagtttgagcattctcgggatgctgaagatgccatcaagggccgtgatggctataatttggatggctgtcgcttgagggttgagcttgcacatggtggtcgaggacagtcttcaagtgatcgtcgtggtggctacggtggtggtggcagcggctatggtggtggaggtggtggtggtggatcagctcggtttggcgtctcacgacactctgaattccgagttattgtacgtgggctcccatcatctgcttcatggcaagatttgaaggatcatatgcggaaagctggtgatgtgtgctttgctgaggtgactcgagacagtgatggaacttatggtgttgtcgactacaccaattatgatgacatgaagtatgcaataaggaaacttgatgacacagagttcagaaacccctgggctagaggttttatccgggttaagaaatatgaaagctcccgatcaagaagcagaagcccaagcagaagcagaagcagaagcagaagtcgaagtcgtagccgaggccgtggtcgcagccatagccgcagtcgcagccttagcaggagcaagagcccaaggaaggatctgagtaaatcaccaaggcgatccctttccagatcgatttcaaaatctagatcgccatcgcccgacaagaagaagagtccccccaggcaagtcttctgcccttcttttggcaatgtcgagatcaaagtccaggtccaggtccagatcgaggtctccgtccaaatctcctcccaaggttcgcgaaggcagtgtgtgattttgttaagcggtgaaaatggccaaaagaaagagtgcgaaaaattctcaagtcaagatccattctctgtgtttttttttttgctgttttcggataattga

SEQ ID NO: 90477 - protein, 341 aa, Arabidopsis thaliana
  peptide (1)..(341): Ceres Seq. ID no. 12724069
  misc_feature (9)..(77): Pfam Name: RNA recognition motif. (a.k.a. RRM, RBD, or RNP domain) Pfam Description: RNA recognition motif. (a.k.a. RRM, RBD, or RNP
  misc_feature (1)..(341): Homolog of NCBI NO: 22331714 NR Description: arginine/serine-rich splicing factor (atSRp34),
  misc_feature (1)..(272): Homolog of NCBI NO: 12324445 NR Description: putative splicing factor; 53460-55514
  misc_feature (1)..(179): Homolog of NCBI NO: 11346384 NR Description: PRE-MRNA SPLICING FACTOR SF2-like protein -
  misc_feature (1)..(272): Homolog of NCBI NO: 30678391 NR Description: pre-mRNA splicing factor SF2 (SR1 protein)
  misc_feature (1)..(272): Homolog of NCBI NO: 5815235 NR Description: splicing factor SR1 [Arabidopsis thaliana]
  misc_feature (1)..(264): Homolog of NCBI NO: 2443473 NR Description: ASF/SF2 homolog [Arabidopsis thaliana]
  misc_feature (1)..(264): Homolog of NCBI NO: 30678395 NR Description: pre-mRNA splicing factor SF2 (SR1 protein)
  misc_feature (1)..(264): Homolog of NCBI NO: 5815236 NR Description: splicing factor SR1B [Arabidopsis thaliana]
  misc_feature (1)..(264): Homolog of NCBI NO: 5815237 NR Description: splicing factor SR1C [Arabidopsis thaliana]
  misc_feature (1)..(270): Homolog of NCBI NO: 30679143 NR Description: arginine/serine-rich splicing factor (atSRp34),
MSGRFSRSIYVGNLPGDIREHEIEDIFYKYGRIVDIELKVPPRPPCYCFVEFEHSRDAEDAIKGRDGYNLDGCRLRVELAHGGRGQSSSDRRGGYGGGGSGYGGGGGGGGSARFGVSRHSEFRVIVRGLPSSASWQDLKDHMRKAGDVCFAEVTRDSDGTYGVVDYTNYDDMKYAIRKLDDTEFRNPWARGFIRVKKYESSRSRSRSPSRSRSRSRSRSRSRGRGRSHSRSRSLSRSKSPRKDLSKSPRRSLSRSISKSRSPSPDKKKSPPRQVFCPSFGNVEIKVQVQVQIEVSVQISSQGSRRQCVILLSGENGQKKECEKFSSQDPFSVFFFLLFSDN

SEQ ID NO: 90478 - protein, 200 aa, Arabidopsis thaliana
  peptide (1)..(200): Ceres Seq. ID no. 12724070
  misc_feature (1)..(200): Homolog of NCBI NO: 22331714 NR Description: arginine/serine-rich splicing factor (atSRp34),
  misc_feature (1)..(131): Homolog of NCBI NO: 12324445 NR Description: putative splicing factor; 53460-55514
  misc_feature (1)..(38): Homolog of NCBI NO: 11346384 NR Description: PRE-MRNA SPLICING FACTOR SF2-like protein -
  misc_feature (1)..(131): Homolog of NCBI NO: 30678391 NR Description: pre-mRNA splicing factor SF2 (SR1 protein)
  misc_feature (1)..(131): Homolog of NCBI NO: 5815235 NR Description: splicing factor SR1 [Arabidopsis thaliana]
  misc_feature (1)..(123): Homolog of NCBI NO: 2443473 NR Description: ASF/SF2 homolog [Arabidopsis thaliana]
  misc_feature (1)..(123): Homolog of NCBI NO: 30678395 NR Description: pre-mRNA splicing factor SF2 (SR1 protein)
  misc_feature (1)..(123): Homolog of NCBI NO: 5815236 NR Description: splicing factor SR1B [Arabidopsis thaliana]
  misc_feature (1)..(123): Homolog of NCBI NO: 5815237 NR Description: splicing factor SR1C [Arabidopsis thaliana]
  misc_feature (1)..(129): Homolog of NCBI NO: 30679143 NR Description: arginine/serine-rich splicing factor (atSRp34),
MRKAGDVCFAEVTRDSDGTYGVVDYTNYDDMKYAIRKLDDTEFRNPWARGFIRVKKYESSRSRSRSPSRSRSRSRSRSRSRGRGRSHSRSRSLSRSKSPRKDLSKSPRRSLSRSISKSRSPSPDKKKSPPRQVFCPSFGNVEIKVQVQVQIEVSVQISSQGSRRQCVILLSGENGQKKECEKFSSQDPFSVFFFLLFSDN

SEQ ID NO: 90479 - protein, 170 aa, Arabidopsis thaliana
  peptide (1)..(170): Ceres Seq. ID no. 12724071
  misc_feature (1)..(170): Homolog of NCBI NO: 22331714 NR Description: arginine/serine-rich splicing factor (atSRp34),
  misc_feature (1)..(101): Homolog of NCBI NO: 12324445 NR Description: putative splicing factor; 53460-55514
  misc_feature (1)..(101): Homolog of NCBI NO: 30678391 NR Description: pre-mRNA splicing factor SF2 (SR1 protein)
  misc_feature (1)..(101): Homolog of NCBI NO: 5815235 NR Description: splicing factor SR1 [Arabidopsis thaliana]
  misc_feature (1)..(93): Homolog of NCBI NO: 2443473 NR Description: ASF/SF2 homolog [Arabidopsis thaliana]
  misc_feature (1)..(93): Homolog of NCBI NO: 30678395 NR Description: pre-mRNA splicing factor SF2 (SR1 protein)
  misc_feature (1)..(93): Homolog of NCBI NO: 5815236 NR Description: splicing factor SR1B [Arabidopsis thaliana]
  misc_feature (1)..(93): Homolog of NCBI NO: 5815237 NR Description: splicing factor SR1C [Arabidopsis thaliana]
  misc_feature (1)..(99): Homolog of NCBI NO: 30679143 NR Description: arginine/serine-rich splicing factor (atSRp34),
  misc_feature (1)..(101): Homolog of NCBI NO: 33146854 NR Description: putative pre-mRNA splicing factor SF2 [Oryza
MKYAIRKLDDTEFRNPWARGFIRVKKYESSRSRSRSPSRSRSRSRSRSRSRGRGRSHSRSRSLSRSKSPRKDLSKSPRRSLSRSISKSRSPSPDKKKSPPRQVFCPSFGNVEIKVQVQVQIEVSVQISSQGSRRQCVILLSGENGQKKECEKFSSQDPFSVFFFLLFSDN

SEQ ID NO: 90480 - DNA, 1799 bp, Arabidopsis thaliana
  misc_feature (1)..(1799): Ceres Seq. ID no. 12724084
  misc_feature: MA Experiment ID: 20000314 Result: Down-regulated in Transcription
  misc_feature: MA Experiment 20000314 PARAMETER Experiment Name: At_14day_Shoots-Roots_Sub_P Parameter: Age (day) Value: 14
  misc_feature: MA Experiment 20000314 PARAMETER Experiment Name: At_14day_Shoots-Roots_Sub_P Parameter: Organism Value: A. thaliana
  misc_feature: MA Experiment 20000314 PARAMETER Experiment Name: At_14day_Shoots-Roots_Sub_P Parameter: Plant Line Value: WS
  misc_feature: MA Experiment 20000314 PARAMETER Experiment Name: At_14day_Shoots-Roots_Sub_P Parameter: Tissue Value: Roots vs. Whole Plant
  misc_feature: MA Experiment ID: 20000315 Result: Down-regulated in Transcription
  misc_feature: MA Experiment 20000315 PARAMETER Experiment Name: At_14day_Shoots-Roots_Sub_P Parameter: Age (day) Value: 14
  misc_feature: MA Experiment 20000315 PARAMETER Experiment Name: At_14day_Shoots-Roots_Sub_P Parameter: Organism Value: A. thaliana
  misc_feature: MA Experiment 20000315 PARAMETER Experiment Name: At_14day_Shoots-Roots_Sub_P Parameter: Plant Line Value: WS
  misc_feature: MA Experiment 20000315 PARAMETER Experiment Name: At_14day_Shoots-Roots_Sub_P Parameter: Tissue Value: Shoots vs. Whole Plant
  misc_feature: MA Experiment ID: 20000346 Result: Up-regulated in Transcription
  misc_feature: MA Experiment 20000346 PARAMETER Experiment Name: At_2mM_SA_Sub_P Parameter: Age (day) Value: 14
  misc_feature: MA Experiment 20000346 PARAMETER Experiment Name: At_2mM_SA_Sub_P Parameter: Organism Value: A. thaliana
  misc_feature: MA Experiment 20000346 PARAMETER Experiment Name: At_2mM_SA_Sub_P Parameter: Plant Line Value: WS
  misc_feature: MA Experiment 20000346 PARAMETER Experiment Name: At_2mM_SA_Sub_P Parameter: Timepoint (hr) Value: 1
  misc_feature: MA Experiment 20000346 PARAMETER Experiment Name: At_2mM_SA_Sub_P Parameter: Tissue Value: Aerial
  misc_feature: MA Experiment 20000346 PARAMETER Experiment Name: At_2mM_SA_Sub_P Parameter: Treatment Value: 2mM SA vs. No Treatment
  misc_feature: MA Experiment ID: 20000347 Result: Up-regulated in Transcription
  misc_feature: MA Experiment 20000347 PARAMETER Experiment Name: At_2mM_SA_Sub_P Parameter: Age (day) Value: 14
  misc_feature: MA Experiment 20000347 PARAMETER Experiment Name: At_2mM_SA_Sub_P Parameter: Organism Value: A. thaliana
  misc_feature: MA Experiment 20000347 PARAMETER Experiment Name: At_2mM_SA_Sub_P Parameter: Plant Line Value: WS
  misc_feature: MA Experiment 20000347 PARAMETER Experiment Name: At_2mM_SA_Sub_P Parameter: Timepoint (hr) Value: 6
  misc_feature: MA Experiment 20000347 PARAMETER Experiment Name: At_2mM_SA_Sub_P Parameter: Tissue Value: Aerial
  misc_feature: MA Experiment 20000347 PARAMETER Experiment Name: At_2mM_SA_Sub_P Parameter: Treatment Value: 2mM SA vs. No Treatment
  misc_feature: MA Experiment ID: 20000355 Result: Down-regulated in Transcription
  misc_feature: MA Experiment 20000355 PARAMETER Experiment Name: At_Siliques_Sub_P Parameter: Age (day) Value: 21
  misc_feature: MA Experiment 20000355 PARAMETER Experiment Name: At_Siliques_Sub_P Parameter: Organism Value: A. thaliana
  misc_feature: MA Experiment 20000355 PARAMETER Experiment Name: At_Siliques_Sub_P Parameter: Plant Line Value: WS
  misc_feature: MA Experiment 20000355 PARAMETER Experiment Name: At_Siliques_Sub_P Parameter: Tissue Value: Less Than 5mm Siliques vs. Whole Plant
  misc_feature: MA Experiment ID: 20000440 Result: Down-regulated in Transcription
  misc_feature: MA Experiment 20000440 PARAMETER Experiment Name: At_Closed-Flower__Sub_P Parameter: Tissue Value: Closed Flower vs. Whole Plant
  misc_feature: MA Experiment ID: 20000634 Result: Up-regulated in Transcription
  misc_feature: MA Experiment 20000634 PARAMETER Experiment Name: At_10percent_PEG_Sub_P Parameter: Age (day) Value: 12
  misc_feature: MA Experiment 20000634 PARAMETER Experiment Name: At_10percent_PEG_Sub_P Parameter: Organism Value: A. thaliana
  misc_feature: MA Experiment 20000634 PARAMETER Experiment Name: At_10percent_PEG_Sub_P Parameter: Plant Line Value: WS
  misc_feature: MA Experiment 20000634 PARAMETER Experiment Name: At_10percent_PEG_Sub_P Parameter: Timepoint (day) Value: 12
  misc_feature: MA Experiment 20000634 PARAMETER Experiment Name: At_10percent_PEG_Sub_P Parameter: Tissue Value: Whole Plant
  misc_feature: MA Experiment 20000634 PARAMETER Experiment Name: At_10percent_PEG_Sub_P Parameter: Treatment Value: 10% PEG vs. No Treatment
acatctgccttcttcttcactttaccaaaatcatcgaatccatttttagggtttttgttttctctctaaatttttattgttatcttcttcgcgataccttggaatcgcatctctgagatagataaataattctgattcgtatctttaaatcttgggttcttcttcttctcgcgattcgtttaaaagagcagcatcaatgaatcagaatcttcatgtattatcaatggattcgttaccagttggattaagattccgtccaacagacgaggagctaatccgttactatctccgtaggaaaatcaacggtcacgatgacgacgtcaaagctatccgtgagatcgatatttgcaaatgggaaccttgggatttacctgatttttctgtgatcaaaactaaagactcagagtggctctacttctgtccattggatcggaagtatccgagtggaagtagacagaaccgggcaacagttgcagggtactggaaagccacaggaaaagaccggaagataaaatccggtaagactaacattattggtgtgaagagaactctagttttccacgcgggtagagctcctagggggacacgaaccaattggattattcatgagtatcgtgccacggaggatgatcttagtggtaccaatcctggccagagtccgtttgttatatgcaaattgttcaagaaagaagaactggttttaggggaagaagattcgaagtcagatgaagttgaagaacctgctgtctcgtctccaactgtcgaagtgactaagtcagaagtatctgaggtaattaaaacagaagacgtgaagcgtcatgacatagcagaatcttctcttgtaatctctggagattctcatagtgatgcttgtgatgaggctacaaccgcagagcttgtagattttaaatggtatccggaattggagtccttagatttcacgctgttctctccattacactctcaagtccaatctgagcttggatcctcttacaacacattccagcctggctcgagtaatttttcagggaacaacaacaacagcttccaaatccagactcagtatggtacaaatgaagtagatacgtatatatctgattttcttgattcgattctcaagagcccagacgaggatccagagaagcacaagtatgttttgcaaagtggttttgatgttgtagcaccagatcagattgcgcaagtgtgtcaacagggctcagcagttgacatgagcaatgatgtttcagtgacgggtatccagattaagagtcgccaggcacaaccctcaggttataccaatgactatatagcgcagggaaatggtccaagaaggctgcgtctgcaaagtaactttaatggcattaacacgaagaatcctgagcttcaagctataaagagagaggctgaggacacggttggagaaagtataaagaaaaggtgtggaaagctaatgagatcaaagaacgtgaccggttttgtgtttaaaaagattacgtcggtgaaatgttcatatggaggactctttagggcggcagtagttgcagttgtgttcttgatgtcagtctgcagtctaaccgtcgacttcagagcatctgcagtgtcctgaaaactgaaactttttgtaaatatagtgcttgaaccggcccgtgtttttgcttctgttattggtttcaggctttcgccagtttataagatatatttgtttgtagtttttacatgtagttaggctgcttatgtaaacgttatgatgacagagaggtcaagactctatttacttctttgacttattagagttcttc

SEQ ID NO: 90481 - protein, 469 aa, Arabidopsis thaliana
  peptide (1)..(469): Ceres Seq. ID no. 12724085
  misc_feature (13)..(142): Pfam Name: No apical meristem (NAM) protein Pfam Description: No apical meristem (NAM) protein
  misc_feature (1)..(469): Homolog of NCBI NO: 15229161 NR Description: NAC2-like protein; protein id: At3g49530.1,
  misc_feature (1)..(459): Homolog of NCBI NO: 30689531 NR Description: No apical meristem (NAM) protein family thaliana] >gi|9408601|gb|AAF87300.1|AF281062_1 TIP [Arabidopsis
  misc_feature (10)..(244): Homolog of NCBI NO: 21358787 NR Description: nam-like protein 1 [Petunia x hybrida]
  misc_feature (220)..(391): Homolog of NCBI NO: 21358787 NR Description: nam-like protein 1 [Petunia x hybrida]
  misc_feature (8)..(233): Homolog of NCBI NO: 7486659 NR Description: hypothetical protein F8D20.90 - Arabidopsis
  misc_feature (7)..(164): Homolog of NCBI NO: 6910587 NR Description: CDS [Arabidopsis thaliana]
  misc_feature (7)..(164): Homolog of NCBI NO: 30692812 NR Description: No apical meristem (NAM) protein family
  misc_feature (12)..(222): Homolog of NCBI NO: 21105751 NR Description: nam-like protein 11 [Petunia x hybrida]
  misc_feature (13)..(302): Homolog of NCBI NO: 15237469 NR Description: NAM-like; protein id: At5g46590.1 [Arabidopsis
  misc_feature (12)..(257): Homolog of NCBI NO: 15218843 NR Description: jasmonic acid, putative; protein id: At1g65910.1
MNQNLHVLSMDSLPVGLRFRPTDEELIRYYLRRKINGHDDDVKAIREIDICKWEPWDLPDFSVIKTKDSEWLYFCPLDRKYPSGSRQNRATVAGYWKATGKDRKIKSGKTNIIGVKRTLVFHAGRAPRGTRTNWIIHEYRATEDDLSGTNPGQSPFVICKLFKKEELVLGEEDSKSDEVEEPAVSSPTVEVTKSEVSEVIKTEDVKRHDIAESSLVISGDSHSDACDEATTAELVDFKWYPELESLDFTLFSPLHSQVQSELGSSYNTFQPGSSNFSGNNNNSFQIQTQYGTNEVDTYISDFLDSILKSPDEDPEKHKYVLQSGFDVVAPDQIAQVCQQGSAVDMSNDVSVTGIQIKSRQAQPSGYTNDYIAQGNGPRRLRLQSNFNGINTKNPELQAIKREAEDTVGESIKKRCGKLMRSKNVTGFVFKKITSVKCSYGGLFRAAVVAVVFLMSVCSLTVDFRASAVS

SEQ ID NO: 90482 - protein, 460 aa, Arabidopsis thaliana
  peptide (1)..(460): Ceres Seq. ID no. 12724086
  misc_feature (4)..(133): Pfam Name: No apical meristem (NAM) protein Pfam Description: No apical meristem (NAM) protein
  misc_feature (1)..(460): Homolog of NCBI NO: 15229161 NR Description: NAC2-like protein; protein id: At3g49530.1,
  misc_feature (1)..(450): Homolog of NCBI NO: 30689531 NR Description: No apical meristem (NAM) protein family thaliana] >gi|9408601|gb|AAF87300.1|AF281062_1 TIP [Arabidopsis
  misc_feature (1)..(235): Homolog of NCBI NO: 21358787 NR Description: nam-like protein 1 [Petunia x hybrida]
  misc_feature (211)..(382): Homolog of NCBI NO: 21358787 NR Description: nam-like protein 1 [Petunia x hybrida]
  misc_feature (1)..(224): Homolog of NCBI NO: 7486659 NR Description: hypothetical protein F8D20.90 - Arabidopsis
  misc_feature (1)..(155): Homolog of NCBI NO: 6910587 NR Description: CDS [Arabidopsis thaliana]
  misc_feature (1)..(155): Homolog of NCBI NO: 30692812 NR Description: No apical meristem (NAM) protein family
  misc_feature (3)..(213): Homolog of NCBI NO: 21105751 NR Description: nam-like protein 11 [Petunia x hybrida]
  misc_feature (4)..(293): Homolog of NCBI NO: 15237469 NR Description: NAM-like; protein id: At5g46590.1 [Arabidopsis
  misc_feature (3)..(248): Homolog of NCBI NO: 15218843 NR Description: jasmonic acid, putative; protein id: At1g65910.1
MDSLPVGLRFRPTDEELIRYYLRRKINGHDDDVKAIREIDICKWEPWDLPDFSVIKTKDSEWLYFCPLDRKYPSGSRQNRATVAGYWKATGKDRKIKSGKTNIIGVKRTLVFHAGRAPRGTRTNWIIHEYRATEDDLSGTNPGQSPFVICKLFKKEELVLGEEDSKSDEVEEPAVSSPTVEVTKSEVSEVIKTEDVKRHDIAESSLVISGDSHSDACDEATTAELVDFKWYPELESLDFTLFSPLHSQVQSELGSSYNTFQPGSSNFSGNNNNSFQIQTQYGTNEVDTYISDFLDSILKSPDEDPEKHKYVLQSGFDVVAPDQIAQVCQQGSAVDMSNDVSVTGIQIKSRQAQPSGYTNDYIAQGNGPRRLRLQSNFNGINTKNPELQAIKREAEDTVGESIKKRCGKLMRSKNVTGFVFKKITSVKCSYGGLFRAAVVAVVFLMSVCSLTVDFRASAVS

SEQ ID NO: 90483 - DNA, 2442 bp, Arabidopsis thaliana
  misc_feature (1)..(2442): Ceres Seq. ID no. 12724098
  misc_feature: MA Experiment ID: 20000171 Result: Up-regulated in Transcription
  misc_feature: MA Experiment 20000171 PARAMETER Experiment Name: At_42deg_Heat_P Parameter: Age (day) Value: 14
  misc_feature: MA Experiment 20000171 PARAMETER Experiment Name: At_42deg_Heat_P Parameter: Organism Value: A. thaliana
  misc_feature: MA Experiment 20000171 PARAMETER Experiment Name: At_42deg_Heat_P Parameter: Plant Line Value: WS
  misc_feature: MA Experiment 20000171 PARAMETER Experiment Name: At_42deg_Heat_P Parameter: Temperature (deg C) Value: 42 vs. 22
  misc_feature: MA Experiment 20000171 PARAMETER Experiment Name: At_42deg_Heat_P Parameter: Timepoint (hr) Value: 1
  misc_feature: MA Experiment 20000171 PARAMETER Experiment Name: At_42deg_Heat_P Parameter: Tissue Value: Aerial
  misc_feature: MA Experiment ID: 20000286 Result: Down-regulated in Transcription
  misc_feature: MA Experiment 20000286 PARAMETER Experiment Name: At_Open_Flower_P Parameter: Age (day) Value: 21
  misc_feature: MA Experiment 20000286 PARAMETER Experiment Name: At_Open_Flower_P Parameter: Plant Line Value: WS
  misc_feature: MA Experiment 20000286 PARAMETER Experiment Name: At_Open_Flower_P Parameter: Tissue Value: Half Open vs. Whole Plant
  misc_feature: MA Experiment ID: 20000437 Result: Up-regulated in Transcription
  misc_feature: MA Experiment 20000437 PARAMETER Experiment Name: At_Drought_P Parameter: Age (day) Value: 8
  misc_feature: MA Experiment 20000437 PARAMETER Experiment Name: At_Drought_P Parameter: Organism Value: A. thaliana
  misc_feature: MA Experiment 20000437 PARAMETER Experiment Name: At_Drought_P Parameter: Plant Line Value: WS
  misc_feature: MA Experiment 20000437 PARAMETER Experiment Name: At_Drought_P Parameter: Timepoint (hr) Value: 24
  misc_feature: MA Experiment 20000437 PARAMETER Experiment Name: At_Drought_P Parameter: Tissue Value: Whole Plant
  misc_feature: MA Experiment 20000437 PARAMETER Experiment Name: At_Drought_P Parameter: Treatment Value: Drought vs. No Drought
  misc_feature: MA Experiment ID: 20000439 Result: Up-regulated in Transcription
  misc_feature: MA Experiment 20000439 PARAMETER Experiment Name: At_Roots__P Parameter: Age (day) Value: 14 vs. 21
  misc_feature: MA Experiment 20000439 PARAMETER Experiment Name: At_Roots__P Parameter: Organism Value: A. thaliana
  misc_feature: MA Experiment 20000439 PARAMETER Experiment Name: At_Roots__P Parameter: Tissue Value: Roots vs. Whole Plant
  misc_feature: MA Experiment ID: 20000496 Result: Down-regulated in Transcription
  misc_feature: MA Experiment 20000496 PARAMETER Experiment Name: At_Guard_Cells_P Parameter: Harvest Date Value: 7/19/2002
  misc_feature: MA Experiment 20000496 PARAMETER Experiment Name: At_Guard_Cells_P Parameter: Organism Value: Canola
  misc_feature: MA Experiment 20000496 PARAMETER Experiment Name: At_Guard_Cells_P Parameter: Tissue Value: Guard Cells vs. Leaves
atgccaagcattagagctccagctgcgaagaagaccactacactcacggttgctgtgaaatgtagaccgttaatggagaaagaacgtggtagagacattgttcgagtgaataactctaaggaagtggttgtgttagacccagacttatccaaggattatcttgaccgaattcagaatcggactaaagagaagaaatattgttttgatcatgcttttggacctgagagcaccaacaagaatgtgtataggagtatgtcttctgtgatctctagtgttgttcatggactcaatgctacagtttttgcctatggttccactggaagtggcaaaacatatacaatggttggaactcgaagtgatcctggattgatggttctcagcttgaatactatttttgatatgatcaagagtgacaagagctcagatgagtttgaagtgacttgctcatatcttgaagtttacaatgaagttatctacgatctgcttgaaaaatcctctggtcatttagagcttagagaggatccagagcagggaatagtagttgcaggcctgcgatcaataaaggtccattctgctgataggattcttgagctgctgaacttggggaacagtagacgaaaaactgagagcacagagatgaatggaacatcatcaaggtctcatgcagttctagagattgcagtcaaaagaaggcaaaagaatcaaaatcaagtcatgagagggaaactcgcccttgtagatcttgctgggagtgaaagagctgctgagacaaacaatggaggtcaaaaattgagggatggagcaaatatcaatcgctcactccttgcactagcaaattgcataaatgctttggggaagcaacacaaaaagggtcttgcttatgtaccataccgaaacagcaaacttacgcggattctcaaagatggtctgagtgggaactcccagacagtgatggttgcaactatatcacctgctgatagtcagtatcatcatactgtaaacacattgaaatatgctgaccgagcaaaagagattaagacacacatccagaaaaatattggtaccatcgatactcatatgtcagactaccaacgaatgatcgacaatcttcaaagtgaggtttctcagctgaagacacaactagctgaaaaagagtcgcagctaagcatcaaaccttttgaaagaggtgttgaacgtgaactttcttggttggatggtttaagccaccagatcagtgaaaatgttcaagaccgtataaacttacagaaggcgttatttgagcttgaggaaactaacctcagaaatcgcactgaacttcagcatcttgatgatgcaattgcgaaacaggcgacagagaaagatgttgtcgaagctctaagtagcagacgacaagtaatacttgataatatccgcgacaatgatgaagccggtgttaactaccagagggatattgaagaaaatgaaaaacatcgttgcgaactacaggatatgctcaatgaagcaataaataacaatggaaacaaaacgtatctgcatattcttaatcagtataagctcctggggatgggtaatacggaactacagtttgaaatggcaatgagggaccaaattatttacaaccaaagggaagcccagagaaacctatggaatttgctcatgggtttaggagttgaagagaaacaagtgttcgatctcgctgcaaaacaaggaatcacaatcgaagactggagtagtatagcgttgtttccaggacttccttaccggaaacagacaccgagtttcataccagcaaacatccctttcgtgggccactcatattctaaatcctcctgcactttccagagctatcaagacccttcttcgaaaggacaacaatgggctccaactcctactttatgcagagaagaacaccacagctcttactacttcatgagacaggagccaccagcatttgtcaatcttaggaaaagccacgatggttgggttggtggcagcagaccagcttcacggattgacacaggaggcaatcatcgccgagtctcatatccacaaactgtgaacaattcttctcctcggatggcctcaggtcctactttttaccagactcctcaaagggaaatgttgctcaacacaacgagtccttatagtagtccgcgagtgggactcatcaacggggccaccaccccgtccgtgcaacctttctatggaagtcctcgtgccgtgactgtgagaaacggttcatacaacactccactcgcccccgctgcagtttcaactaaaggtgcgagaaaccaacaacgagtgtttggaacgagcccactctcaggaaccaaaggcgtcaagaactcttcatatggacagaacagtcacacaaagttgtacagaggaggaggcactaaaggtcacagtaaaggaaacaatactcaacgccaacaccaatga

SEQ ID NO: 90484 - protein, 813 aa, Arabidopsis thaliana
  peptide (1)..(813): Ceres Seq. ID no. 12724099
  misc_feature (1)..(700): Homolog of NCBI NO: 34896882 NR Description: putative kinesin-like protein [Oryza sativa
  misc_feature (1)..(371): Homolog of NCBI NO: 21539527 NR Description: kinesin-like protein [Arabidopsis thaliana]
  misc_feature (12)..(498): Homolog of NCBI NO: 23489919 NR Description: kinesin-like protein-related [Plasmodium yoelii
  misc_feature (11)..(438): Homolog of NCBI NO: 28277259 NR Description: Similar to hypothetical protein FLJ37300 [Xenopus
  misc_feature (12)..(385): Homolog of NCBI NO: 23613466 NR Description: kinesin, putative [Plasmodium falciparum 3D7]
  misc_feature (11)..(442): Homolog of NCBI NO: 23397458 NR Description: hypothetical protein FLJ37300 [Homo sapiens]
  misc_feature (17)..(561): Homolog of NCBI NO: 28838703 NR Description: Similar to hypothetical protein DKFZp434G2226
  misc_feature (2)..(307): Homolog of NCBI NO: 34871266 NR Description: similar to D5Wsu45e protein [Rattus norvegicus]
  misc_feature (307)..(442): Homolog of NCBI NO: 34871266 NR Description: similar to D5Wsu45e protein [Rattus norvegicus]
  misc_feature (55)..(381): Homolog of NCBI NO: 37544008 NR Description: similar to kinesin family member 18A; kinesin
MPSIRAPAAKKTTTLTVAVKCRPLMEKERGRDIVRVNNSKEVVVLDPDLSKDYLDRIQNRTKEKKYCFDHAFGPESTNKNVYRSMSSVISSVVHGLNATVFAYGSTGSGKTYTMVGTRSDPGLMVLSLNTIFDMIKSDKSSDEFEVTCSYLEVYNEVIYDLLEKSSGHLELREDPEQGIVVAGLRSIKVHSADRILELLNLGNSRRKTESTEMNGTSSRSHAVLEIAVKRRQKNQNQVMRGKLALVDLAGSERAAETNNGGQKLRDGANINRSLLALANCINALGKQHKKGLAYVPYRNSKLTRILKDGLSGNSQTVMVATISPADSQYHHTVNTLKYADRAKEIKTHIQKNIGTIDTHMSDYQRMIDNLQSEVSQLKTQLAEKESQLSIKPFERGVERELSWLDGLSHQISENVQDRINLQKALFELEETNLRNRTELQHLDDAIAKQATEKDVVEALSSRRQVILDNIRDNDEAGVNYQRDIEENEKHRCELQDMLNEAINNNGNKTYLHILNQYKLLGMGNTELQFEMAMRDQIIYNQREAQRNLWNLLMGLGVEEKQVFDLAAKQGITIEDWSSIALFPGLPYRKQTPSFIPANIPFVGHSYSKSSCTFQSYQDPSSKGQQWAPTPTLCREEHHSSYYFMRQEPPAFVNLRKSHDGWVGGSRPASRIDTGGNHRRVSYPQTVNNSSPRMASGPTFYQTPQREMLLNTTSPYSSPRVGLINGATTPSVQPFYGSPRAVTVRNGSYNTPLAPAAVSTKGARNQQRVFGTSPLSGTKGVKNSSYGQNSHTKLYRGGGTKGHSKGNNTQRQHQ

SEQ ID NO: 90485 - protein, 789 aa, Arabidopsis thaliana
  peptide (1)..(789): Ceres Seq. ID no. 12724100
  misc_feature (1)..(676): Homolog of NCBI NO: 34896882 NR Description: putative kinesin-like protein [Oryza sativa
  misc_feature (1)..(347): Homolog of NCBI NO: 21539527 NR Description: kinesin-like protein [Arabidopsis thaliana]
  misc_feature (1)..(474): Homolog of NCBI NO: 23489919 NR Description: kinesin-like protein-related [Plasmodium yoelii
  misc_feature (1)..(414): Homolog of NCBI NO: 28277259 NR Description: Similar to hypothetical protein FLJ37300 [Xenopus
  misc_feature (1)..(361): Homolog of NCBI NO: 23613466 NR Description: kinesin, putative [Plasmodium falciparum 3D7]
  misc_feature (1)..(418): Homolog of NCBI NO: 23397458 NR Description: hypothetical protein FLJ37300 [Homo sapiens]
  misc_feature (1)..(537): Homolog of NCBI NO: 28838703 NR Description: Similar to hypothetical protein DKFZp434G2226
  misc_feature (1)..(283): Homolog of NCBI NO: 34871266 NR Description: similar to D5Wsu45e protein [Rattus norvegicus]
  misc_feature (283)..(418): Homolog of NCBI NO: 34871266 NR Description: similar to D5Wsu45e protein [Rattus norvegicus]
  misc_feature (31)..(357): Homolog of NCBI NO: 37544008 NR Description: similar to kinesin family member 18A; kinesin
MEKERGRDIVRVNNSKEVVVLDPDLSKDYLDRIQNRTKEKKYCFDHAFGPESTNKNVYRSMSSVISSVVHGLNATVFAYGSTGSGKTYTMVGTRSDPGLMVLSLNTIFDMIKSDKSSDEFEVTCSYLEVYNEVIYDLLEKSSGHLELREDPEQGIVVAGLRSIKVHSADRILELLNLGNSRRKTESTEMNGTSSRSHAVLEIAVKRRQKNQNQVMRGKLALVDLAGSERAAETNNGGQKLRDGANINRSLLALANCINALGKQHKKGLAYVPYRNSKLTRILKDGLSGNSQTVMVATISPADSQYHHTVNTLKYADRAKEIKTHIQKNIGTIDTHMSDYQRMIDNLQSEVSQLKTQLAEKESQLSIKPFERGVERELSWLDGLSHQISENVQDRINLQKALFELEETNLRNRTELQHLDDAIAKQATEKDVVEALSSRRQVILDNIRDNDEAGVNYQRDIEENEKHRCELQDMLNEAINNNGNKTYLHILNQYKLLGMGNTELQFEMAMRDQIIYNQREAQRNLWNLLMGLGVEEKQVFDLAAKQGITIEDWSSIALFPGLPYRKQTPSFIPANIPFVGHSYSKSSCTFQSYQDPSSKGQQWAPTPTLCREEHHSSYYFMRQEPPAFVNLRKSHDGWVGGSRPASRIDTGGNHRRVSYPQTVNNSSPRMASGPTFYQTPQREMLLNTTSPYSSPRVGLINGATTPSVQPFYGSPRAVTVRNGSYNTPLAPAAVSTKGARNQQRVFGTSPLSGTKGVKNSSYGQNSHTKLYRGGGTKGHSKGNNTQRQHQ

SEQ ID NO: 90486 - protein, 729 aa, Arabidopsis thaliana
  peptide (1)..(729): Ceres Seq. ID no. 12724101
  misc_feature (1)..(616): Homolog of NCBI NO: 34896882 NR Description: putative kinesin-like protein [Oryza sativa
  misc_feature (1)..(287): Homolog of NCBI NO: 21539527 NR Description: kinesin-like protein [Arabidopsis thaliana]
  misc_feature (1)..(414): Homolog of NCBI NO: 23489919 NR Description: kinesin-like protein-related [Plasmodium yoelii
  misc_feature (1)..(354): Homolog of NCBI NO: 28277259 NR Description: Similar to hypothetical protein FLJ37300 [Xenopus
  misc_feature (1)..(301): Homolog of NCBI NO: 23613466 NR Description: kinesin, putative [Plasmodium falciparum 3D7]
  misc_feature (1)..(358): Homolog of NCBI NO: 23397458 NR Description: hypothetical protein FLJ37300 [Homo sapiens]
  misc_feature (1)..(477): Homolog of NCBI NO: 28838703 NR Description: Similar to hypothetical protein DKFZp434G2226
  misc_feature (1)..(223): Homolog of NCBI NO: 34871266 NR Description: similar to D5Wsu45e protein [Rattus norvegicus]
  misc_feature (223)..(358): Homolog of NCBI NO: 34871266 NR Description: similar to D5Wsu45e protein [Rattus norvegicus]
  misc_feature (1)..(297): Homolog of NCBI NO: 37544008 NR Description: similar to kinesin family member 18A; kinesin
MSSVISSVVHGLNATVFAYGSTGSGKTYTMVGTRSDPGLMVLSLNTIFDMIKSDKSSDEFEVTCSYLEVYNEVIYDLLEKSSGHLELREDPEQGIVVAGLRSIKVHSADRILELLNLGNSRRKTESTEMNGTSSRSHAVLEIAVKRRQKNQNQVMRGKLALVDLAGSERAAETNNGGQKLRDGANINRSLLALANCINALGKQHKKGLAYVPYRNSKLTRILKDGLSGNSQTVMVATISPADSQYHHTVNTLKYADRAKEIKTHIQKNIGTIDTHMSDYQRMIDNLQSEVSQLKTQLAEKESQLSIKPFERGVERELSWLDGLSHQISENVQDRINLQKALFELEETNLRNRTELQHLDDAIAKQATEKDVVEALSSRRQVILDNIRDNDEAGVNYQRDIEENEKHRCELQDMLNEAINNNGNKTYLHILNQYKLLGMGNTELQFEMAMRDQIIYNQREAQRNLWNLLMGLGVEEKQVFDLAAKQGITIEDWSSIALFPGLPYRKQTPSFIPANIPFVGHSYSKSSCTFQSYQDPSSKGQQWAPTPTLCREEHHSSYYFMRQEPPAFVNLRKSHDGWVGGSRPASRIDTGGNHRRVSYPQTVNNSSPRMASGPTFYQTPQREMLLNTTSPYSSPRVGLINGATTPSVQPFYGSPRAVTVRNGSYNTPLAPAAVSTKGARNQQRVFGTSPLSGTKGVKNSSYGQNSHTKLYRGGGTKGHSKGNNTQRQHQ

SEQ ID NO: 90487 - DNA, 954 bp, Arabidopsis thaliana
  misc_feature (1)..(954): Ceres Seq. ID no. 12724102
  misc_feature: MA Experiment ID: 20000179 Result: Down-regulated in Transcription
  misc_feature: MA Experiment 20000179 PARAMETER Experiment Name: At_Germinating_Seeds_P Parameter: Age (hr) Value: 6 vs. 0
  misc_feature: MA Experiment 20000179 PARAMETER Experiment Name: At_Germinating_Seeds_P Parameter: Tissue Value: Germinating Seeds
  misc_feature: MA Experiment ID: 20000180 Result: Down-regulated in Transcription
  misc_feature: MA Experiment 20000180 PARAMETER Experiment Name: At_Germinating_Seeds_P Parameter: Age (hr) Value: 24 vs. 0
  misc_feature: MA Experiment 20000180 PARAMETER Experiment Name: At_Germinating_Seeds_P Parameter: Tissue Value: Germinating Seeds
  misc_feature: MA Experiment ID: 20000264 Result: Up-regulated in Transcription
  misc_feature: MA Experiment 20000264 PARAMETER Experiment Name: At_Open_Flower_P Parameter: Age (day) Value: 21
  misc_feature: MA Experiment 20000264 PARAMETER Experiment Name: At_Open_Flower_P Parameter: Plant Line Value: WS
  misc_feature: MA Experiment 20000264 PARAMETER Experiment Name: At_Open_Flower_P Parameter: Tissue Value: Open Flower vs. Whole Plant
  misc_feature: MA Experiment ID: 20001451 Result: Down-regulated in Transcription
  misc_feature: MA Experiment 20001451 PARAMETER Experiment Name: At_Far-red-induction_P Parameter: Age (day) Value: 7
  misc_feature: MA Experiment 20001451 PARAMETER Experiment Name: At_Far-red-induction_P Parameter: Light Value: Far-red vs. White
  misc_feature: MA Experiment 20001451 PARAMETER Experiment Name: At_Far-red-induction_P Parameter: Organism Value: A. thaliana
  misc_feature: MA Experiment 20001451 PARAMETER Experiment Name: At_Far-red-induction_P Parameter: Plant Line Value: Columbia
  misc_feature: MA Experiment 20001451 PARAMETER Experiment Name: At_Far-red-induction_P Parameter: Timepoint (hr) Value: 24
  misc_feature: MA Experiment 20001451 PARAMETER Experiment Name: At_Far-red-induction_P Parameter: Tissue Value: Whole Plant
atggcagaggaaattccagcaacagcatcattcactccatacgtccattcacaaactctaacatctcacaatcgcgccgtctcctccgtgaaattctcctccgatggacgtctcctcgcatccgcctccgccgacaaaacaatccgcacttacacaatcaacaccattaacgatccaatcgccgagcccgtacaagaattcaccggccatgaaaacggtatctccgatgttgcattctcttcagacgcgaggtttatagtctcagcttccgatgacaaaaccttaaagctatgggacgttgaaactggttcattgatcaagacgcttattggacacactaattacgccttctgtgtcaatttcaatcctcaatcaaatatgattgtatctggttcgtttgatgaaactgttcggatctgggatgtcactactggaaagtgtttgaaagttcttcccgcgcattctgatcctgttactgctgttgattttaatagagatgggtctctcattgtttcgagtagctatgatgggttgtgtcgtatatgggattctgggactggtcattgtgtgaaaactctgattgatgatgagaatcctcctgtttcgtttgttagattctctcctaatggcaagtttatcctcgttggtacacttgataacacgctgaggttgtggaacatttcgtctgctaagttcctcaaaacatacactggccacgtgaacgcacagtattgcatttcctctgcgttctccgtcacaaatggaaagcgaatagtcagtggatccgaggacaactgtgtacacatgtgggagctaaactccaagaaactgctacagaaacttgagggtcatactgagaccgtcatgaacgtagcatgccacccgacagagaacttgatcgcatcaggctcgctcgacaagacagtaaggatttggacacagaagaaagaataa

SEQ ID NO: 90488 - protein, 317 aa, Arabidopsis thaliana
  peptide (1)..(317): Ceres Seq. ID no. 12724103
  misc_feature (1)..(317): Homolog of NCBI NO: 15229187 NR Description: G-protein beta-subunit (transducin) family;
  misc_feature (14)..(312): Homolog of NCBI NO: 6714707 NR Description: hypothetical protein [Homo sapiens]
  misc_feature (14)..(312): Homolog of NCBI NO: 16554627 NR Description: WD repeat domain 5 protein; WD-repeat protein 5
  misc_feature (14)..(312): Homolog of NCBI NO: 34853150 NR Description: similar to hypothetical protein [Rattus
  misc_feature (14)..(312): Homolog of NCBI NO: 30353827 NR Description: Unknown (protein for MGC:56591) [Danio rerio]
  misc_feature (7)..(312): Homolog of NCBI NO: 17864654 NR Description: will die slowly CG17437-PA Will die slowly protein >gi|6946677|emb|CAB72292.1| version:''084'',
  misc_feature (14)..(312): Homolog of NCBI NO: 20302740 NR Description: unknown [Branchiostoma floridae]
  misc_feature (2)..(312): Homolog of NCBI NO: 23199987 NR Description: WD repeat domain 5B [Homo sapiens]
  misc_feature (2)..(312): Homolog of NCBI NO: 7023854 NR Description: unnamed protein product [Homo sapiens]
  misc_feature (11)..(314): Homolog of NCBI NO: 15235470 NR Description: G-protein beta family; protein id: At4g02730.1, by cDNA: 41490., supported by cDNA: gi_16612251 [Arabidopsis
MAEEIPATASFTPYVHSQTLTSHNRAVSSVKFSSDGRLLASASADKTIRTYTINTINDPIAEPVQEFTGHENGISDVAFSSDARFIVSASDDKTLKLWDVETGSLIKTLIGHTNYAFCVNFNPQSNMIVSGSFDETVRIWDVTTGKCLKVLPAHSDPVTAVDFNRDGSLIVSSSYDGLCRIWDSGTGHCVKTLIDDENPPVSFVRFSPNGKFILVGTLDNTLRLWNISSAKFLKTYTGHVNAQYCISSAFSVTNGKRIVSGSEDNCVHMWELNSKKLLQKLEGHTETVMNVACHPTENLIASGSLDKTVRIWTQKKE

SEQ ID NO: 90489 - protein, 191 aa, Arabidopsis thaliana
  peptide (1)..(191): Ceres Seq. ID no. 12724104
  misc_feature (1)..(191): Homolog of NCBI NO: 15229187 NR Description: G-protein beta-subunit (transducin) family;
  misc_feature (1)..(186): Homolog of NCBI NO: 6714707 NR Description: hypothetical protein [Homo sapiens]
  misc_feature (1)..(186): Homolog of NCBI NO: 16554627 NR Description: WD repeat domain 5 protein; WD-repeat protein 5
  misc_feature (1)..(186): Homolog of NCBI NO: 34853150 NR Description: similar to hypothetical protein [Rattus
  misc_feature (1)..(186): Homolog of NCBI NO: 30353827 NR Description: Unknown (protein for MGC:56591) [Danio rerio]
  misc_feature (1)..(186): Homolog of NCBI NO: 17864654 NR Description: will die slowly CG17437-PA Will die slowly protein >gi|6946677|emb|CAB72292.1| version:''084'',
  misc_feature (1)..(186): Homolog of NCBI NO: 20302740 NR Description: unknown [Branchiostoma floridae]
  misc_feature (1)..(186): Homolog of NCBI NO: 23199987 NR Description: WD repeat domain 5B [Homo sapiens]
  misc_feature (1)..(186): Homolog of NCBI NO: 7023854 NR Description: unnamed protein product [Homo sapiens]
  misc_feature (1)..(188): Homolog of NCBI NO: 15235470 NR Description: G-protein beta family; protein id: At4g02730.1, by cDNA: 41490., supported by cDNA: gi_16612251 [Arabidopsis
MIVSGSFDETVRIWDVTTGKCLKVLPAHSDPVTAVDFNRDGSLIVSSSYDGLCRIWDSGTGHCVKTLIDDENPPVSFVRFSPNGKFILVGTLDNTLRLWNISSAKFLKTYTGHVNAQYCISSAFSVTNGKRIVSGSEDNCVHMWELNSKKLLQKLEGHTETVMNVACHPTENLIASGSLDKTVRIWTQKKE

SEQ ID NO: 90490 - DNA, 2214 bp, Arabidopsis thaliana
  misc_feature (1)..(2214): Ceres Seq. ID no. 12724109
  misc_feature: MA Experiment ID: 20000307 Result: Down-regulated in Transcription
  misc_feature: MA Experiment 20000307 PARAMETER Experiment Name: At_Germinating_Seeds_Sub_P Parameter: Age (hr) Value: 24 vs. 0
  misc_feature: MA Experiment 20000307 PARAMETER Experiment Name: At_Germinating_Seeds_Sub_P Parameter: Organism Value: A. thaliana
  misc_feature: MA Experiment 20000307 PARAMETER Experiment Name: At_Germinating_Seeds_Sub_P Parameter: Plant Line Value: WS
  misc_feature: MA Experiment 20000307 PARAMETER Experiment Name: At_Germinating_Seeds_Sub_P Parameter: Tissue Value: Germinating Seeds
  misc_feature: MA Experiment ID: 20000328 Result: Down-regulated in Transcription
  misc_feature: MA Experiment 20000328 PARAMETER Experiment Name: At_42deg_Heat_Sub_P Parameter: Age (day) Value: 14
  misc_feature: MA Experiment 20000328 PARAMETER Experiment Name: At_42deg_Heat_Sub_P Parameter: Organism Value: A. thaliana
  misc_feature: MA Experiment 20000328 PARAMETER Experiment Name: At_42deg_Heat_Sub_P Parameter: Plant Line Value: WS
  misc_feature: MA Experiment 20000328 PARAMETER Experiment Name: At_42deg_Heat_Sub_P Parameter: Temperature (deg C) Value: 42 vs. 22
  misc_feature: MA Experiment 20000328 PARAMETER Experiment Name: At_42deg_Heat_Sub_P Parameter: Timepoint (hr) Value: 6
  misc_feature: MA Experiment 20000328 PARAMETER Experiment Name: At_42deg_Heat_Sub_P Parameter: Tissue Value: Aerial
  misc_feature: MA Experiment ID: 20000355 Result: Up-regulated in Transcription
  misc_feature: MA Experiment 20000355 PARAMETER Experiment Name: At_Siliques_Sub_P Parameter: Age (day) Value: 21
  misc_feature: MA Experiment 20000355 PARAMETER Experiment Name: At_Siliques_Sub_P Parameter: Organism Value: A. thaliana
  misc_feature: MA Experiment 20000355 PARAMETER Experiment Name: At_Siliques_Sub_P Parameter: Plant Line Value: WS
  misc_feature: MA Experiment 20000355 PARAMETER Experiment Name: At_Siliques_Sub_P Parameter: Tissue Value: Less Than 5mm Siliques vs. Whole Plant
  misc_feature: MA Experiment ID: 20000440 Result: Up-regulated in Transcription
  misc_feature: MA Experiment 20000440 PARAMETER Experiment Name: At_Closed-Flower__Sub_P Parameter: Tissue Value: Closed Flower vs. Whole Plant
atgagaaaagctctatgtttaacagagagtttatcagccatagcagaaaactctaccacgttgctcaatttaaaccggagactaacgggtctcactcgttccggcgagaacagaaacgctctcaagctcttcgccgatgttcaccgttgcacaactctgagaccagaccagtacagtgtctcgttagctattactacagctaggcacctccgtgatactatctttggtggtcaggttcattgctatgcgattcgctctggtttattgtgtcactctcacgtttccaatacgcttctttcgctatatgagagattagggaacttagcttcgttgaagaagaagttcgacgagattgatgaacctgatgtttattcatggacgacgcttctgagtgcaagttttaagcttggtgatatagagtatgcctttgaggtgtttgataaaatgcctgagagagatgatgttgcgatttggaatgctatgattactggttgcaaagagagtgggtatcacgaaacgagtgttgagttgtttcgagaaatgcataagcttggtgttcgacatgataagtttgggtttgctactattttgagtatgtgtgactatggttctttggattttggtaagcaggtgcattcgctggttataaaagctggattttttattgcttcatctgttgtgaatgcactaattacaatgtatttcaattgccaagtggttgttgatgcttgtctggtgtttgaagaaactgatgttgctgttcgtgatcaggttacttttaatgtggttattgatggtttggctggtttcaaaagagacgagtctttgttggtgtttagaaaaatgctagaagctagtcttagaccaaccgatttgacctttgttagtgttatgggttcatgttcatgtgcggctatgggacaccaagtacatggactagccatcaagacaggttatgagaagtatactttggttagcaatgccactatgacaatgtattcttcttttgaagattttggtgcggctcataaggtttttgagtcattggaagagaaagacttggttacttggaacacaatgatctcaagttataaccaagcgaaattgggcaagtctgcgatgtcggtatacaagagaatgcacataataggagttaaaccggatgagtttacttttggaagtcttttagcaacctctctggatttagatgtcctggagatggttcaagcgtgtataatcaagtttgggcttagttcaaagattgaaatttccaatgcgttgatatctgcctactcgaagaatggacagatagaaaaagctgacctattatttgaaagatctctgaggaagaatcttatctcatggaatgcgataatctcagggttttaccataacgggtttccttttgaaggtttggaaaggttctcgtgcttgctagagtcagaggtccgaatcctacctgatgcttatactctcagtacccttttgagcatttgcgtaagcacttcatctttgatgctcggaagccaaactcacgcttacgtccttagacacggccaattcaaggagacattgataggtaatgccctcataaacatgtactctcaatgcgggactatacaaaactctcttgaagtgttcaatcagatgtctgaaaaagatgttgtgtcatggaattctctgatctctgcatactcgagacacggtgaaggagagaacgcggttaatacctacaagacaatgcaagatgaaggaaaggtcattcccgatgcagccacattctcagcggttctctctgcttgcagccacgccggtttagtggaagagggactcgagattttcaactcaatggtggaatttcacggtgtgatacgaaatgtagatcatttttcatgcttagttgaccttcttggtcgagcgggccacctcgatgaagcggaaagcttggtgaaaatcagcgaaaagaccatcgggtctcgggtagatgtgtggtgggctttgtttagtgcttgtgctgctcatggagatttgaagctagggaagatggttgcgaagttactaatggagaaagagaaggatgatccatcagtttatgttcaactgtccaatatctacgcaggagctggtatgtggaaagaagcagaagagacgagaagagccataaacatgattggagctatgaaacaacgaggttgcagctggatgagattgtaa

SEQ ID NO: 90491 - protein, 737 aa, Arabidopsis thaliana
  peptide (1)..(737): Ceres Seq. ID no. 12724110
  misc_feature (156)..(190): Pfam Name: PPR repeat Pfam Description: PPR repeat
  misc_feature (130)..(737): Homolog of NCBI NO: 15218216 NR Description: hypothetical protein; protein id: At1g15510.1
  misc_feature (8)..(149): Homolog of NCBI NO: 15218216 NR Description: hypothetical protein; protein id: At1g15510.1
  misc_feature (120)..(737): Homolog of NCBI NO: 15228590 NR Description: hypothetical protein; protein id: At3g03580.1 thaliana] >gi|6091764|gb|AAF03474.1|AC009327_13 hypothetical [Arabidopsis thaliana] >gi|28393735|gb|AAO42278.1| unknown
  misc_feature (25)..(149): Homolog of NCBI NO: 15228590 NR Description: hypothetical protein; protein id: At3g03580.1 thaliana] >gi|6091764|gb|AAF03474.1|AC009327_13 hypothetical [Arabidopsis thaliana] >gi|28393735|gb|AAO42278.1| unknown
  misc_feature (120)..(735): Homolog of NCBI NO: 32482936 NR Description: OSJNBb0072M01.1 [Oryza sativa (japonica
  misc_feature (33)..(181): Homolog of NCBI NO: 32482936 NR Description: OSJNBb0072M01.1 [Oryza sativa (japonica
  misc_feature (135)..(735): Homolog of NCBI NO: 30689384 NR Description: pentatricopeptide (PPR) repeat-containing protein thaliana] >gi|30102674|gb|AAP21255.1| At4g32430 [Arabidopsis
  misc_feature (17)..(131): Homolog of NCBI NO: 30689384 NR Description: pentatricopeptide (PPR) repeat-containing protein thaliana] >gi|30102674|gb|AAP21255.1| At4g32430 [Arabidopsis
  misc_feature (122)..(733): Homolog of NCBI NO: 15221304 NR Description: hypothetical protein; protein id: At1g74600.1
  misc_feature (21)..(165): Homolog of NCBI NO: 15221304 NR Description: hypothetical protein; protein id: At1g74600.1
MRKALCLTESLSAIAENSTTLLNLNRRLTGLTRSGENRNALKLFADVHRCTTLRPDQYSVSLAITTARHLRDTIFGGQVHCYAIRSGLLCHSHVSNTLLSLYERLGNLASLKKKFDEIDEPDVYSWTTLLSASFKLGDIEYAFEVFDKMPERDDVAIWNAMITGCKESGYHETSVELFREMHKLGVRHDKFGFATILSMCDYGSLDFGKQVHSLVIKAGFFIASSVVNALITMYFNCQVVVDACLVFEETDVAVRDQVTFNVVIDGLAGFKRDESLLVFRKMLEASLRPTDLTFVSVMGSCSCAAMGHQVHGLAIKTGYEKYTLVSNATMTMYSSFEDFGAAHKVFESLEEKDLVTWNTMISSYNQAKLGKSAMSVYKRMHIIGVKPDEFTFGSLLATSLDLDVLEMVQACIIKFGLSSKIEISNALISAYSKNGQIEKADLLFERSLRKNLISWNAIISGFYHNGFPFEGLERFSCLLESEVRILPDAYTLSTLLSICVSTSSLMLGSQTHAYVLRHGQFKETLIGNALINMYSQCGTIQNSLEVFNQMSEKDVVSWNSLISAYSRHGEGENAVNTYKTMQDEGKVIPDAATFSAVLSACSHAGLVEEGLEIFNSMVEFHGVIRNVDHFSCLVDLLGRAGHLDEAESLVKISEKTIGSRVDVWWALFSACAAHGDLKLGKMVAKLLMEKEKDDPSVYVQLSNIYAGAGMWKEAEETRRAINMIGAMKQRGCSWMRL

SEQ ID NO: 90492 - protein, 589 aa, Arabidopsis thaliana
  peptide (1)..(589): Ceres Seq. ID no. 12724111
  misc_feature (8)..(42): Pfam Name: PPR repeat Pfam Description: PPR repeat
  misc_feature (1)..(589): Homolog of NCBI NO: 15218216 NR Description: hypothetical protein; protein id: At1g15510.1
  misc_feature (1)..(589): Homolog of NCBI NO: 15228590 NR Description: hypothetical protein; protein id: At3g03580.1 thaliana] >gi|6091764|gb|AAF03474.1|AC009327_13 hypothetical [Arabidopsis thaliana] >gi|28393735|gb|AAO42278.1| unknown
  misc_feature (1)..(587): Homolog of NCBI NO: 32482936 NR Description: OSJNBb0072M01.1 [Oryza sativa (japonica
  misc_feature (1)..(33): Homolog of NCBI NO: 32482936 NR Description: OSJNBb0072M01.1 [Oryza sativa (japonica
  misc_feature (1)..(587): Homolog of NCBI NO: 30689384 NR Description: pentatricopeptide (PPR) repeat-containing protein thaliana] >gi|30102674|gb|AAP21255.1| At4g32430 [Arabidopsis
  misc_feature (1)..(585): Homolog of NCBI NO: 15221304 NR Description: hypothetical protein; protein id: At1g74600.1
  misc_feature (1)..(17): Homolog of NCBI NO: 15221304 NR Description: hypothetical protein; protein id: At1g74600.1
  misc_feature (1)..(587): Homolog of NCBI NO: 7486629 NR Description: hypothetical protein F8B4.130 - Arabidopsis >gi|4049345|emb|CAA22570.1| putative protein [Arabidopsis >gi|7270147|emb|CAB79960.1| putative protein [Arabidopsis
  misc_feature (1)..(589): Homolog of NCBI NO: 15226200 NR Description: putative selenium-binding protein; protein id:
  misc_feature (1)..(589): Homolog of NCBI NO: 15236324 NR Description: putative protein; protein id: At4g13650.1
MPERDDVAIWNAMITGCKESGYHETSVELFREMHKLGVRHDKFGFATILSMCDYGSLDFGKQVHSLVIKAGFFIASSVVNALITMYFNCQVVVDACLVFEETDVAVRDQVTFNVVIDGLAGFKRDESLLVFRKMLEASLRPTDLTFVSVMGSCSCAAMGHQVHGLAIKTGYEKYTLVSNATMTMYSSFEDFGAAHKVFESLEEKDLVTWNTMISSYNQAKLGKSAMSVYKRMHIIGVKPDEFTFGSLLATSLDLDVLEMVQACIIKFGLSSKIEISNALISAYSKNGQIEKADLLFERSLRKNLISWNAIISGFYHNGFPFEGLERFSCLLESEVRILPDAYTLSTLLSICVSTSSLMLGSQTHAYVLRHGQFKETLIGNALINMYSQCGTIQNSLEVFNQMSEKDVVSWNSLISAYSRHGEGENAVNTYKTMQDEGKVIPDAATFSAVLSACSHAGLVEEGLEIFNSMVEFHGVIRNVDHFSCLVDLLGRAGHLDEAESLVKISEKTIGSRVDVWWALFSACAAHGDLKLGKMVAKLLMEKEKDDPSVYVQLSNIYAGAGMWKEAEETRRAINMIGAMKQRGCSWMRL

SEQ ID NO: 90493 - protein, 577 aa, Arabidopsis thaliana
  peptide (1)..(577): Ceres Seq. ID no. 12724112
  misc_feature (1)..(30): Pfam Name: PPR repeat Pfam Description: PPR repeat
  misc_feature (1)..(577): Homolog of NCBI NO: 15218216 NR Description: hypothetical protein; protein id: At1g15510.1
  misc_feature (1)..(577): Homolog of NCBI NO: 15228590 NR Description: hypothetical protein; protein id: At3g03580.1 thaliana] >gi|6091764|gb|AAF03474.1|AC009327_13 hypothetical [Arabidopsis thaliana] >gi|28393735|gb|AAO42278.1| unknown
  misc_feature (1)..(575): Homolog of NCBI NO: 32482936 NR Description: OSJNBb0072M01.1 [Oryza sativa (japonica
  misc_feature (1)..(21): Homolog of NCBI NO: 32482936 NR Description: OSJNBb0072M01.1 [Oryza sativa (japonica
  misc_feature (1)..(575): Homolog of NCBI NO: 30689384 NR Description: pentatricopeptide (PPR) repeat-containing protein thaliana] >gi|30102674|gb|AAP21255.1| At4g32430 [Arabidopsis
  misc_feature (1)..(573): Homolog of NCBI NO: 15221304 NR Description: hypothetical protein; protein id: At1g74600.1
  misc_feature (1)..(575): Homolog of NCBI NO: 7486629 NR Description: hypothetical protein F8B4.130 - Arabidopsis >gi|4049345|emb|CAA22570.1| putative protein [Arabidopsis >gi|7270147|emb|CAB79960.1| putative protein [Arabidopsis
  misc_feature (1)..(577): Homolog of NCBI NO: 15226200 NR Description: putative selenium-binding protein; protein id:
  misc_feature (1)..(577): Homolog of NCBI NO: 15236324 NR Description: putative protein; protein id: At4g13650.1
  misc_feature (182)..(575): Homolog of NCBI NO: 15242684 NR Description: putative protein; protein id: At5g40410.1
MITGCKESGYHETSVELFREMHKLGVRHDKFGFATILSMCDYGSLDFGKQVHSLVIKAGFFIASSVVNALITMYFNCQVVVDACLVFEETDVAVRDQVTFNVVIDGLAGFKRDESLLVFRKMLEASLRPTDLTFVSVMGSCSCAAMGHQVHGLAIKTGYEKYTLVSNATMTMYSSFEDFGAAHKVFESLEEKDLVTWNTMISSYNQAKLGKSAMSVYKRMHIIGVKPDEFTFGSLLATSLDLDVLEMVQACIIKFGLSSKIEISNALISAYSKNGQIEKADLLFERSLRKNLISWNAIISGFYHNGFPFEGLERFSCLLESEVRILPDAYTLSTLLSICVSTSSLMLGSQTHAYVLRHGQFKETLIGNALINMYSQCGTIQNSLEVFNQMSEKDVVSWNSLISAYSRHGEGENAVNTYKTMQDEGKVIPDAATFSAVLSACSHAGLVEEGLEIFNSMVEFHGVIRNVDHFSCLVDLLGRAGHLDEAESLVKISEKTIGSRVDVWWALFSACAAHGDLKLGKMVAKLLMEKEKDDPSVYVQLSNIYAGAGMWKEAEETRRAINMIGAMKQRGCSWMRL

SEQ ID NO: 90494 - DNA, 825 bp, Arabidopsis thaliana
  misc_feature (1)..(825): Ceres Seq. ID no. 12724113
  misc_feature: MA Experiment ID: 20000307 Result: Up-regulated in Transcription
  misc_feature: MA Experiment 20000307 PARAMETER Experiment Name: At_Germinating_Seeds_Sub_P Parameter: Age (hr) Value: 24 vs. 0
  misc_feature: MA Experiment 20000307 PARAMETER Experiment Name: At_Germinating_Seeds_Sub_P Parameter: Organism Value: A. thaliana
  misc_feature: MA Experiment 20000307 PARAMETER Experiment Name: At_Germinating_Seeds_Sub_P Parameter: Plant Line Value: WS
  misc_feature: MA Experiment 20000307 PARAMETER Experiment Name: At_Germinating_Seeds_Sub_P Parameter: Tissue Value: Germinating Seeds
  misc_feature: MA Experiment ID: 20000314 Result: Up-regulated in Transcription
  misc_feature: MA Experiment 20000314 PARAMETER Experiment Name: At_14day_Shoots-Roots_Sub_P Parameter: Age (day) Value: 14
  misc_feature: MA Experiment 20000314 PARAMETER Experiment Name: At_14day_Shoots-Roots_Sub_P Parameter: Organism Value: A. thaliana
  misc_feature: MA Experiment 20000314 PARAMETER Experiment Name: At_14day_Shoots-Roots_Sub_P Parameter: Plant Line Value: WS
  misc_feature: MA Experiment 20000314 PARAMETER Experiment Name: At_14day_Shoots-Roots_Sub_P Parameter: Tissue Value: Roots vs. Whole Plant
  misc_feature: MA Experiment ID: 20000328 Result: Down-regulated in Transcription
  misc_feature: MA Experiment 20000328 PARAMETER Experiment Name: At_42deg_Heat_Sub_P Parameter: Age (day) Value: 14
  misc_feature: MA Experiment 20000328 PARAMETER Experiment Name: At_42deg_Heat_Sub_P Parameter: Organism Value: A. thaliana
  misc_feature: MA Experiment 20000328 PARAMETER Experiment Name: At_42deg_Heat_Sub_P Parameter: Plant Line Value: WS
  misc_feature: MA Experiment 20000328 PARAMETER Experiment Name: At_42deg_Heat_Sub_P Parameter: Temperature (deg C) Value: 42 vs. 22
  misc_feature: MA Experiment 20000328 PARAMETER Experiment Name: At_42deg_Heat_Sub_P Parameter: Timepoint (hr) Value: 6
  misc_feature: MA Experiment 20000328 PARAMETER Experiment Name: At_42deg_Heat_Sub_P Parameter: Tissue Value: Aerial
atgacaaggagtcaccggttactccttctccttctactaatcttccaaacggcacaacgtttaaccaccgccgatccaaacgacgaagcgtgtttgaaaaacctccggcaaaacttagaagatccggcgagtaatctccgtaactggacaaactccgtcttctcaaatccatgctccggcttcacctcatacctccccggagctacctgtaacaacggaagaatctacaaactctcactcacaaacctctctctccgcggctcaatctcaccgtttctatcaaactgtacaaatctccaatccctagatctatcatcaaaccagatctccggcgtaatcccaccggagattcagtatctcgttaacctcgccgtactaaacctctcatcgaatcatctctccggcgaaatcactccgcagctcgctctttgcgcttacttaaacgtaatcgatctccacgataacgaattatccggtcagattccgcagcaattaggtctattagcgaggctctcggcgtttgatgtgtcgaataacaaactttccggtcagattccgacgtatttgtcgaataggactgggaatttcccgaggtttaacgcgagttcgtttatagggaataaaggattgtatggttatccgttgcaggagatgatgatgaagagtaaaggtttgtctgtgatggccattgttgggattggacttgggagtggaatcgcgagcttgatgattagttttactggtgtttgtttatggttgaggattactgagaagaagattgttgaagaagaaggtaagattagtcaatctatgcctgattactaa

SEQ ID NO: 90495 - protein, 274 aa, Arabidopsis thaliana
  peptide (1)..(274): Ceres Seq. ID no. 12724114
  misc_feature (146)..(169): Pfam Name: Leucine Rich Repeat Pfam Description: Leucine Rich Repeat
  misc_feature (1)..(274): Homolog of NCBI NO: 15229606 NR Description: leucine rich repeat protein family; protein id:
  misc_feature (2)..(274): Homolog of NCBI NO: 15239162 NR Description: leucine rich repeat protein family; protein id: supported by cDNA: 17160. [Arabidopsis thaliana]
  misc_feature (2)..(274): Homolog of NCBI NO: 21553823 NR Description: unknown [Arabidopsis thaliana]
  misc_feature (20)..(274): Homolog of NCBI NO: 7486525 NR Description: hypothetical protein F6H11.60 - Arabidopsis
  misc_feature (2)..(246): Homolog of NCBI NO: 15233004 NR Description: leucine-rich repeat transmembrane protein kinase, protein id: At3g28450.1 [Arabidopsis thaliana]
  misc_feature (8)..(257): Homolog of NCBI NO: 15223445 NR Description: leucine-rich repeat transmembrane protein kinase, protein id: At1g27190.1 [Arabidopsis thaliana]
  misc_feature (7)..(246): Homolog of NCBI NO: 38344230 NR Description: OJ991113_30.7 [Oryza sativa (japonica
  misc_feature (27)..(265): Homolog of NCBI NO: 15222519 NR Description: leucine-rich repeat transmembrane protein kinase,
  misc_feature (5)..(252): Homolog of NCBI NO: 8777368 NR Description: receptor-like protein kinase [Arabidopsis
  misc_feature (5)..(252): Homolog of NCBI NO: 17064966 NR Description: receptor-like protein kinase [Arabidopsis
MTRSHRLLLLLLLIFQTAQRLTTADPNDEACLKNLRQNLEDPASNLRNWTNSVFSNPCSGFTSYLPGATCNNGRIYKLSLTNLSLRGSISPFLSNCTNLQSLDLSSNQISGVIPPEIQYLVNLAVLNLSSNHLSGEITPQLALCAYLNVIDLHDNELSGQIPQQLGLLARLSAFDVSNNKLSGQIPTYLSNRTGNFPRFNASSFIGNKGLYGYPLQEMMMKSKGLSVMAIVGIGLGSGIASLMISFTGVCLWLRITEKKIVEEEGKISQSMPDY

SEQ ID NO: 90496 - DNA, 1101 bp, Arabidopsis thaliana
  misc_feature (1)..(1101): Ceres Seq. ID no. 12724115
  misc_feature: MA Experiment ID: 20000179 Result: Up-regulated in Transcription
  misc_feature: MA Experiment 20000179 PARAMETER Experiment Name: At_Germinating_Seeds_P Parameter: Age (hr) Value: 6 vs. 0
  misc_feature: MA Experiment 20000179 PARAMETER Experiment Name: At_Germinating_Seeds_P Parameter: Tissue Value: Germinating Seeds
  misc_feature: MA Experiment ID: 20000227 Result: Down-regulated in Transcription
  misc_feature: MA Experiment 20000227 PARAMETER Experiment Name: At_Root-Tips-vs-Tops_P Parameter: Tissue Value: Root Tips vs. Root Tops
  misc_feature: MA Experiment ID: 20000234 Result: Down-regulated in Transcription
  misc_feature: MA Experiment 20000234 PARAMETER Experiment Name: At_Siliques_P Parameter: Age (day) Value: 21
  misc_feature: MA Experiment 20000234 PARAMETER Experiment Name: At_Siliques_P Parameter: Organism Value: A. thaliana
  misc_feature: MA Experiment 20000234 PARAMETER Experiment Name: At_Siliques_P Parameter: Plant Line Value: WS
  misc_feature: MA Experiment 20000234 PARAMETER Experiment Name: At_Siliques_P Parameter: Tissue Value: Less Than 5mm Siliques vs. Whole Plant
  misc_feature: MA Experiment ID: 20000235 Result: Down-regulated in Transcription
  misc_feature: MA Experiment 20000235 PARAMETER Experiment Name: At_Siliques_P Parameter: Age (day) Value: 21
  misc_feature: MA Experiment 20000235 PARAMETER Experiment Name: At_Siliques_P Parameter: Organism Value: A. thaliana
  misc_feature: MA Experiment 20000235 PARAMETER Experiment Name: At_Siliques_P Parameter: Plant Line Value: WS
  misc_feature: MA Experiment 20000235 PARAMETER Experiment Name: At_Siliques_P Parameter: Tissue Value: 5-10mm Siliques vs. Whole Plant
  misc_feature: MA Experiment ID: 20000264 Result: Down-regulated in Transcription
  misc_feature: MA Experiment 20000264 PARAMETER Experiment Name: At_Open_Flower_P Parameter: Age (day) Value: 21
  misc_feature: MA Experiment 20000264 PARAMETER Experiment Name: At_Open_Flower_P Parameter: Plant Line Value: WS
  misc_feature: MA Experiment 20000264 PARAMETER Experiment Name: At_Open_Flower_P Parameter: Tissue Value: Open Flower vs. Whole Plant
  misc_feature: MA Experiment ID: 20000265 Result: Down-regulated in Transcription
  misc_feature: MA Experiment 20000265 PARAMETER Experiment Name: At_Open_Flower_P Parameter: Age (day) Value: 21
  misc_feature: MA Experiment 20000265 PARAMETER Experiment Name: At_Open_Flower_P Parameter: Plant Line Value: WS
  misc_feature: MA Experiment 20000265 PARAMETER Experiment Name: At_Open_Flower_P Parameter: Tissue Value: Closed Flower vs. Whole Plant
  misc_feature: MA Experiment ID: 20000268 Result: Down-regulated in Transcription
  misc_feature: MA Experiment 20000268 PARAMETER Experiment Name: At_100mM_NaCl__P Parameter: Age (day) Value: 14
  misc_feature: MA Experiment 20000268 PARAMETER Experiment Name: At_100mM_NaCl__P Parameter: Organism Value: A. thaliana
  misc_feature: MA Experiment 20000268 PARAMETER Experiment Name: At_100mM_NaCl__P Parameter: Plant Line Value: WS
  misc_feature: MA Experiment 20000268 PARAMETER Experiment Name: At_100mM_NaCl__P Parameter: Timepoint (hr) Value: 6
  misc_feature: MA Experiment 20000268 PARAMETER Experiment Name: At_100mM_NaCl__P Parameter: Tissue Value: Whole Plant
  misc_feature: MA Experiment 20000268 PARAMETER Experiment Name: At_100mM_NaCl__P Parameter: Treatment Value: 100mM NaCl vs. No Treatment
  misc_feature: MA Experiment ID: 20000286 Result: Down-regulated in Transcription
  misc_feature: MA Experiment 20000286 PARAMETER Experiment Name: At_Open_Flower_P Parameter: Age (day) Value: 21
  misc_feature: MA Experiment 20000286 PARAMETER Experiment Name: At_Open_Flower_P Parameter: Plant Line Value: WS
  misc_feature: MA Experiment 20000286 PARAMETER Experiment Name: At_Open_Flower_P Parameter: Tissue Value: Half Open vs. Whole Plant
  misc_feature: MA Experiment ID: 20000308 Result: Down-regulated in Transcription
  misc_feature: MA Experiment 20000308 PARAMETER Experiment Name: At_100mM_NaCl__P Parameter: Age (day) Value: 17
  misc_feature: MA Experiment 20000308 PARAMETER Experiment Name: At_100mM_NaCl__P Parameter: Organism Value: A. thaliana
  misc_feature: MA Experiment 20000308 PARAMETER Experiment Name: At_100mM_NaCl__P Parameter: Plant Line Value: WS
  misc_feature: MA Experiment 20000308 PARAMETER Experiment Name: At_100mM_NaCl__P Parameter: Timepoint (hr) Value: 72
  misc_feature: MA Experiment 20000308 PARAMETER Experiment Name: At_100mM_NaCl__P Parameter: Tissue Value: Whole Plant
  misc_feature: MA Experiment 20000308 PARAMETER Experiment Name: At_100mM_NaCl__P Parameter: Treatment Value: 100mM NaCl vs. No Treatment
  misc_feature: MA Experiment ID: 20000437 Result: Up-regulated in Transcription
  misc_feature: MA Experiment 20000437 PARAMETER Experiment Name: At_Drought_P Parameter: Age (day) Value: 8
  misc_feature: MA Experiment 20000437 PARAMETER Experiment Name: At_Drought_P Parameter: Organism Value: A. thaliana
  misc_feature: MA Experiment 20000437 PARAMETER Experiment Name: At_Drought_P Parameter: Plant Line Value: WS
  misc_feature: MA Experiment 20000437 PARAMETER Experiment Name: At_Drought_P Parameter: Timepoint (hr) Value: 24
  misc_feature: MA Experiment 20000437 PARAMETER Experiment Name: At_Drought_P Parameter: Tissue Value: Whole Plant
  misc_feature: MA Experiment 20000437 PARAMETER Experiment Name: At_Drought_P Parameter: Treatment Value: Drought vs. No Drought
  misc_feature: MA Experiment ID: 20000439 Result: Down-regulated in Transcription
  misc_feature: MA Experiment 20000439 PARAMETER Experiment Name: At_Roots__P Parameter: Age (day) Value: 14 vs. 21
  misc_feature: MA Experiment 20000439 PARAMETER Experiment Name: At_Roots__P Parameter: Organism Value: A. thaliana
  misc_feature: MA Experiment 20000439 PARAMETER Experiment Name: At_Roots__P Parameter: Tissue Value: Roots vs. Whole Plant
  misc_feature: MA Experiment ID: 20000441 Result: Up-regulated in Transcription
  misc_feature: MA Experiment 20000441 PARAMETER Experiment Name: At_1uM_BR-BRZ__P Parameter: Tissue Value: Shoot Apices
  misc_feature: MA Experiment 20000441 PARAMETER Experiment Name: At_1uM_BR-BRZ__P Parameter: Treatment Value: 1uM BR vs. No Treatment
  misc_feature: MA Experiment ID: 20000451 Result: Down-regulated in Transcription
  misc_feature: MA Experiment 20000451 PARAMETER Experiment Name: At_CS6879_Shoots-Roots_P Parameter: Age (day) Value: 14
  misc_feature: MA Experiment 20000451 PARAMETER Experiment Name: At_CS6879_Shoots-Roots_P Parameter: Organism Value: A. thaliana
  misc_feature: MA Experiment 20000451 PARAMETER Experiment Name: At_CS6879_Shoots-Roots_P Parameter: Plant Line Value: CS6879 vs. WS
  misc_feature: MA Experiment 20000451 PARAMETER Experiment Name: At_CS6879_Shoots-Roots_P Parameter: Tissue Value: Roots
  misc_feature: MA Experiment ID: 20000527 Result: Up-regulated in Transcription
  misc_feature: MA Experiment 20000527 PARAMETER Experiment Name: At_10percent_PEG_P Parameter: Age (day) Value: 20
  misc_feature: MA Experiment 20000527 PARAMETER Experiment Name: At_10percent_PEG_P Parameter: Organism Value: A. thaliana
  misc_feature: MA Experiment 20000527 PARAMETER Experiment Name: At_10percent_PEG_P Parameter: Plant Line Value: WS
  misc_feature: MA Experiment 20000527 PARAMETER Experiment Name: At_10percent_PEG_P Parameter: Timepoint (day) Value: 20
  misc_feature: MA Experiment 20000527 PARAMETER Experiment Name: At_10percent_PEG_P Parameter: Tissue Value: Whole Plant
  misc_feature: MA Experiment 20000527 PARAMETER Experiment Name: At_10percent_PEG_P Parameter: Treatment Value: 10percent PEG vs. No Treatment
  misc_feature: MA Experiment ID: 20000794 Result: Down-regulated in Transcription
  misc_feature: MA Experiment 20000794 PARAMETER Experiment Name: At_Petals_P Parameter: Age (day) Value: 23-25 days
  misc_feature: MA Experiment 20000794 PARAMETER Experiment Name: At_Petals_P Parameter: Plant Line Value: WS
  misc_feature: MA Experiment 20000794 PARAMETER Experiment Name: At_Petals_P Parameter: Tissue Value: Petals vs. Whole plant
  misc_feature: MA Experiment ID: 20001247 Result: Up-regulated in Transcription
  misc_feature: MA Experiment 20001247 PARAMETER Experiment Name: At_Far-red-induction_P Parameter: Age (day) Value: 7
  misc_feature: MA Experiment 20001247 PARAMETER Experiment Name: At_Far-red-induction_P Parameter: Light Value: Far-red vs. White
  misc_feature: MA Experiment 20001247 PARAMETER Experiment Name: At_Far-red-induction_P Parameter: Organism Value: A. thaliana
  misc_feature: MA Experiment 20001247 PARAMETER Experiment Name: At_Far-red-induction_P Parameter: Plant Line Value: Columbia
  misc_feature: MA Experiment 20001247 PARAMETER Experiment Name: At_Far-red-induction_P Parameter: Timepoint (hr) Value: 1
  misc_feature: MA Experiment 20001247 PARAMETER Experiment Name: At_Far-red-induction_P Parameter: Tissue Value: Whole Plant
  misc_feature: MA Experiment ID: 20001248 Result: Up-regulated in Transcription
  misc_feature: MA Experiment 20001248 PARAMETER Experiment Name: At_Far-red-induction_P Parameter: Age (day) Value: 7
  misc_feature: MA Experiment 20001248 PARAMETER Experiment Name: At_Far-red-induction_P Parameter: Light Value: Far-red vs. White
  misc_feature: MA Experiment 20001248 PARAMETER Experiment Name: At_Far-red-induction_P Parameter: Organism Value: A. thaliana
  misc_feature: MA Experiment 20001248 PARAMETER Experiment Name: At_Far-red-induction_P Parameter: Plant Line Value: Columbia
  misc_feature: MA Experiment 20001248 PARAMETER Experiment Name: At_Far-red-induction_P Parameter: Timepoint (hr) Value: 4
  misc_feature: MA Experiment 20001248 PARAMETER Experiment Name: At_Far-red-induction_P Parameter: Tissue Value: Whole Plant
  misc_feature: MA Experiment ID: 20001450 Result: Up-regulated in Transcription
  misc_feature: MA Experiment 20001450 PARAMETER Experiment Name: At_Far-red-induction_P Parameter: Age (day) Value: 7
  misc_feature: MA Experiment 20001450 PARAMETER Experiment Name: At_Far-red-induction_P Parameter: Light Value: Far-red vs. White
  misc_feature: MA Experiment 20001450 PARAMETER Experiment Name: At_Far-red-induction_P Parameter: Organism Value: A. thaliana
  misc_feature: MA Experiment 20001450 PARAMETER Experiment Name: At_Far-red-induction_P Parameter: Plant Line Value: Columbia
  misc_feature: MA Experiment 20001450 PARAMETER Experiment Name: At_Far-red-induction_P Parameter: Timepoint (hr) Value: 8
  misc_feature: MA Experiment 20001450 PARAMETER Experiment Name: At_Far-red-induction_P Parameter: Tissue Value: Whole Plant
  misc_feature: MA Experiment ID: 20001451 Result: Up-regulated in Transcription
  misc_feature: MA Experiment 20001451 PARAMETER Experiment Name: At_Far-red-induction_P Parameter: Age (day) Value: 7
  misc_feature: MA Experiment 20001451 PARAMETER Experiment Name: At_Far-red-induction_P Parameter: Light Value: Far-red vs. White
  misc_feature: MA Experiment 20001451 PARAMETER Experiment Name: At_Far-red-induction_P Parameter: Organism Value: A. thaliana
  misc_feature: MA Experiment 20001451 PARAMETER Experiment Name: At_Far-red-induction_P Parameter: Plant Line Value: Columbia
  misc_feature: MA Experiment 20001451 PARAMETER Experiment Name: At_Far-red-induction_P Parameter: Timepoint (hr) Value: 24
  misc_feature: MA Experiment 20001451 PARAMETER Experiment Name: At_Far-red-induction_P Parameter: Tissue Value: Whole Plant
  misc_feature: MA Experiment ID: 20001559 Result: Down-regulated in Transcription
  misc_feature: MA Experiment 20001559 PARAMETER Experiment Name: At_Drought_Soil_Dry_P Parameter: Age (day) Value: 28
  misc_feature: MA Experiment 20001559 PARAMETER Experiment Name: At_Drought_Soil_Dry_P Parameter: Organism Value: A. thaliana
  misc_feature: MA Experiment 20001559 PARAMETER Experiment Name: At_Drought_Soil_Dry_P Parameter: Plant Line Value: WS
  misc_feature: MA Experiment 20001559 PARAMETER Experiment Name: At_Drought_Soil_Dry_P Parameter: Post Timepoint (hr) Value: 29
  misc_feature: MA Experiment 20001559 PARAMETER Experiment Name: At_Drought_Soil_Dry_P Parameter: Post-Treatment Value: Re-Water vs. No Drought
  misc_feature: MA Experiment 20001559 PARAMETER Experiment Name: At_Drought_Soil_Dry_P Parameter: Timepoint (day) Value: 14
  misc_feature: MA Experiment 20001559 PARAMETER Experiment Name: At_Drought_Soil_Dry_P Parameter: Treatment Value: Drought vs. No Drought
  misc_feature: MA Experiment ID: 20001757 Result: Up-regulated in Transcription
  misc_feature: MA Experiment 20001757 PARAMETER Experiment Name: At_50mM_NH4NO3_L-to-H_P Parameter: Timepoint (hr) Value: 6
  misc_feature: MA Experiment 20001757 PARAMETER Experiment Name: At_50mM_NH4NO3_L-to-H_P Parameter: Tissue Value: Leaf
  misc_feature: MA Experiment 20001757 PARAMETER Experiment Name: At_50mM_NH4NO3_L-to-H_P Parameter: Treatment Value: 50mM NH4NO3 vs 100mM Mannitol
atggataagttagggttgagcaaaaggggttattttgatttcgctctcaagaacaaaaaatggatattattagcagtaagtggttacggtgcttttagggtttatcattctccttcaatttcccagaaacggaaacgaatctctaagcttttcactcttcttctcaatctcatcgaagctgcttctgattccgctgaaaccgttagtgttatctccaaagatctaacagagtttctcagatccgattcagatcaaatcccaaatagtttgaagcagatttccaaaatcgcgaaatcagatgagcttaattcttctttgatccgattcactcaagctatgaccgttggattgatccgtggaattgatgatggatccgggtcgggttttactgatcgggttatggataagctctttacgaaatccgggtcgggttttgcttcggcgattgttggtagctttgcgaggaacttagtcgttgcgctttattcctccgccggcgatggatcgaattcgaaattgctcgacgcggttttctctgatgatgggaggagattgatcggcgattgcgttcagcgtttcgtgagtactgcggtttcggtttatctcgataagacgagcgatgttaacgtattcgacgatttattcgccggtttaaccaatccgaaacatgaaggaaaggttaagcaaacgcttgtaacgctatgtaacagcgcggttgagacgtttgtaagagcgtcgcggaaaccggttcaattgaaccggtcatcgtcatgtcaagattcgtctcaaacgctgaccgttggatcaacgaaacaagcgacgtggatcgatcgggtgtcgtcgtcgttatcggtaccgagtaaccggaaatatgtggtggatttaaccgggcgggtaacgtttgagacggttagatcgttgttagaagtgttgattgagagagcaaatggtaaagtggagagttatgtggagaaagtgagagagagaggaaatgagacaaggagatttgtgagagttaaaacatcacttcttcatagtttatgtttgtctctctgtttacagattgttgaagctccatggatgctgactccaagaaactga

SEQ ID NO: 90497 - protein, 366 aa, Arabidopsis thaliana
  peptide (1)..(366): Ceres Seq. ID no. 12724116
  misc_feature (1)..(366): Homolog of NCBI NO: 15229610 NR Description: putative protein; protein id: At3g49790.1
  misc_feature (17)..(355): Homolog of NCBI NO: 21553547 NR Description: unknown [Arabidopsis thaliana]
  misc_feature (17)..(355): Homolog of NCBI NO: 14475940 NR Description: unknown protein [Arabidopsis thaliana]
  misc_feature (17)..(355): Homolog of NCBI NO: 18406365 NR Description: expressed protein; protein id: At1g59510.1, by cDNA: 150507., supported by cDNA: gi_6520209 [Arabidopsis
  misc_feature (14)..(362): Homolog of NCBI NO: 40539064 NR Description: expressed protein [Oryza sativa (japonica
  misc_feature (14)..(363): Homolog of NCBI NO: 22093613 NR Description: hypothetical protein~similar to Arabidopsis
  misc_feature (25)..(364): Homolog of NCBI NO: 37530342 NR Description: hypothetical protein [Oryza sativa (japonica group)] >gi|19551091|gb|AAL91596.1| Hypothetical protein [Oryza
  misc_feature (62)..(355): Homolog of NCBI NO: 21554418 NR Description: unknown [Arabidopsis thaliana]
  misc_feature (62)..(355): Homolog of NCBI NO: 18391117 NR Description: expressed protein; protein id: At1g10150.1, by cDNA: 2558. [Arabidopsis thaliana] >gi|25339472|pir||C86236
  misc_feature (1)..(188): Homolog of NCBI NO: 18391117 NR Description: expressed protein; protein id: At1g10150.1, by cDNA: 2558. [Arabidopsis thaliana] >gi|25339472|pir||C86236
MDKLGLSKRGYFDFALKNKKWILLAVSGYGAFRVYHSPSISQKRKRISKLFTLLLNLIEAASDSAETVSVISKDLTEFLRSDSDQIPNSLKQISKIAKSDELNSSLIRFTQAMTVGLIRGIDDGSGSGFTDRVMDKLFTKSGSGFASAIVGSFARNLVVALYSSAGDGSNSKLLDAVFSDDGRRLIGDCVQRFVSTAVSVYLDKTSDVNVFDDLFAGLTNPKHEGKVKQTLVTLCNSAVETFVRASRKPVQLNRSSSCQDSSQTLTVGSTKQATWIDRVSSSLSVPSNRKYVVDLTGRVTFETVRSLLEVLIERANGKVESYVEKVRERGNETRRFVRVKTSLLHSLCLSLCLQIVEAPWMLTPRN

SEQ ID NO: 90498 - protein, 254 aa, Arabidopsis thaliana
  peptide (1)..(254): Ceres Seq. ID no. 12724117
  misc_feature (1)..(254): Homolog of NCBI NO: 15229610 NR Description: putative protein; protein id: At3g49790.1
  misc_feature (1)..(243): Homolog of NCBI NO: 21553547 NR Description: unknown [Arabidopsis thaliana]
  misc_feature (1)..(243): Homolog of NCBI NO: 14475940 NR Description: unknown protein [Arabidopsis thaliana]
  misc_feature (1)..(243): Homolog of NCBI NO: 18406365 NR Description: expressed protein; protein id: At1g59510.1, by cDNA: 150507., supported by cDNA: gi_6520209 [Arabidopsis
  misc_feature (1)..(250): Homolog of NCBI NO: 40539064 NR Description: expressed protein [Oryza sativa (japonica
  misc_feature (1)..(251): Homolog of NCBI NO: 22093613 NR Description: hypothetical protein~similar to Arabidopsis
  misc_feature (1)..(252): Homolog of NCBI NO: 37530342 NR Description: hypothetical protein [Oryza sativa (japonica group)] >gi|19551091|gb|AAL91596.1| Hypothetical protein [Oryza
  misc_feature (1)..(243): Homolog of NCBI NO: 21554418 NR Description: unknown [Arabidopsis thaliana]
  misc_feature (1)..(243): Homolog of NCBI NO: 18391117 NR Description: expressed protein; protein id: At1g10150.1, by cDNA: 2558. [Arabidopsis thaliana] >gi|25339472|pir||C86236
  misc_feature (1)..(76): Homolog of NCBI NO: 18391117 NR Description: expressed protein; protein id: At1g10150.1, by cDNA: 2558. [Arabidopsis thaliana] >gi|25339472|pir||C86236
MTVGLIRGIDDGSGSGFTDRVMDKLFTKSGSGFASAIVGSFARNLVVALYSSAGDGSNSKLLDAVFSDDGRRLIGDCVQRFVSTAVSVYLDKTSDVNVFDDLFAGLTNPKHEGKVKQTLVTLCNSAVETFVRASRKPVQLNRSSSCQDSSQTLTVGSTKQATWIDRVSSSLSVPSNRKYVVDLTGRVTFETVRSLLEVLIERANGKVESYVEKVRERGNETRRFVRVKTSLLHSLCLSLCLQIVEAPWMLTPRN

SEQ ID NO: 90499 - protein, 233 aa, Arabidopsis thaliana
  peptide (1)..(233): Ceres Seq. ID no. 12724118
  misc_feature (1)..(233): Homolog of NCBI NO: 15229610 NR Description: putative protein; protein id: At3g49790.1
  misc_feature (1)..(222): Homolog of NCBI NO: 21553547 NR Description: unknown [Arabidopsis thaliana]
  misc_feature (1)..(222): Homolog of NCBI NO: 14475940 NR Description: unknown protein [Arabidopsis thaliana]
  misc_feature (1)..(222): Homolog of NCBI NO: 18406365 NR Description: expressed protein; protein id: At1g59510.1, by cDNA: 150507., supported by cDNA: gi_6520209 [Arabidopsis
  misc_feature (1)..(229): Homolog of NCBI NO: 40539064 NR Description: expressed protein [Oryza sativa (japonica
  misc_feature (1)..(230): Homolog of NCBI NO: 22093613 NR Description: hypothetical protein~similar to Arabidopsis
  misc_feature (1)..(231): Homolog of NCBI NO: 37530342 NR Description: hypothetical protein [Oryza sativa (japonica group)] >gi|19551091|gb|AAL91596.1| Hypothetical protein [Oryza
  misc_feature (1)..(222): Homolog of NCBI NO: 21554418 NR Description: unknown [Arabidopsis thaliana]
  misc_feature (1)..(222): Homolog of NCBI NO: 18391117 NR Description: expressed protein; protein id: At1g10150.1, by cDNA: 2558. [Arabidopsis thaliana] >gi|25339472|pir||C86236
  misc_feature (1)..(55): Homolog of NCBI NO: 18391117 NR Description: expressed protein; protein id: At1g10150.1, by cDNA: 2558. [Arabidopsis thaliana] >gi|25339472|pir||C86236
MDKLFTKSGSGFASAIVGSFARNLVVALYSSAGDGSNSKLLDAVFSDDGRRLIGDCVQRFVSTAVSVYLDKTSDVNVFDDLFAGLTNPKHEGKVKQTLVTLCNSAVETFVRASRKPVQLNRSSSCQDSSQTLTVGSTKQATWIDRVSSSLSVPSNRKYVVDLTGRVTFETVRSLLEVLIERANGKVESYVEKVRERGNETRRFVRVKTSLLHSLCLSLCLQIVEAPWMLTPRN

SEQ ID NO: 90500 - DNA, 681 bp, Arabidopsis thaliana
  misc_feature (1)..(681): Ceres Seq. ID no. 12724127
  misc_feature: MA Experiment ID: 20000265 Result: Up-regulated in Transcription
  misc_feature: MA Experiment 20000265 PARAMETER Experiment Name: At_Open_Flower_P Parameter: Age (day) Value: 21
  misc_feature: MA Experiment 20000265 PARAMETER Experiment Name: At_Open_Flower_P Parameter: Plant Line Value: WS
  misc_feature: MA Experiment 20000265 PARAMETER Experiment Name: At_Open_Flower_P Parameter: Tissue Value: Closed Flower vs. Whole Plant
  misc_feature: MA Experiment ID: 20000495 Result: Up-regulated in Transcription
  misc_feature: MA Experiment 20000495 PARAMETER Experiment Name: At_Guard_Cells_P Parameter: Harvest Date Value: 8/2/2002
  misc_feature: MA Experiment 20000495 PARAMETER Experiment Name: At_Guard_Cells_P Parameter: Organism Value: A. thaliana
  misc_feature: MA Experiment 20000495 PARAMETER Experiment Name: At_Guard_Cells_P Parameter: Tissue Value: Guard Cells vs. Leaves
atgagtaagggtccgggactattcgccgacatcggaaaatatgcgaaagatctgttgacgagagattacagtaccgatcagaaattcagtatctccactaacagtgtctccggcgtcgctcttacttccactgctctcaagaatggagtactacatgctgctaatgttgccacacaatacaagtacagaaacactttcttcgatgtcaagatcgatactgatttcaatgttaagtctcttgtttatccaatgaataaatttgtctcaattgatcacaatacgctaactgggtatgacaccacatctcgaactttcacaaagtacaacgtcggagtcagtgtcacaaagccagatcaatgtgtctccataatattgggagataaaggagattcgatcaaagcctcttatgtatattacctagatgagtcgacgagaagcgcaacagttggagaggttatcaggaaaatctcaactaatgagacaacagtaactgttggtggattgtatgcggttgatcacttaacgaatgtgaaagctaagctgaacagtaacggtaagtttggagctcttctgcaacacgagggccttccaaaatcgatagtgacaatctcaggtgagattgataccaagacattagacaagtacccaaggttaggtctctcgctttcccttaaaccttga

SEQ ID NO: 90501 - protein, 226 aa, Arabidopsis thaliana
  peptide (1)..(226): Ceres Seq. ID no. 12724128
  misc_feature (4)..(219): Pfam Name: Eukaryotic porin Pfam Description: Eukaryotic porin
  misc_feature (1)..(226): Homolog of NCBI NO: 15229642 NR Description: porin - like protein; protein id: At3g49920.1
  misc_feature (97)..(226): Homolog of NCBI NO: 36957216 NR Description: VDAC2.1 [Lotus corniculatus var. japonicus]
  misc_feature (1)..(73): Homolog of NCBI NO: 36957216 NR Description: VDAC2.1 [Lotus corniculatus var. japonicus]
  misc_feature (94)..(226): Homolog of NCBI NO: 7442953 NR Description: porin - common ice plant
  misc_feature (1)..(81): Homolog of NCBI NO: 7442953 NR Description: porin - common ice plant
  misc_feature (98)..(226): Homolog of NCBI NO: 36957183 NR Description: VDAC1.2 [Lotus corniculatus var. japonicus]
  misc_feature (1)..(81): Homolog of NCBI NO: 36957183 NR Description: VDAC1.2 [Lotus corniculatus var. japonicus]
  misc_feature (12)..(226): Homolog of NCBI NO: 15240765 NR Description: porin-like protein; protein id: At5g67500.1,
  misc_feature (94)..(226): Homolog of NCBI NO: 1172555 NR Description: 34 kDa outer mitochondrial membrane protein porin
  misc_feature (1)..(77): Homolog of NCBI NO: 1172555 NR Description: 34 kDa outer mitochondrial membrane protein porin
MSKGPGLFADIGKYAKDLLTRDYSTDQKFSISTNSVSGVALTSTALKNGVLHAANVATQYKYRNTFFDVKIDTDFNVKSLVYPMNKFVSIDHNTLTGYDTTSRTFTKYNVGVSVTKPDQCVSIILGDKGDSIKASYVYYLDESTRSATVGEVIRKISTNETTVTVGGLYAVDHLTNVKAKLNSNGKFGALLQHEGLPKSIVTISGEIDTKTLDKYPRLGLSLSLKP

SEQ ID NO: 90502 - protein, 143 aa, Arabidopsis thaliana
  peptide (1)..(143): Ceres Seq. ID no. 12724129
  misc_feature (1)..(136): Pfam Name: Eukaryotic porin Pfam Description: Eukaryotic porin
  misc_feature (1)..(143): Homolog of NCBI NO: 15229642 NR Description: porin - like protein; protein id: At3g49920.1
  misc_feature (14)..(143): Homolog of NCBI NO: 36957216 NR Description: VDAC2.1 [Lotus corniculatus var. japonicus]
  misc_feature (11)..(143): Homolog of NCBI NO: 7442953 NR Description: porin - common ice plant
  misc_feature (15)..(143): Homolog of NCBI NO: 36957183 NR Description: VDAC1.2 [Lotus corniculatus var. japonicus]
  misc_feature (1)..(143): Homolog of NCBI NO: 15240765 NR Description: porin-like protein; protein id: At5g67500.1,
  misc_feature (11)..(143): Homolog of NCBI NO: 1172555 NR Description: 34 kDa outer mitochondrial membrane protein porin
  misc_feature (11)..(143): Homolog of NCBI NO: 21593558 NR Description: putative porin [Arabidopsis thaliana]
  misc_feature (11)..(143): Homolog of NCBI NO: 15232074 NR Description: putative porin; protein id: At3g01280.1, by cDNA: 40102., supported by cDNA: gi_14335075 [Arabidopsis >gi|20455197|sp|Q9SRH5|POR1_ARATH Outer mitochondrial membrane
  misc_feature (11)..(143): Homolog of NCBI NO: 15242210 NR Description: voltage-dependent anion-selective channel protein protein id: At5g15090.1, supported by cDNA: 1417., supported by gi_17380869 [Arabidopsis thaliana]
  misc_feature (11)..(143): Homolog of NCBI NO: 18076158 NR Description: voltage-dependent anion channel [Oryza sativa
MNKFVSIDHNTLTGYDTTSRTFTKYNVGVSVTKPDQCVSIILGDKGDSIKASYVYYLDESTRSATVGEVIRKISTNETTVTVGGLYAVDHLTNVKAKLNSNGKFGALLQHEGLPKSIVTISGEIDTKTLDKYPRLGLSLSLKP

SEQ ID NO: 90503 - DNA, 648 bp, Arabidopsis thaliana
  misc_feature (1)..(648): Ceres Seq. ID no. 12724130
  misc_feature: MA Experiment ID: 20000439 Result: Up-regulated in Transcription
  misc_feature: MA Experiment 20000439 PARAMETER Experiment Name: At_Roots__P Parameter: Age (day) Value: 14 vs. 21
  misc_feature: MA Experiment 20000439 PARAMETER Experiment Name: At_Roots__P Parameter: Organism Value: A. thaliana
  misc_feature: MA Experiment 20000439 PARAMETER Experiment Name: At_Roots__P Parameter: Tissue Value: Roots vs. Whole Plant
atggctctcgacactctcaattctcccacctccaccaccacaaccaccgctcctcctcctttcctccgttgcctcgacgaaaccgagcccgaaaacctcgaatcatggaccaaaagaaaacgtacaaaacgtcaccgtatagatcaaccaaaccctcctccttctgaagaagagtatctcgctctttgcctccttatgctcgctcgtggctcctccgatcatcactctccaccgtcggatcatcactctctttctccactgtccgatcatcagaaagattacaagtgttccgtctgtggcaaatctttcccgtcttaccaagcgttaggtggacacaaaacaagtcaccggaaaccggttagtgtcgatgttaataatagtaacggaaccgttactaataacggaaatattagtaacggtttagttggtcaaagtgggaagactcataactgctctatatgttttaagtcgtttccctctggtcaagcattgggtggtcacaaacgttgtcactatgatggtggtaacggtaacagtaacggtgacaatagccacaagtttgacctaaatttaccggctgatcaagttagtgatgagacaattggaaaaagtcaactctccggtgaagaaacaaagtcggtgttgtga

SEQ ID NO: 90504 - protein, 215 aa, Arabidopsis thaliana
  peptide (1)..(215): Ceres Seq. ID no. 12724131
  misc_feature (94)..(116): Pfam Name: Zinc finger, C2H2 type Pfam Description: Zinc finger, C2H2 type
  misc_feature (1)..(215): Homolog of NCBI NO: 15229643 NR Description: zinc-finger-like protein; protein id: At3g49930.1
  misc_feature (1)..(209): Homolog of NCBI NO: 7488532 NR Description: probable zinc-finger protein ZFP1 - turnip
  misc_feature (1)..(209): Homolog of NCBI NO: 7488533 NR Description: probable zinc-finger protein-1 - turnip
  misc_feature (1)..(198): Homolog of NCBI NO: 15240742 NR Description: Cys2/His2-type zinc finger protein 1 protein id: At5g67450.1 [Arabidopsis thaliana]
  misc_feature (1)..(198): Homolog of NCBI NO: 27464331 NR Description: zinc finger protein [Arabidopsis thaliana]
  misc_feature (1)..(184): Homolog of NCBI NO: 439493 NR Description: zinc-finger protein [Petunia x hybrida]
MALDTLNSPTSTTTTTAPPPFLRCLDETEPENLESWTKRKRTKRHRIDQPNPPPSEEEYLALCLLMLARGSSDHHSPPSDHHSLSPLSDHQKDYKCSVCGKSFPSYQALGGHKTSHRKPVSVDVNNSNGTVTNNGNISNGLVGQSGKTHNCSICFKSFPSGQALGGHKRCHYDGGNGNSNGDNSHKFDLNLPADQVSDETIGKSQLSGEETKSVL

SEQ ID NO: 90505 - protein, 150 aa, Arabidopsis thaliana
  peptide (1)..(150): Ceres Seq. ID no. 12724132
  misc_feature (29)..(51): Pfam Name: Zinc finger, C2H2 type Pfam Description: Zinc finger, C2H2 type
  misc_feature (1)..(150): Homolog of NCBI NO: 15229643 NR Description: zinc-finger-like protein; protein id: At3g49930.1
  misc_feature (1)..(144): Homolog of NCBI NO: 7488532 NR Description: probable zinc-finger protein ZFP1 - turnip
  misc_feature (1)..(144): Homolog of NCBI NO: 7488533 NR Description: probable zinc-finger protein-1 - turnip
  misc_feature (1)..(133): Homolog of NCBI NO: 15240742 NR Description: Cys2/His2-type zinc finger protein 1 protein id: At5g67450.1 [Arabidopsis thaliana]
  misc_feature (1)..(133): Homolog of NCBI NO: 27464331 NR Description: zinc finger protein [Arabidopsis thaliana]
  misc_feature (1)..(119): Homolog of NCBI NO: 439493 NR Description: zinc-finger protein [Petunia x hybrida]
MLARGSSDHHSPPSDHHSLSPLSDHQKDYKCSVCGKSFPSYQALGGHKTSHRKPVSVDVNNSNGTVTNNGNISNGLVGQSGKTHNCSICFKSFPSGQALGGHKRCHYDGGNGNSNGDNSHKFDLNLPADQVSDETIGKSQLSGEETKSVL

SEQ ID NO: 90506 - DNA, 1596 bp, Arabidopsis thaliana
  misc_feature (1)..(1596): Ceres Seq. ID no. 12724155
  misc_feature: MA Experiment ID: 20000347 Result: Down-regulated in Transcription
  misc_feature: MA Experiment 20000347 PARAMETER Experiment Name: At_2mM_SA_Sub_P Parameter: Age (day) Value: 14
  misc_feature: MA Experiment 20000347 PARAMETER Experiment Name: At_2mM_SA_Sub_P Parameter: Organism Value: A. thaliana
  misc_feature: MA Experiment 20000347 PARAMETER Experiment Name: At_2mM_SA_Sub_P Parameter: Plant Line Value: WS
  misc_feature: MA Experiment 20000347 PARAMETER Experiment Name: At_2mM_SA_Sub_P Parameter: Timepoint (hr) Value: 6
  misc_feature: MA Experiment 20000347 PARAMETER Experiment Name: At_2mM_SA_Sub_P Parameter: Tissue Value: Aerial
  misc_feature: MA Experiment 20000347 PARAMETER Experiment Name: At_2mM_SA_Sub_P Parameter: Treatment Value: 2mM SA vs. No Treatment
atggtggctgtcttctacaaagacatgttgagctggtacttactcacccttaagatccgcgaaaaactcgaaacacaaaaccaagaatccgtattggttaatcaagatcaaaacctccccggtttacccgaaatcaccagatccgatcaagatcaaaacattcataacaaccagcaaactcaatccgatcccgctatctacgtaatcaaagagagtccaaaagattcacgagacgattgggtgatctcgatcacagacaagctcgaacaagcacatagagatgatgacacaacactctggggtaagctctgtatctacagagttccatattaccttcaagaaaacgacaacaaatcgtatttccctcagacagtctcgcttggtccgtaccatcatggtaagaaacggctccggtctatggaccgtcacaaatggcgtgctgtcaatagagtcttgaaacgtacgaaccaaggcattaaaatgtatatcgacgccatgagagagctagaggaaaaggctcgagcttgttacgaaggtcccttaagtttgagtagtaacgaatttatcgaaatgctagttcttgatggttgttttgtgcttgagctctttagaggagccgttgaaggattcactgaactcggatatgcacgtaacgatccagttttcgcgatgagaggatcgatgcattcgattcaacgtgacatggtaatgcttgaaaatcaacttcctttatttgttctaaaccggttattagagttacagcttggtacacggaaccaaaccggtttggtggcacaattagcaattcggttctttgatccactaatgccaacggacgagccgttgactaaatctggccagtcaaaactcgagaactcactggcaagagataaatcctttgacccattcgctgatatgggtgaactgcattgtctagatgttttccgtcgtagtttgttacggtctagtcctaaaccggagccgaggttaacaagaaagagatggtctcgaaacacgcgtgtggcggacaagcgccggcaacaattgatacattgtgtgacggaactaaaagaggctggtataaaattcagaagaaggaaaaccgaccggttttgggatatgcaattcaaaaacggttatctagaaataccgaggctacttatccatgacggtaccaaatctctttttctgaatcttatagcttttgagcagtgtcatatcgattcgagcaatgatataacatcctacataatcttcatggacaatctaatagattctcacgaagatgttagctacttacactactgtggtatcatcgaacattggctagggagcgattctgaagtcgcggatttgttcaaccgtttatgtcaagaagttgtattcgacaccgaagatagctatttatctaggttatcgattgaggttaatcgttactacgatcataagtggaatgcttggagggctacgttgaaacataagtacttcaataatccatgggcaattgtttctttctgtgctgcggttattctactagtcctcactttctctcaaagtttttacgctgtttacgcttattataagccaccttcttaa

SEQ ID NO: 90507 - protein, 531 aa, Arabidopsis thaliana
  peptide (1)..(531): Ceres Seq. ID no. 12724156
  misc_feature (98)..(516): Pfam Name: Plant protein of unknown function Pfam Description: Plant protein of unknown function
  misc_feature (1)..(531): Homolog of NCBI NO: 15229680 NR Description: putative protein; protein id: At3g50120.1
  misc_feature (4)..(531): Homolog of NCBI NO: 15229687 NR Description: putative protein; protein id: At3g50170.1
  misc_feature (71)..(531): Homolog of NCBI NO: 15229681 NR Description: putative protein; protein id: At3g50130.1
  misc_feature (7)..(29): Homolog of NCBI NO: 15229681 NR Description: putative protein; protein id: At3g50130.1
  misc_feature (44)..(531): Homolog of NCBI NO: 15229684 NR Description: putative protein; protein id: At3g50150.1
  misc_feature (45)..(286): Homolog of NCBI NO: 15229686 NR Description: putative protein; protein id: At3g50160.1
  misc_feature (307)..(519): Homolog of NCBI NO: 15229686 NR Description: putative protein; protein id: At3g50160.1
  misc_feature (71)..(362): Homolog of NCBI NO: 15229682 NR Description: putative protein; protein id: At3g50140.1
  misc_feature (7)..(29): Homolog of NCBI NO: 15229682 NR Description: putative protein; protein id: At3g50140.1
  misc_feature (18)..(337): Homolog of NCBI NO: 15229689 NR Description: putative protein; protein id: At3g50180.1
MVAVFYKDMLSWYLLTLKIREKLETQNQESVLVNQDQNLPGLPEITRSDQDQNIHNNQQTQSDPAIYVIKESPKDSRDDWVISITDKLEQAHRDDDTTLWGKLCIYRVPYYLQENDNKSYFPQTVSLGPYHHGKKRLRSMDRHKWRAVNRVLKRTNQGIKMYIDAMRELEEKARACYEGPLSLSSNEFIEMLVLDGCFVLELFRGAVEGFTELGYARNDPVFAMRGSMHSIQRDMVMLENQLPLFVLNRLLELQLGTRNQTGLVAQLAIRFFDPLMPTDEPLTKSGQSKLENSLARDKSFDPFADMGELHCLDVFRRSLLRSSPKPEPRLTRKRWSRNTRVADKRRQQLIHCVTELKEAGIKFRRRKTDRFWDMQFKNGYLEIPRLLIHDGTKSLFLNLIAFEQCHIDSSNDITSYIIFMDNLIDSHEDVSYLHYCGIIEHWLGSDSEVADLFNRLCQEVVFDTEDSYLSRLSIEVNRYYDHKWNAWRATLKHKYFNNPWAIVSFCAAVILLVLTFSQSFYAVYAYYKPPS

SEQ ID NO: 90508 - protein, 523 aa, Arabidopsis thaliana
  peptide (1)..(523): Ceres Seq. ID no. 12724157
  misc_feature (90)..(508): Pfam Name: Plant protein of unknown function Pfam Description: Plant protein of unknown function
  misc_feature (1)..(523): Homolog of NCBI NO: 15229680 NR Description: putative protein; protein id: At3g50120.1
  misc_feature (1)..(523): Homolog of NCBI NO: 15229687 NR Description: putative protein; protein id: At3g50170.1
  misc_feature (63)..(523): Homolog of NCBI NO: 15229681 NR Description: putative protein; protein id: At3g50130.1
  misc_feature (1)..(21): Homolog of NCBI NO: 15229681 NR Description: putative protein; protein id: At3g50130.1
  misc_feature (36)..(523): Homolog of NCBI NO: 15229684 NR Description: putative protein; protein id: At3g50150.1
  misc_feature (37)..(278): Homolog of NCBI NO: 15229686 NR Description: putative protein; protein id: At3g50160.1
  misc_feature (299)..(511): Homolog of NCBI NO: 15229686 NR Description: putative protein; protein id: At3g50160.1
  misc_feature (63)..(354): Homolog of NCBI NO: 15229682 NR Description: putative protein; protein id: At3g50140.1
  misc_feature (1)..(21): Homolog of NCBI NO: 15229682 NR Description: putative protein; protein id: At3g50140.1
  misc_feature (10)..(329): Homolog of NCBI NO: 15229689 NR Description: putative protein; protein id: At3g50180.1
MLSWYLLTLKIREKLETQNQESVLVNQDQNLPGLPEITRSDQDQNIHNNQQTQSDPAIYVIKESPKDSRDDWVISITDKLEQAHRDDDTTLWGKLCIYRVPYYLQENDNKSYFPQTVSLGPYHHGKKRLRSMDRHKWRAVNRVLKRTNQGIKMYIDAMRELEEKARACYEGPLSLSSNEFIEMLVLDGCFVLELFRGAVEGFTELGYARNDPVFAMRGSMHSIQRDMVMLENQLPLFVLNRLLELQLGTRNQTGLVAQLAIRFFDPLMPTDEPLTKSGQSKLENSLARDKSFDPFADMGELHCLDVFRRSLLRSSPKPEPRLTRKRWSRNTRVADKRRQQLIHCVTELKEAGIKFRRRKTDRFWDMQFKNGYLEIPRLLIHDGTKSLFLNLIAFEQCHIDSSNDITSYIIFMDNLIDSHEDVSYLHYCGIIEHWLGSDSEVADLFNRLCQEVVFDTEDSYLSRLSIEVNRYYDHKWNAWRATLKHKYFNNPWAIVSFCAAVILLVLTFSQSFYAVYAYYKPPS

SEQ ID NO: 90509 - protein, 392 aa, Arabidopsis thaliana
  peptide (1)..(392): Ceres Seq. ID no. 12724158
  misc_feature (1)..(377): Pfam Name: Plant protein of unknown function Pfam Description: Plant protein of unknown function
  misc_feature (1)..(392): Homolog of NCBI NO: 15229680 NR Description: putative protein; protein id: At3g50120.1
  misc_feature (1)..(392): Homolog of NCBI NO: 15229687 NR Description: putative protein; protein id: At3g50170.1
  misc_feature (1)..(392): Homolog of NCBI NO: 15229681 NR Description: putative protein; protein id: At3g50130.1
  misc_feature (1)..(392): Homolog of NCBI NO: 15229684 NR Description: putative protein; protein id: At3g50150.1
  misc_feature (1)..(147): Homolog of NCBI NO: 15229686 NR Description: putative protein; protein id: At3g50160.1
  misc_feature (168)..(380): Homolog of NCBI NO: 15229686 NR Description: putative protein; protein id: At3g50160.1
  misc_feature (1)..(223): Homolog of NCBI NO: 15229682 NR Description: putative protein; protein id: At3g50140.1
  misc_feature (1)..(198): Homolog of NCBI NO: 15229689 NR Description: putative protein; protein id: At3g50180.1
  misc_feature (135)..(341): Homolog of NCBI NO: 15229691 NR Description: putative protein; protein id: At3g50190.1
  misc_feature (369)..(390): Homolog of NCBI NO: 15229691 NR Description: putative protein; protein id: At3g50190.1
MDRHKWRAVNRVLKRTNQGIKMYIDAMRELEEKARACYEGPLSLSSNEFIEMLVLDGCFVLELFRGAVEGFTELGYARNDPVFAMRGSMHSIQRDMVMLENQLPLFVLNRLLELQLGTRNQTGLVAQLAIRFFDPLMPTDEPLTKSGQSKLENSLARDKSFDPFADMGELHCLDVFRRSLLRSSPKPEPRLTRKRWSRNTRVADKRRQQLIHCVTELKEAGIKFRRRKTDRFWDMQFKNGYLEIPRLLIHDGTKSLFLNLIAFEQCHIDSSNDITSYIIFMDNLIDSHEDVSYLHYCGIIEHWLGSDSEVADLFNRLCQEVVFDTEDSYLSRLSIEVNRYYDHKWNAWRATLKHKYFNNPWAIVSFCAAVILLVLTFSQSFYAVYAYYKPPS

SEQ ID NO: 90510 - DNA, 1695 bp, Arabidopsis thaliana
  misc_feature (1)..(1695): Ceres Seq. ID no. 12724159
  misc_feature: MA Experiment ID: 20000307 Result: Up-regulated in Transcription
  misc_feature: MA Experiment 20000307 PARAMETER Experiment Name: At_Germinating_Seeds_Sub_P Parameter: Age (hr) Value: 24 vs. 0
  misc_feature: MA Experiment 20000307 PARAMETER Experiment Name: At_Germinating_Seeds_Sub_P Parameter: Organism Value: A. thaliana
  misc_feature: MA Experiment 20000307 PARAMETER Experiment Name: At_Germinating_Seeds_Sub_P Parameter: Plant Line Value: WS
  misc_feature: MA Experiment 20000307 PARAMETER Experiment Name: At_Germinating_Seeds_Sub_P Parameter: Tissue Value: Germinating Seeds
  misc_feature: MA Experiment ID: 20000314 Result: Up-regulated in Transcription
  misc_feature: MA Experiment 20000314 PARAMETER Experiment Name: At_14day_Shoots-Roots_Sub_P Parameter: Age (day) Value: 14
  misc_feature: MA Experiment 20000314 PARAMETER Experiment Name: At_14day_Shoots-Roots_Sub_P Parameter: Organism Value: A. thaliana
  misc_feature: MA Experiment 20000314 PARAMETER Experiment Name: At_14day_Shoots-Roots_Sub_P Parameter: Plant Line Value: WS
  misc_feature: MA Experiment 20000314 PARAMETER Experiment Name: At_14day_Shoots-Roots_Sub_P Parameter: Tissue Value: Roots vs. Whole Plant
  misc_feature: MA Experiment ID: 20000328 Result: Down-regulated in Transcription
  misc_feature: MA Experiment 20000328 PARAMETER Experiment Name: At_42deg_Heat_Sub_P Parameter: Age (day) Value: 14
  misc_feature: MA Experiment 20000328 PARAMETER Experiment Name: At_42deg_Heat_Sub_P Parameter: Organism Value: A. thaliana
  misc_feature: MA Experiment 20000328 PARAMETER Experiment Name: At_42deg_Heat_Sub_P Parameter: Plant Line Value: WS
  misc_feature: MA Experiment 20000328 PARAMETER Experiment Name: At_42deg_Heat_Sub_P Parameter: Temperature (deg C) Value: 42 vs. 22
  misc_feature: MA Experiment 20000328 PARAMETER Experiment Name: At_42deg_Heat_Sub_P Parameter: Timepoint (hr) Value: 6
  misc_feature: MA Experiment 20000328 PARAMETER Experiment Name: At_42deg_Heat_Sub_P Parameter: Tissue Value: Aerial
  misc_feature: MA Experiment ID: 20000347 Result: Up-regulated in Transcription
  misc_feature: MA Experiment 20000347 PARAMETER Experiment Name: At_2mM_SA_Sub_P Parameter: Age (day) Value: 14
  misc_feature: MA Experiment 20000347 PARAMETER Experiment Name: At_2mM_SA_Sub_P Parameter: Organism Value: A. thaliana
  misc_feature: MA Experiment 20000347 PARAMETER Experiment Name: At_2mM_SA_Sub_P Parameter: Plant Line Value: WS
  misc_feature: MA Experiment 20000347 PARAMETER Experiment Name: At_2mM_SA_Sub_P Parameter: Timepoint (hr) Value: 6
  misc_feature: MA Experiment 20000347 PARAMETER Experiment Name: At_2mM_SA_Sub_P Parameter: Tissue Value: Aerial
  misc_feature: MA Experiment 20000347 PARAMETER Experiment Name: At_2mM_SA_Sub_P Parameter: Treatment Value: 2mM SA vs. No Treatment
atggtgcgtattctttcttttacaccaccgcctcctccaccaccaccaccatcgtttagatcaattcctcgtccaccaccaccaccatcttttagatcaattcctcctcggcggcatttcttcaaaaagaaaagcaaaagtctaccaccaccaccaccaccgctaccgccagcacgaccatttggaccgattcttccttggcggtattctgtcaaaagaaaaagaactaatcgaccacaaccgtctacgatccagaaagacatgttcacatggtactttctcaccctcatgatgcgccaaaaactccaaaaacaaaaccaaaaacccgaagagacacgagaagaatgggtgatctcaattagagacaaaatggagcaagcacttagagaagacgccacaactagttgggacaaactatgtatctatagagttccacaataccttcaagagaacaacaagaagtcctatttccctcagactgtctcacttggtccgttccaccatggcaacaaacatctcctacccatggaccgtcacaagtggcgtgcagtcaatatggtcatggcacgtaccaaacacgacattgaaatgtatattgacgccatgaaagaactcgaagacagggctcgtgcttgctatgaaggtcctatagatttgagcagcaacaagtttagtgaaatgctggttcttgatggttgtttcgttcttgaactctttagaggagctgatgaaggattctccgaactaggatatgatcgtaacgatccagttttcgcaatgcgaggatcaatgcattcgattcaacgtgacatggtaatgctagaaaatcaactccctttgtttgttctcaaccggttattagagatacagcttggtaaacggcaccaaaccggtttagtgtcgcgattagcagttcggttctttgatccactaatgccaaccgacgagccgttgaccaaaaccgacgactcgctggaacaagataaattctttaacccaattgctgataaggacaagggtgagttgcactgtctagatgttttccgtcgaaatctacttcggccttgttcgaatccggagccaaggttatcacgaatgagatggtcatggagaactcgcgtggcggataagcgccaacaacaactgatacattgcgtgaccgaactaagagaagccggtattaaattcaggacgaggaaaaccgaccggttttgggatattcgattcaaaaacggttatctcgagataccaaaactactaatccatgacggtaccaaatctctcttctcgaatcttatagccttcgaacaatgtcatattgactcgagcaacgatataacatcgtacataatctttatggataatctaatagattcgtcggaagatgttaggtatttgcattattgtggtatcatcgaacattggttagggaatgattatgaagttgcggatttgttcaaccggttatgtcaagaagtggctttcgacccccaaaatagttatttgtcacaattgtcgaataaagttgatcggaattatagccgaaagtggaatgttctgaaggcgatcttaaaacacaagtacttcaataatccttgggcatacttctctttttttgctgctcttgtcctgctagttctcacgttatttcagagtttctttactgcttatccttattttaacccaccttcttga

SEQ ID NO: 90511 - protein, 564 aa, Arabidopsis thaliana
  peptide (1)..(564): Ceres Seq. ID no. 12724160
  misc_feature (134)..(549): Pfam Name: Plant protein of unknown function Pfam Description: Plant protein of unknown function
  misc_feature (1)..(564): Homolog of NCBI NO: 15229681 NR Description: putative protein; protein id: At3g50130.1
  misc_feature (107)..(564): Homolog of NCBI NO: 15229680 NR Description: putative protein; protein id: At3g50120.1
  misc_feature (86)..(108): Homolog of NCBI NO: 15229680 NR Description: putative protein; protein id: At3g50120.1
  misc_feature (107)..(564): Homolog of NCBI NO: 15229687 NR Description: putative protein; protein id: At3g50170.1
  misc_feature (80)..(114): Homolog of NCBI NO: 15229687 NR Description: putative protein; protein id: At3g50170.1
  misc_feature (95)..(564): Homolog of NCBI NO: 15229684 NR Description: putative protein; protein id: At3g50150.1
  misc_feature (9)..(366): Homolog of NCBI NO: 15229689 NR Description: putative protein; protein id: At3g50180.1
  misc_feature (317)..(564): Homolog of NCBI NO: 15229689 NR Description: putative protein; protein id: At3g50180.1
  misc_feature (16)..(489): Homolog of NCBI NO: 15229682 NR Description: putative protein; protein id: At3g50140.1
  misc_feature (45)..(349): Homolog of NCBI NO: 15229691 NR Description: putative protein; protein id: At3g50190.1
MVRILSFTPPPPPPPPPSFRSIPRPPPPPSFRSIPPRRHFFKKKSKSLPPPPPPLPPARPFGPILPWRYSVKRKRTNRPQPSTIQKDMFTWYFLTLMMRQKLQKQNQKPEETREEWVISIRDKMEQALREDATTSWDKLCIYRVPQYLQENNKKSYFPQTVSLGPFHHGNKHLLPMDRHKWRAVNMVMARTKHDIEMYIDAMKELEDRARACYEGPIDLSSNKFSEMLVLDGCFVLELFRGADEGFSELGYDRNDPVFAMRGSMHSIQRDMVMLENQLPLFVLNRLLEIQLGKRHQTGLVSRLAVRFFDPLMPTDEPLTKTDDSLEQDKFFNPIADKDKGELHCLDVFRRNLLRPCSNPEPRLSRMRWSWRTRVADKRQQQLIHCVTELREAGIKFRTRKTDRFWDIRFKNGYLEIPKLLIHDGTKSLFSNLIAFEQCHIDSSNDITSYIIFMDNLIDSSEDVRYLHYCGIIEHWLGNDYEVADLFNRLCQEVAFDPQNSYLSQLSNKVDRNYSRKWNVLKAILKHKYFNNPWAYFSFFAALVLLVLTLFQSFFTAYPYFNPPS

SEQ ID NO: 90512 - protein, 477 aa, Arabidopsis thaliana
  peptide (1)..(477): Ceres Seq. ID no. 12724161
  misc_feature (47)..(462): Pfam Name: Plant protein of unknown function Pfam Description: Plant protein of unknown function
  misc_feature (1)..(477): Homolog of NCBI NO: 15229681 NR Description: putative protein; protein id: At3g50130.1
  misc_feature (20)..(477): Homolog of NCBI NO: 15229680 NR Description: putative protein; protein id: At3g50120.1
  misc_feature (1)..(21): Homolog of NCBI NO: 15229680 NR Description: putative protein; protein id: At3g50120.1
  misc_feature (20)..(477): Homolog of NCBI NO: 15229687 NR Description: putative protein; protein id: At3g50170.1
  misc_feature (1)..(27): Homolog of NCBI NO: 15229687 NR Description: putative protein; protein id: At3g50170.1
  misc_feature (8)..(477): Homolog of NCBI NO: 15229684 NR Description: putative protein; protein id: At3g50150.1
  misc_feature (1)..(279): Homolog of NCBI NO: 15229689 NR Description: putative protein; protein id: At3g50180.1
  misc_feature (230)..(477): Homolog of NCBI NO: 15229689 NR Description: putative protein; protein id: At3g50180.1
  misc_feature (1)..(402): Homolog of NCBI NO: 15229682 NR Description: putative protein; protein id: At3g50140.1
  misc_feature (1)..(262): Homolog of NCBI NO: 15229691 NR Description: putative protein; protein id: At3g50190.1
MFTWYFLTLMMRQKLQKQNQKPEETREEWVISIRDKMEQALREDATTSWDKLCIYRVPQYLQENNKKSYFPQTVSLGPFHHGNKHLLPMDRHKWRAVNMVMARTKHDIEMYIDAMKELEDRARACYEGPIDLSSNKFSEMLVLDGCFVLELFRGADEGFSELGYDRNDPVFAMRGSMHSIQRDMVMLENQLPLFVLNRLLEIQLGKRHQTGLVSRLAVRFFDPLMPTDEPLTKTDDSLEQDKFFNPIADKDKGELHCLDVFRRNLLRPCSNPEPRLSRMRWSWRTRVADKRQQQLIHCVTELREAGIKFRTRKTDRFWDIRFKNGYLEIPKLLIHDGTKSLFSNLIAFEQCHIDSSNDITSYIIFMDNLIDSSEDVRYLHYCGIIEHWLGNDYEVADLFNRLCQEVAFDPQNSYLSQLSNKVDRNYSRKWNVLKAILKHKYFNNPWAYFSFFAALVLLVLTLFQSFFTAYPYFNPPS

SEQ ID NO: 90513 - protein, 468 aa, Arabidopsis thaliana
  peptide (1)..(468): Ceres Seq. ID no. 12724162
  misc_feature (38)..(453): Pfam Name: Plant protein of unknown function Pfam Description: Plant protein of unknown function
  misc_feature (1)..(468): Homolog of NCBI NO: 15229681 NR Description: putative protein; protein id: At3g50130.1
  misc_feature (11)..(468): Homolog of NCBI NO: 15229680 NR Description: putative protein; protein id: At3g50120.1
  misc_feature (1)..(12): Homolog of NCBI NO: 15229680 NR Description: putative protein; protein id: At3g50120.1
  misc_feature (11)..(468): Homolog of NCBI NO: 15229687 NR Description: putative protein; protein id: At3g50170.1
  misc_feature (1)..(18): Homolog of NCBI NO: 15229687 NR Description: putative protein; protein id: At3g50170.1
  misc_feature (1)..(468): Homolog of NCBI NO: 15229684 NR Description: putative protein; protein id: At3g50150.1
  misc_feature (1)..(270): Homolog of NCBI NO: 15229689 NR Description: putative protein; protein id: At3g50180.1
  misc_feature (221)..(468): Homolog of NCBI NO: 15229689 NR Description: putative protein; protein id: At3g50180.1
  misc_feature (1)..(393): Homolog of NCBI NO: 15229682 NR Description: putative protein; protein id: At3g50140.1
  misc_feature (1)..(253): Homolog of NCBI NO: 15229691 NR Description: putative protein; protein id: At3g50190.1
MMRQKLQKQNQKPEETREEWVISIRDKMEQALREDATTSWDKLCIYRVPQYLQENNKKSYFPQTVSLGPFHHGNKHLLPMDRHKWRAVNMVMARTKHDIEMYIDAMKELEDRARACYEGPIDLSSNKFSEMLVLDGCFVLELFRGADEGFSELGYDRNDPVFAMRGSMHSIQRDMVMLENQLPLFVLNRLLEIQLGKRHQTGLVSRLAVRFFDPLMPTDEPLTKTDDSLEQDKFFNPIADKDKGELHCLDVFRRNLLRPCSNPEPRLSRMRWSWRTRVADKRQQQLIHCVTELREAGIKFRTRKTDRFWDIRFKNGYLEIPKLLIHDGTKSLFSNLIAFEQCHIDSSNDITSYIIFMDNLIDSSEDVRYLHYCGIIEHWLGNDYEVADLFNRLCQEVAFDPQNSYLSQLSNKVDRNYSRKWNVLKAILKHKYFNNPWAYFSFFAALVLLVLTLFQSFFTAYPYFNPPS

SEQ ID NO: 90514 - DNA, 1530 bp, Arabidopsis thaliana
  misc_feature (1)..(1530): Ceres Seq. ID no. 12724163
  misc_feature: MA Experiment ID: 20000307 Result: Up-regulated in Transcription
  misc_feature: MA Experiment 20000307 PARAMETER Experiment Name: At_Germinating_Seeds_Sub_P Parameter: Age (hr) Value: 24 vs. 0
  misc_feature: MA Experiment 20000307 PARAMETER Experiment Name: At_Germinating_Seeds_Sub_P Parameter: Organism Value: A. thaliana
  misc_feature: MA Experiment 20000307 PARAMETER Experiment Name: At_Germinating_Seeds_Sub_P Parameter: Plant Line Value: WS
  misc_feature: MA Experiment 20000307 PARAMETER Experiment Name: At_Germinating_Seeds_Sub_P Parameter: Tissue Value: Germinating Seeds
atggttttgttttccgatggtcgctcaacttccacccacaaaaggtacagacggttgtcatggttcgtgccaatccacagtttccatgaaattaccagacgtgatctaggccaaaacttgcacaaccacgtggagacttacgtggagcccagtaagatcgaagtaaaagaagaaaagccaagagagacacgagaagaatgggtgatctcgatcaaggacaagatggagaaagcacttagttacgacgcaacaaatagctgggacaagctctgtatctacagagttcctttctatcttcaagagaacgacaagaagtcttacttacctcaaactgtctctattggtccgtaccaccatggaaaggtacacctcagacccatggagcgtcacaaatggcgagcggtcaatatgatcatggcacgtaccaagcacaacattgaaatgtatattgacgccatgaaagagctcgaggaggaggctcgtgcttgctaccaaggtcccattgacatgaagaatagtaatgagttcacagaaatgcttgttcttgatggttgtttcgttctcgagctcttcaagggaacaattcaaggattccagaaaattggatatgcacgtaacgacccggttttcgctaagcgaggattgatgcattcgattcaacgtgacatgataatgttggaaaaccaacttcctctgttcgttctcgaccggttattagggctacaaaccggtacaccgaaccaaacgggtatagtggcagaagtagctgttcggttcttcaaaacactaatgccaactagcgaggtgctgaccaaatcagaaagatcgttagactcgcaggaaaaatccgatgaattgggtgacaatggcgggttgcactgtttggatgtgttccatcgaagtctcatccaatctagtgagacaactaatcaagggactccatatgaggatatgagcatggtggaaaagcaacaacaattgatacattgcgtgacagaactaagaggcgcaggtgttaacttcatgaggaaagaaaccggccagctttgggacattgaattcaaaaacggttatctaaagataccgaaactactaatccatgatggtaccaagtctcttttctcaaatcttattgctttcgagcagtgccatacacaatcaagcaacaacataacatcctacataatcttcatggataatctaataaactcttctcaagatgttagctacttgcaccacgacggtattattgagcattggttagggagtgattctgaagttgcagatttgttcaaccggttatgtaaagaagtgatctttgatccaaaagatgggtatctatctcaactgtctcgtgaagttaaccgttattatagtcgtaagtggaactcgttgaaggctactctaagacaaaagtacttcaataacccttgggcatatttctccttttcagctgcagttattctgctatttctcacattctttcaaagcttctttgctgtctatgcttattataagccactctcttag

SEQ ID NO: 90515 - protein, 509 aa, Arabidopsis thaliana
  peptide (1)..(509): Ceres Seq. ID no. 12724164
  misc_feature (85)..(494): Pfam Name: Plant protein of unknown function Pfam Description: Plant protein of unknown function
  misc_feature (1)..(509): Homolog of NCBI NO: 15229684 NR Description: putative protein; protein id: At3g50150.1
  misc_feature (25)..(509): Homolog of NCBI NO: 15229687 NR Description: putative protein; protein id: At3g50170.1
  misc_feature (30)..(509): Homolog of NCBI NO: 15229680 NR Description: putative protein; protein id: At3g50120.1
  misc_feature (46)..(509): Homolog of NCBI NO: 15229681 NR Description: putative protein; protein id: At3g50130.1
  misc_feature (1)..(272): Homolog of NCBI NO: 15229686 NR Description: putative protein; protein id: At3g50160.1
  misc_feature (286)..(486): Homolog of NCBI NO: 15229686 NR Description: putative protein; protein id: At3g50160.1
  misc_feature (46)..(338): Homolog of NCBI NO: 15229682 NR Description: putative protein; protein id: At3g50140.1
  misc_feature (369)..(509): Homolog of NCBI NO: 15229682 NR Description: putative protein; protein id: At3g50140.1
  misc_feature (38)..(509): Homolog of NCBI NO: 15229689 NR Description: putative protein; protein id: At3g50180.1
  misc_feature (263)..(481): Homolog of NCBI NO: 15229691 NR Description: putative protein; protein id: At3g50190.1
MVLFSDGRSTSTHKRYRRLSWFVPIHSFHEITRRDLGQNLHNHVETYVEPSKIEVKEEKPRETREEWVISIKDKMEKALSYDATNSWDKLCIYRVPFYLQENDKKSYLPQTVSIGPYHHGKVHLRPMERHKWRAVNMIMARTKHNIEMYIDAMKELEEEARACYQGPIDMKNSNEFTEMLVLDGCFVLELFKGTIQGFQKIGYARNDPVFAKRGLMHSIQRDMIMLENQLPLFVLDRLLGLQTGTPNQTGIVAEVAVRFFKTLMPTSEVLTKSERSLDSQEKSDELGDNGGLHCLDVFHRSLIQSSETTNQGTPYEDMSMVEKQQQLIHCVTELRGAGVNFMRKETGQLWDIEFKNGYLKIPKLLIHDGTKSLFSNLIAFEQCHTQSSNNITSYIIFMDNLINSSQDVSYLHHDGIIEHWLGSDSEVADLFNRLCKEVIFDPKDGYLSQLSREVNRYYSRKWNSLKATLRQKYFNNPWAYFSFSAAVILLFLTFFQSFFAVYAYYKPLS

SEQ ID NO: 90516 - protein, 435 aa, Arabidopsis thaliana
  peptide (1)..(435): Ceres Seq. ID no. 12724165
  misc_feature (11)..(420): Pfam Name: Plant protein of unknown function Pfam Description: Plant protein of unknown function
  misc_feature (1)..(435): Homolog of NCBI NO: 15229684 NR Description: putative protein; protein id: At3g50150.1
  misc_feature (1)..(435): Homolog of NCBI NO: 15229687 NR Description: putative protein; protein id: At3g50170.1
  misc_feature (1)..(435): Homolog of NCBI NO: 15229680 NR Description: putative protein; protein id: At3g50120.1
  misc_feature (1)..(435): Homolog of NCBI NO: 15229681 NR Description: putative protein; protein id: At3g50130.1
  misc_feature (1)..(198): Homolog of NCBI NO: 15229686 NR Description: putative protein; protein id: At3g50160.1
  misc_feature (212)..(412): Homolog of NCBI NO: 15229686 NR Description: putative protein; protein id: At3g50160.1
  misc_feature (1)..(264): Homolog of NCBI NO: 15229682 NR Description: putative protein; protein id: At3g50140.1
  misc_feature (295)..(435): Homolog of NCBI NO: 15229682 NR Description: putative protein; protein id: At3g50140.1
  misc_feature (1)..(435): Homolog of NCBI NO: 15229689 NR Description: putative protein; protein id: At3g50180.1
  misc_feature (189)..(407): Homolog of NCBI NO: 15229691 NR Description: putative protein; protein id: At3g50190.1
MEKALSYDATNSWDKLCIYRVPFYLQENDKKSYLPQTVSIGPYHHGKVHLRPMERHKWRAVNMIMARTKHNIEMYIDAMKELEEEARACYQGPIDMKNSNEFTEMLVLDGCFVLELFKGTIQGFQKIGYARNDPVFAKRGLMHSIQRDMIMLENQLPLFVLDRLLGLQTGTPNQTGIVAEVAVRFFKTLMPTSEVLTKSERSLDSQEKSDELGDNGGLHCLDVFHRSLIQSSETTNQGTPYEDMSMVEKQQQLIHCVTELRGAGVNFMRKETGQLWDIEFKNGYLKIPKLLIHDGTKSLFSNLIAFEQCHTQSSNNITSYIIFMDNLINSSQDVSYLHHDGIIEHWLGSDSEVADLFNRLCKEVIFDPKDGYLSQLSREVNRYYSRKWNSLKATLRQKYFNNPWAYFSFSAAVILLFLTFFQSFFAVYAYYKPLS

SEQ ID NO: 90517 - protein, 383 aa, Arabidopsis thaliana
  peptide (1)..(383): Ceres Seq. ID no. 12724166
  misc_feature (1)..(368): Pfam Name: Plant protein of unknown function Pfam Description: Plant protein of unknown function
  misc_feature (1)..(383): Homolog of NCBI NO: 15229684 NR Description: putative protein; protein id: At3g50150.1
  misc_feature (1)..(383): Homolog of NCBI NO: 15229687 NR Description: putative protein; protein id: At3g50170.1
  misc_feature (1)..(383): Homolog of NCBI NO: 15229680 NR Description: putative protein; protein id: At3g50120.1
  misc_feature (1)..(383): Homolog of NCBI NO: 15229681 NR Description: putative protein; protein id: At3g50130.1
  misc_feature (1)..(146): Homolog of NCBI NO: 15229686 NR Description: putative protein; protein id: At3g50160.1
  misc_feature (160)..(360): Homolog of NCBI NO: 15229686 NR Description: putative protein; protein id: At3g50160.1
  misc_feature (1)..(212): Homolog of NCBI NO: 15229682 NR Description: putative protein; protein id: At3g50140.1
  misc_feature (243)..(383): Homolog of NCBI NO: 15229682 NR Description: putative protein; protein id: At3g50140.1
  misc_feature (1)..(383): Homolog of NCBI NO: 15229689 NR Description: putative protein; protein id: At3g50180.1
  misc_feature (137)..(355): Homolog of NCBI NO: 15229691 NR Description: putative protein; protein id: At3g50190.1
MERHKWRAVNMIMARTKHNIEMYIDAMKELEEEARACYQGPIDMKNSNEFTEMLVLDGCFVLELFKGTIQGFQKIGYARNDPVFAKRGLMHSIQRDMIMLENQLPLFVLDRLLGLQTGTPNQTGIVAEVAVRFFKTLMPTSEVLTKSERSLDSQEKSDELGDNGGLHCLDVFHRSLIQSSETTNQGTPYEDMSMVEKQQQLIHCVTELRGAGVNFMRKETGQLWDIEFKNGYLKIPKLLIHDGTKSLFSNLIAFEQCHTQSSNNITSYIIFMDNLINSSQDVSYLHHDGIIEHWLGSDSEVADLFNRLCKEVIFDPKDGYLSQLSREVNRYYSRKWNSLKATLRQKYFNNPWAYFSFSAAVILLFLTFFQSFFAVYAYYKPLS

SEQ ID NO: 90518 - DNA, 1332 bp, Arabidopsis thaliana
  misc_feature (1)..(1332): Ceres Seq. ID no. 12724179
  misc_feature: MA Experiment ID: 20000307 Result: Up-regulated in Transcription
  misc_feature: MA Experiment 20000307 PARAMETER Experiment Name: At_Germinating_Seeds_Sub_P Parameter: Age (hr) Value: 24 vs. 0
  misc_feature: MA Experiment 20000307 PARAMETER Experiment Name: At_Germinating_Seeds_Sub_P Parameter: Organism Value: A. thaliana
  misc_feature: MA Experiment 20000307 PARAMETER Experiment Name: At_Germinating_Seeds_Sub_P Parameter: Plant Line Value: WS
  misc_feature: MA Experiment 20000307 PARAMETER Experiment Name: At_Germinating_Seeds_Sub_P Parameter: Tissue Value: Germinating Seeds
  misc_feature: MA Experiment ID: 20000314 Result: Up-regulated in Transcription
  misc_feature: MA Experiment 20000314 PARAMETER Experiment Name: At_14day_Shoots-Roots_Sub_P Parameter: Age (day) Value: 14
  misc_feature: MA Experiment 20000314 PARAMETER Experiment Name: At_14day_Shoots-Roots_Sub_P Parameter: Organism Value: A. thaliana
  misc_feature: MA Experiment 20000314 PARAMETER Experiment Name: At_14day_Shoots-Roots_Sub_P Parameter: Plant Line Value: WS
  misc_feature: MA Experiment 20000314 PARAMETER Experiment Name: At_14day_Shoots-Roots_Sub_P Parameter: Tissue Value: Roots vs. Whole Plant
  misc_feature: MA Experiment ID: 20000347 Result: Up-regulated in Transcription
  misc_feature: MA Experiment 20000347 PARAMETER Experiment Name: At_2mM_SA_Sub_P Parameter: Age (day) Value: 14
  misc_feature: MA Experiment 20000347 PARAMETER Experiment Name: At_2mM_SA_Sub_P Parameter: Organism Value: A. thaliana
  misc_feature: MA Experiment 20000347 PARAMETER Experiment Name: At_2mM_SA_Sub_P Parameter: Plant Line Value: WS
  misc_feature: MA Experiment 20000347 PARAMETER Experiment Name: At_2mM_SA_Sub_P Parameter: Timepoint (hr) Value: 6
  misc_feature: MA Experiment 20000347 PARAMETER Experiment Name: At_2mM_SA_Sub_P Parameter: Tissue Value: Aerial
  misc_feature: MA Experiment 20000347 PARAMETER Experiment Name: At_2mM_SA_Sub_P Parameter: Treatment Value: 2mM SA vs. No Treatment
  misc_feature: MA Experiment ID: 20000355 Result: Up-regulated in Transcription
  misc_feature: MA Experiment 20000355 PARAMETER Experiment Name: At_Siliques_Sub_P Parameter: Age (day) Value: 21
  misc_feature: MA Experiment 20000355 PARAMETER Experiment Name: At_Siliques_Sub_P Parameter: Organism Value: A. thaliana
  misc_feature: MA Experiment 20000355 PARAMETER Experiment Name: At_Siliques_Sub_P Parameter: Plant Line Value: WS
  misc_feature: MA Experiment 20000355 PARAMETER Experiment Name: At_Siliques_Sub_P Parameter: Tissue Value: Less Than 5mm Siliques vs. Whole Plant
  misc_feature: MA Experiment ID: 20000440 Result: Up-regulated in Transcription
  misc_feature: MA Experiment 20000440 PARAMETER Experiment Name: At_Closed-Flower__Sub_P Parameter: Tissue Value: Closed Flower vs. Whole Plant
atggccgacgtaacttttatttcctcaagcattgttcgacctcaaatcataaaccaagaaggtcgtgaaaagatccatctaactccatttgatcttaatcttctctatgttgattatactcaaagaggtcttctcttccccaaacccgacccggaaacccatttcatctctcgattaagaacctctctttcttctgctctagatatttacttccccttcgctggtcgtcttaacaaagttgaaaatcatgaagacgaaacggtgtcgttttacatcaattgtgacggctctggtgctaaattcatccatgccgtatccgattctgtttcggtaagcgatcttcttcgacctgatggctctgttcctgactttttcaggattttctatcccatgaacggtgtcaaaagcatcgacggcctctcggagcccttgcttgctttacaagttaccgagatgagagatggagttttcatcggttttggttacaatcacatggtcgcagacggtgcttccatctggaatttcttcaggacttggtcaaagatttgctctaatggtcaacgggagaatcttcaacctcttgctctcaaaggattgttcgtggacgggatggatttcccgatacatattccggtttcagacacagagacgtcaccaccaagccgtgagctttctccgacattcaaagagagagtttttcacttcacaaagaggaatatctcagatctcaaagctaaagtcaacggagaaattggcttgcgtgaccataaagtctcgtccttacaagcggtctcggctcacatgtggcgatcaatcattagacacagtggtctaaaccaagaagaaaagacgcgttgctttgtagcagtggatctaaggcagagactaaaccctccgcttgacaaagagtgttttggtcatgtgatctataactcggtagttacaaccacagtgggggagttgcatgatcagggtctagggtgggcttttttgcaaataaataatatgttgagatctttgacgaatgaagactatagaatttatgctgagaattgggttagaaatatgaagattcaaaaatcaggtcttggaagtaaaatgactagggactctgtaattgtgtcaagctctcctcggtttgaagtgtacgataacgatttcggttggggcaaaccgatagcggttcgagctggaccgagtaacagtattagtggcaaactcgtgttttttcgtgggattgaagaaggctgtattgatgttcatgcgtttctattgcccgacgtacttgtgaaactactggctgacgtggaatttctggagaagtgtggctag

SEQ ID NO: 90519 - protein, 443 aa, Arabidopsis thaliana
  peptide (1)..(443): Ceres Seq. ID no. 12724180
  misc_feature (2)..(439): Pfam Name: Transferase family Pfam Description: Transferase family
  misc_feature (1)..(443): Homolog of NCBI NO: 15229709 NR Description: anthranilate - like protein; protein id: At3g50280.1 [Arabidopsis thaliana]
  misc_feature (1)..(440): Homolog of NCBI NO: 15229713 NR Description: anthranilate - like protein; protein id: At3g50300.1 [Arabidopsis thaliana]
  misc_feature (4)..(440): Homolog of NCBI NO: 15229707 NR Description: anthranilate - like protein; protein id: At3g50270.1 [Arabidopsis thaliana]
  misc_feature (1)..(435): Homolog of NCBI NO: 15240844 NR Description: anthranilate N-benzoyltransferase -like protein;
  misc_feature (1)..(364): Homolog of NCBI NO: 11357342 NR Description: hypothetical protein F11C1.130 - Arabidopsis >gi|6523040|emb|CAB62308.1| putative protein [Arabidopsis
  misc_feature (1)..(364): Homolog of NCBI NO: 30693289 NR Description: hydroxycinnamoyl benzoyltransferase-related
  misc_feature (365)..(440): Homolog of NCBI NO: 11357342 NR Description: hypothetical protein F11C1.130 - Arabidopsis >gi|6523040|emb|CAB62308.1| putative protein [Arabidopsis
  misc_feature (365)..(440): Homolog of NCBI NO: 30693289 NR Description: hydroxycinnamoyl benzoyltransferase-related
  misc_feature (1)..(440): Homolog of NCBI NO: 15240227 NR Description: anthranilate protein; protein id: At5g67150.1, supported by cDNA: 114226., by cDNA: gi_17381221 [Arabidopsis thaliana]
  misc_feature (3)..(440): Homolog of NCBI NO: 15240229 NR Description: anthranilate protein; protein id: At5g67160.1, supported by cDNA: 32856.,
MADVTFISSSIVRPQIINQEGREKIHLTPFDLNLLYVDYTQRGLLFPKPDPETHFISRLRTSLSSALDIYFPFAGRLNKVENHEDETVSFYINCDGSGAKFIHAVSDSVSVSDLLRPDGSVPDFFRIFYPMNGVKSIDGLSEPLLALQVTEMRDGVFIGFGYNHMVADGASIWNFFRTWSKICSNGQRENLQPLALKGLFVDGMDFPIHIPVSDTETSPPSRELSPTFKERVFHFTKRNISDLKAKVNGEIGLRDHKVSSLQAVSAHMWRSIIRHSGLNQEEKTRCFVAVDLRQRLNPPLDKECFGHVIYNSVVTTTVGELHDQGLGWAFLQINNMLRSLTNEDYRIYAENWVRNMKIQKSGLGSKMTRDSVIVSSSPRFEVYDNDFGWGKPIAVRAGPSNSISGKLVFFRGIEEGCIDVHAFLLPDVLVKLLADVEFLEKCG

SEQ ID NO: 90520 - protein, 313 aa, Arabidopsis thaliana
  peptide (1)..(313): Ceres Seq. ID no. 12724181
  misc_feature (1)..(309): Pfam Name: Transferase family Pfam Description: Transferase family
  misc_feature (1)..(313): Homolog of NCBI NO: 15229709 NR Description: anthranilate - like protein; protein id: At3g50280.1 [Arabidopsis thaliana]
  misc_feature (1)..(310): Homolog of NCBI NO: 15229713 NR Description: anthranilate - like protein; protein id: At3g50300.1 [Arabidopsis thaliana]
  misc_feature (1)..(310): Homolog of NCBI NO: 15229707 NR Description: anthranilate - like protein; protein id: At3g50270.1 [Arabidopsis thaliana]
  misc_feature (1)..(305): Homolog of NCBI NO: 15240844 NR Description: anthranilate N-benzoyltransferase -like protein;
  misc_feature (1)..(234): Homolog of NCBI NO: 11357342 NR Description: hypothetical protein F11C1.130 - Arabidopsis >gi|6523040|emb|CAB62308.1| putative protein [Arabidopsis
  misc_feature (1)..(234): Homolog of NCBI NO: 30693289 NR Description: hydroxycinnamoyl benzoyltransferase-related
  misc_feature (235)..(310): Homolog of NCBI NO: 11357342 NR Description: hypothetical protein F11C1.130 - Arabidopsis >gi|6523040|emb|CAB62308.1| putative protein [Arabidopsis
  misc_feature (235)..(310): Homolog of NCBI NO: 30693289 NR Description: hydroxycinnamoyl benzoyltransferase-related
  misc_feature (1)..(310): Homolog of NCBI NO: 15240227 NR Description: anthranilate protein; protein id: At5g67150.1, supported by cDNA: 114226., by cDNA: gi_17381221 [Arabidopsis thaliana]
  misc_feature (1)..(310): Homolog of NCBI NO: 15240229 NR Description: anthranilate protein; protein id: At5g67160.1, supported by cDNA: 32856.,
MNGVKSIDGLSEPLLALQVTEMRDGVFIGFGYNHMVADGASIWNFFRTWSKICSNGQRENLQPLALKGLFVDGMDFPIHIPVSDTETSPPSRELSPTFKERVFHFTKRNISDLKAKVNGEIGLRDHKVSSLQAVSAHMWRSIIRHSGLNQEEKTRCFVAVDLRQRLNPPLDKECFGHVIYNSVVTTTVGELHDQGLGWAFLQINNMLRSLTNEDYRIYAENWVRNMKIQKSGLGSKMTRDSVIVSSSPRFEVYDNDFGWGKPIAVRAGPSNSISGKLVFFRGIEEGCIDVHAFLLPDVLVKLLADVEFLEKCG

SEQ ID NO: 90521 - protein, 292 aa, Arabidopsis thaliana
  peptide (1)..(292): Ceres Seq. ID no. 12724182
  misc_feature (1)..(288): Pfam Name: Transferase family Pfam Description: Transferase family
  misc_feature (1)..(292): Homolog of NCBI NO: 15229709 NR Description: anthranilate - like protein; protein id: At3g50280.1 [Arabidopsis thaliana]
  misc_feature (1)..(289): Homolog of NCBI NO: 15229713 NR Description: anthranilate - like protein; protein id: At3g50300.1 [Arabidopsis thaliana]
  misc_feature (1)..(289): Homolog of NCBI NO: 15229707 NR Description: anthranilate - like protein; protein id: At3g50270.1 [Arabidopsis thaliana]
  misc_feature (1)..(284): Homolog of NCBI NO: 15240844 NR Description: anthranilate N-benzoyltransferase -like protein;
  misc_feature (1)..(213): Homolog of NCBI NO: 11357342 NR Description: hypothetical protein F11C1.130 - Arabidopsis >gi|6523040|emb|CAB62308.1| putative protein [Arabidopsis
  misc_feature (1)..(213): Homolog of NCBI NO: 30693289 NR Description: hydroxycinnamoyl benzoyltransferase-related
  misc_feature (214)..(289): Homolog of NCBI NO: 11357342 NR Description: hypothetical protein F11C1.130 - Arabidopsis >gi|6523040|emb|CAB62308.1| putative protein [Arabidopsis
  misc_feature (214)..(289): Homolog of NCBI NO: 30693289 NR Description: hydroxycinnamoyl benzoyltransferase-related
  misc_feature (1)..(289): Homolog of NCBI NO: 15240227 NR Description: anthranilate protein; protein id: At5g67150.1, supported by cDNA: 114226., by cDNA: gi_17381221 [Arabidopsis thaliana]
  misc_feature (1)..(289): Homolog of NCBI NO: 15240229 NR Description: anthranilate protein; protein id: At5g67160.1, supported by cDNA: 32856.,
MRDGVFIGFGYNHMVADGASIWNFFRTWSKICSNGQRENLQPLALKGLFVDGMDFPIHIPVSDTETSPPSRELSPTFKERVFHFTKRNISDLKAKVNGEIGLRDHKVSSLQAVSAHMWRSIIRHSGLNQEEKTRCFVAVDLRQRLNPPLDKECFGHVIYNSVVTTTVGELHDQGLGWAFLQINNMLRSLTNEDYRIYAENWVRNMKIQKSGLGSKMTRDSVIVSSSPRFEVYDNDFGWGKPIAVRAGPSNSISGKLVFFRGIEEGCIDVHAFLLPDVLVKLLADVEFLEKCG

SEQ ID NO: 90522 - DNA, 696 bp, Arabidopsis thaliana
  misc_feature (1)..(696): Ceres Seq. ID no. 12724191
  misc_feature: MA Experiment ID: 20000307 Result: Up-regulated in Transcription
  misc_feature: MA Experiment 20000307 PARAMETER Experiment Name: At_Germinating_Seeds_Sub_P Parameter: Age (hr) Value: 24 vs. 0
  misc_feature: MA Experiment 20000307 PARAMETER Experiment Name: At_Germinating_Seeds_Sub_P Parameter: Organism Value: A. thaliana
  misc_feature: MA Experiment 20000307 PARAMETER Experiment Name: At_Germinating_Seeds_Sub_P Parameter: Plant Line Value: WS
  misc_feature: MA Experiment 20000307 PARAMETER Experiment Name: At_Germinating_Seeds_Sub_P Parameter: Tissue Value: Germinating Seeds
  misc_feature: MA Experiment ID: 20000355 Result: Down-regulated in Transcription
  misc_feature: MA Experiment 20000355 PARAMETER Experiment Name: At_Siliques_Sub_P Parameter: Age (day) Value: 21
  misc_feature: MA Experiment 20000355 PARAMETER Experiment Name: At_Siliques_Sub_P Parameter: Organism Value: A. thaliana
  misc_feature: MA Experiment 20000355 PARAMETER Experiment Name: At_Siliques_Sub_P Parameter: Plant Line Value: WS
  misc_feature: MA Experiment 20000355 PARAMETER Experiment Name: At_Siliques_Sub_P Parameter: Tissue Value: Less Than 5mm Siliques vs. Whole Plant
  misc_feature: MA Experiment ID: 20000440 Result: Up-regulated in Transcription
  misc_feature: MA Experiment 20000440 PARAMETER Experiment Name: At_Closed-Flower__Sub_P Parameter: Tissue Value: Closed Flower vs. Whole Plant
atggataactccgacattctaatgaacatgatgatgcagcagatggagaagcttcctgaacacttctctaactcaaaccctaaccctaatccccataacattatgatgctttctgaatccaacacccacccgttcttcttcaaccccactcattctcatctcccatttgaccaaaccatgcctcaccaccaacccggtttaaatttccggtacgccccctccccgtcatcatctctcccggagaagagaggaggctgcagcgacaacgccaacatggcggcgatgagagagatgatctttcgaatagccgtgatgcagcctatacatattgatccggaatccgtaaagccaccaaagagaaagaacgtgaggatctctaaggatccacagagcgtggcagctcggcatcgaagggagaggataagcgagcggattcggattcttcagcggcttgttcccggtgggactaagatggatacggcgtcgatgctcgatgaggctatccattacgttaagtttctcaagaagcaagtgcagtcgctggaggaacatgcggtggttaacggcggaggaatgacggcggtggccggaggagcacttgcgggtactgttggtggaggatatggaggaaaagggtgtggcattatgcggtctgatcatcaccagatgcttggaaatgcacagattcttagatga

SEQ ID NO: 90523 - protein, 231 aa, Arabidopsis thaliana
  peptide (1)..(231): Ceres Seq. ID no. 12724192
  misc_feature (128)..(175): Pfam Name: Helix-loop-helix DNA-binding domain Pfam Description: Helix-loop-helix DNA-binding domain
  misc_feature (1)..(231): Homolog of NCBI NO: 15229725 NR Description: putative protein; protein id: At3g50330.1
  misc_feature (1)..(231): Homolog of NCBI NO: 15240189 NR Description: putative protein; protein id: At5g67060.1, by cDNA: gi_20127096 [Arabidopsis thaliana] emb|CAB62312.1~gene_id:K21H1.2~similar to unknown protein
  misc_feature (92)..(184): Homolog of NCBI NO: 15242494 NR Description: putative protein; protein id: At5g09750.1
  misc_feature (29)..(187): Homolog of NCBI NO: 15236714 NR Description: hypothetical protein; protein id: At4g00120.1
  misc_feature (76)..(182): Homolog of NCBI NO: 9294680 NR Description: emb|CAB62312.1~gene_id:MHC9.1~similar to unknown
  misc_feature (76)..(182): Homolog of NCBI NO: 15232534 NR Description: hypothetical protein; protein id: At3g21330.1, by cDNA: gi_20127094 [Arabidopsis thaliana]
  misc_feature (76)..(182): Homolog of NCBI NO: 28393737 NR Description: unknown protein [Arabidopsis thaliana]
  misc_feature (88)..(182): Homolog of NCBI NO: 34910410 NR Description: P0692C11.28 [Oryza sativa (japonica
  misc_feature (88)..(182): Homolog of NCBI NO: 15289790 NR Description: P0002B05.9 [Oryza sativa (japonica
  misc_feature (88)..(182): Homolog of NCBI NO: 34914234 NR Description: P0697C12.24 [Oryza sativa (japonica
MDNSDILMNMMMQQMEKLPEHFSNSNPNPNPHNIMMLSESNTHPFFFNPTHSHLPFDQTMPHHQPGLNFRYAPSPSSSLPEKRGGCSDNANMAAMREMIFRIAVMQPIHIDPESVKPPKRKNVRISKDPQSVAARHRRERISERIRILQRLVPGGTKMDTASMLDEAIHYVKFLKKQVQSLEEHAVVNGGGMTAVAGGALAGTVGGGYGGKGCGIMRSDHHQMLGNAQILR

SEQ ID NO: 90524 - protein, 224 aa, Arabidopsis thaliana
  peptide (1)..(224): Ceres Seq. ID no. 12724193
  misc_feature (121)..(168): Pfam Name: Helix-loop-helix DNA-binding domain Pfam Description: Helix-loop-helix DNA-binding domain
  misc_feature (1)..(224): Homolog of NCBI NO: 15229725 NR Description: putative protein; protein id: At3g50330.1
  misc_feature (1)..(224): Homolog of NCBI NO: 15240189 NR Description: putative protein; protein id: At5g67060.1, by cDNA: gi_20127096 [Arabidopsis thaliana] emb|CAB62312.1~gene_id:K21H1.2~similar to unknown protein
  misc_feature (85)..(177): Homolog of NCBI NO: 15242494 NR Description: putative protein; protein id: At5g09750.1
  misc_feature (22)..(180): Homolog of NCBI NO: 15236714 NR Description: hypothetical protein; protein id: At4g00120.1
  misc_feature (69)..(175): Homolog of NCBI NO: 9294680 NR Description: emb|CAB62312.1~gene_id:MHC9.1~similar to unknown
  misc_feature (69)..(175): Homolog of NCBI NO: 15232534 NR Description: hypothetical protein; protein id: At3g21330.1, by cDNA: gi_20127094 [Arabidopsis thaliana]
  misc_feature (69)..(175): Homolog of NCBI NO: 28393737 NR Description: unknown protein [Arabidopsis thaliana]
  misc_feature (81)..(175): Homolog of NCBI NO: 34910410 NR Description: P0692C11.28 [Oryza sativa (japonica
  misc_feature (81)..(175): Homolog of NCBI NO: 15289790 NR Description: P0002B05.9 [Oryza sativa (japonica
  misc_feature (81)..(175): Homolog of NCBI NO: 34914234 NR Description: P0697C12.24 [Oryza sativa (japonica
MNMMMQQMEKLPEHFSNSNPNPNPHNIMMLSESNTHPFFFNPTHSHLPFDQTMPHHQPGLNFRYAPSPSSSLPEKRGGCSDNANMAAMREMIFRIAVMQPIHIDPESVKPPKRKNVRISKDPQSVAARHRRERISERIRILQRLVPGGTKMDTASMLDEAIHYVKFLKKQVQSLEEHAVVNGGGMTAVAGGALAGTVGGGYGGKGCGIMRSDHHQMLGNAQILR

SEQ ID NO: 90525 - protein, 222 aa, Arabidopsis thaliana
  peptide (1)..(222): Ceres Seq. ID no. 12724194
  misc_feature (119)..(166): Pfam Name: Helix-loop-helix DNA-binding domain Pfam Description: Helix-loop-helix DNA-binding domain
  misc_feature (1)..(222): Homolog of NCBI NO: 15229725 NR Description: putative protein; protein id: At3g50330.1
  misc_feature (1)..(222): Homolog of NCBI NO: 15240189 NR Description: putative protein; protein id: At5g67060.1, by cDNA: gi_20127096 [Arabidopsis thaliana] emb|CAB62312.1~gene_id:K21H1.2~similar to unknown protein
  misc_feature (83)..(175): Homolog of NCBI NO: 15242494 NR Description: putative protein; protein id: At5g09750.1
  misc_feature (20)..(178): Homolog of NCBI NO: 15236714 NR Description: hypothetical protein; protein id: At4g00120.1
  misc_feature (67)..(173): Homolog of NCBI NO: 9294680 NR Description: emb|CAB62312.1~gene_id:MHC9.1~similar to unknown
  misc_feature (67)..(173): Homolog of NCBI NO: 15232534 NR Description: hypothetical protein; protein id: At3g21330.1, by cDNA: gi_20127094 [Arabidopsis thaliana]
  misc_feature (67)..(173): Homolog of NCBI NO: 28393737 NR Description: unknown protein [Arabidopsis thaliana]
  misc_feature (79)..(173): Homolog of NCBI NO: 34910410 NR Description: P0692C11.28 [Oryza sativa (japonica
  misc_feature (79)..(173): Homolog of NCBI NO: 15289790 NR Description: P0002B05.9 [Oryza sativa (japonica
  misc_feature (79)..(173): Homolog of NCBI NO: 34914234 NR Description: P0697C12.24 [Oryza sativa (japonica
MMMQQMEKLPEHFSNSNPNPNPHNIMMLSESNTHPFFFNPTHSHLPFDQTMPHHQPGLNFRYAPSPSSSLPEKRGGCSDNANMAAMREMIFRIAVMQPIHIDPESVKPPKRKNVRISKDPQSVAARHRRERISERIRILQRLVPGGTKMDTASMLDEAIHYVKFLKKQVQSLEEHAVVNGGGMTAVAGGALAGTVGGGYGGKGCGIMRSDHHQMLGNAQILR

SEQ ID NO: 90526 - DNA, 1401 bp, Arabidopsis thaliana
  misc_feature (1)..(1401): Ceres Seq. ID no. 12724197
  misc_feature: MA Experiment ID: 20000348 Result: Up-regulated in Transcription
  misc_feature: MA Experiment 20000348 PARAMETER Experiment Name: At_100uM_ABA_Sub_P Parameter: Age (day) Value: 14
  misc_feature: MA Experiment 20000348 PARAMETER Experiment Name: At_100uM_ABA_Sub_P Parameter: Organism Value: A. thaliana
  misc_feature: MA Experiment 20000348 PARAMETER Experiment Name: At_100uM_ABA_Sub_P Parameter: Plant Line Value: WS
  misc_feature: MA Experiment 20000348 PARAMETER Experiment Name: At_100uM_ABA_Sub_P Parameter: Timepoint (hr) Value: 1
  misc_feature: MA Experiment 20000348 PARAMETER Experiment Name: At_100uM_ABA_Sub_P Parameter: Tissue Value: Aerial
  misc_feature: MA Experiment 20000348 PARAMETER Experiment Name: At_100uM_ABA_Sub_P Parameter: Treatment Value: 100uM ABA vs. No Treatment
  misc_feature: MA Experiment ID: 20000352 Result: Up-regulated in Transcription
  misc_feature: MA Experiment 20000352 PARAMETER Experiment Name: At_Drought_Sub_P Parameter: Age (day) Value: 7
  misc_feature: MA Experiment 20000352 PARAMETER Experiment Name: At_Drought_Sub_P Parameter: Organism Value: A. thaliana
  misc_feature: MA Experiment 20000352 PARAMETER Experiment Name: At_Drought_Sub_P Parameter: Plant Line Value: WS
  misc_feature: MA Experiment 20000352 PARAMETER Experiment Name: At_Drought_Sub_P Parameter: Timepoint (hr) Value: 6
  misc_feature: MA Experiment 20000352 PARAMETER Experiment Name: At_Drought_Sub_P Parameter: Tissue Value: Whole Plant
  misc_feature: MA Experiment 20000352 PARAMETER Experiment Name: At_Drought_Sub_P Parameter: Treatment Value: Drought vs. No Drought
atgcataagaaaggtacaagcagagacgtaaatagccaagcatttacaaaactaacgaaagtagaaactattccagatccagacatttacgacataacctacgtagatatctctccctccgaaggctcctcttcaccattatccaaatcaccatggtccgttcaagtcgatccatccgccgtagattctccgtatcattcggtgaaagttacgacggatacaaccaaagaaaaatcaaccaaccactctcctaatattctcttggggtcacttgttcgcgaagaaggtcatatctattcattagctacatcaggagatttactctacacaggatctgattccaagaacattagggtttggaaaaaccatgttgagttctcgagttttaaatcgaatagtggattggttaaagccattgttcttgctggagataaaatctttaccggtcatcaagatggtaagatccgtgtgtggaaagctgcatctaaagaatcaaacgttcatcgtcgtgtaggtacaatgcctaaccttctcgattatataagaaactccattgttccttcttcttacttcaacttcacgcgacgtaatcgtagcagtgctgcgttagggtttcgtcatttagacgcgatttcttgtcttgcgttaagcgaagataaacggttgttgtactctggttcttgggataaaacgtttaaggtttggagagtttcggatttgcggtgtgtggaatctgtgaacgctcatgaagatgcggtaaacgctgtcgtttccggttttgacggtttggtttttaccggttcagctgatggaacggttaaggtttggagaagagaagatcaagcgaaggatacgaaacatttcttctctgagacgttattgaaacaagactgtgccgttacggcgatcgctgtagatcaaagcgcgacgttagtttattgtggttcgtctgacggaaccgttaatttttgggaacgtgagaataatatgaaaaacggcggcgttttgaaaggtcataaactcgccgtgctttgtcttgtcgcggcggggaatttgatgtttagtggttctgctgatttagggatacgtgtgtggaggagaccagaaggtggaggtgagcatgtttgtctttcggttttgaccggacatgctggtccggtgaagtgtttggcggtggagagagatcaagaatcggtttccggtgagagacggtggattgtgtatagtgggagtttagatagatcggtgaagatgtggcgtgtgtcggagagttcaccgccgatggtgaatcaagagtttaagttgccggatcagtttggtggtggtggtggtggtggtccggcggagttaacggtggctcctagcttctcggctcaagggaggattagtccacaaaaatag

SEQ ID NO: 90527 - protein, 466 aa, Arabidopsis thaliana
  peptide (1)..(466): Ceres Seq. ID no. 12724198
  misc_feature (1)..(466): Homolog of NCBI NO: 15229740 NR Description: G-protein beta family; protein id: At3g50390.1
  misc_feature (63)..(438): Homolog of NCBI NO: 15225317 NR Description: G-protein beta family; protein id: At2g26490.1
  misc_feature (26)..(423): Homolog of NCBI NO: 15235354 NR Description: G-protein beta family; protein id: At4g34380.1
  misc_feature (4)..(429): Homolog of NCBI NO: 15230244 NR Description: hypothetical protein; protein id: At3g18950.1
  misc_feature (2)..(423): Homolog of NCBI NO: 15222143 NR Description: En/Spm-like transposon protein, putative; protein At1g49450.1, supported by cDNA: gi_17979258 [Arabidopsis >gi|25405310|pir||B96531 hypothetical protein F13F21.11
  misc_feature (2)..(423): Homolog of NCBI NO: 17979259 NR Description: At1g49450/F13F21_11 [Arabidopsis thaliana]
  misc_feature (87)..(447): Homolog of NCBI NO: 31126785 NR Description: putative WD repeat-protein [Oryza sativa
  misc_feature (72)..(421): Homolog of NCBI NO: 15220271 NR Description: G-protein beta family; protein id: At1g47610.1
  misc_feature (88)..(425): Homolog of NCBI NO: 15221675 NR Description: G-protein beta family; protein id: At1g24130.1
  misc_feature (45)..(421): Homolog of NCBI NO: 15231088 NR Description: G-protein beta family; protein id: At3g51930.1
MHKKGTSRDVNSQAFTKLTKVETIPDPDIYDITYVDISPSEGSSSPLSKSPWSVQVDPSAVDSPYHSVKVTTDTTKEKSTNHSPNILLGSLVREEGHIYSLATSGDLLYTGSDSKNIRVWKNHVEFSSFKSNSGLVKAIVLAGDKIFTGHQDGKIRVWKAASKESNVHRRVGTMPNLLDYIRNSIVPSSYFNFTRRNRSSAALGFRHLDAISCLALSEDKRLLYSGSWDKTFKVWRVSDLRCVESVNAHEDAVNAVVSGFDGLVFTGSADGTVKVWRREDQAKDTKHFFSETLLKQDCAVTAIAVDQSATLVYCGSSDGTVNFWERENNMKNGGVLKGHKLAVLCLVAAGNLMFSGSADLGIRVWRRPEGGGEHVCLSVLTGHAGPVKCLAVERDQESVSGERRWIVYSGSLDRSVKMWRVSESSPPMVNQEFKLPDQFGGGGGGGPAELTVAPSFSAQGRISPQK

SEQ ID NO: 90528 - protein, 293 aa, Arabidopsis thaliana
  peptide (1)..(293): Ceres Seq. ID no. 12724199
  misc_feature (1)..(293): Homolog of NCBI NO: 15229740 NR Description: G-protein beta family; protein id: At3g50390.1
  misc_feature (1)..(265): Homolog of NCBI NO: 15225317 NR Description: G-protein beta family; protein id: At2g26490.1
  misc_feature (1)..(250): Homolog of NCBI NO: 15235354 NR Description: G-protein beta family; protein id: At4g34380.1
  misc_feature (1)..(256): Homolog of NCBI NO: 15230244 NR Description: hypothetical protein; protein id: At3g18950.1
  misc_feature (1)..(250): Homolog of NCBI NO: 15222143 NR Description: En/Spm-like transposon protein, putative; protein At1g49450.1, supported by cDNA: gi_17979258 [Arabidopsis >gi|25405310|pir||B96531 hypothetical protein F13F21.11
  misc_feature (1)..(250): Homolog of NCBI NO: 17979259 NR Description: At1g49450/F13F21_11 [Arabidopsis thaliana]
  misc_feature (1)..(274): Homolog of NCBI NO: 31126785 NR Description: putative WD repeat-protein [Oryza sativa
  misc_feature (1)..(248): Homolog of NCBI NO: 15220271 NR Description: G-protein beta family; protein id: At1g47610.1
  misc_feature (1)..(252): Homolog of NCBI NO: 15221675 NR Description: G-protein beta family; protein id: At1g24130.1
  misc_feature (1)..(248): Homolog of NCBI NO: 15231088 NR Description: G-protein beta family; protein id: At3g51930.1
MPNLLDYIRNSIVPSSYFNFTRRNRSSAALGFRHLDAISCLALSEDKRLLYSGSWDKTFKVWRVSDLRCVESVNAHEDAVNAVVSGFDGLVFTGSADGTVKVWRREDQAKDTKHFFSETLLKQDCAVTAIAVDQSATLVYCGSSDGTVNFWERENNMKNGGVLKGHKLAVLCLVAAGNLMFSGSADLGIRVWRRPEGGGEHVCLSVLTGHAGPVKCLAVERDQESVSGERRWIVYSGSLDRSVKMWRVSESSPPMVNQEFKLPDQFGGGGGGGPAELTVAPSFSAQGRISPQK

SEQ ID NO: 90529 - DNA, 1691 bp, Arabidopsis thaliana
  misc_feature (1)..(1691): Ceres Seq. ID no. 12724226
  misc_feature: MA Experiment ID: 20000185 Result: Up-regulated in Transcription
  misc_feature: MA Experiment 20000185 PARAMETER Experiment Name: At_Roots__P Parameter: Age (day) Value: 7 vs. 21
  misc_feature: MA Experiment 20000185 PARAMETER Experiment Name: At_Roots__P Parameter: Organism Value: A. thaliana
  misc_feature: MA Experiment 20000185 PARAMETER Experiment Name: At_Roots__P Parameter: Tissue Value: Roots vs. Whole Plant
  misc_feature: MA Experiment ID: 20000234 Result: Up-regulated in Transcription
  misc_feature: MA Experiment 20000234 PARAMETER Experiment Name: At_Siliques_P Parameter: Age (day) Value: 21
  misc_feature: MA Experiment 20000234 PARAMETER Experiment Name: At_Siliques_P Parameter: Organism Value: A. thaliana
  misc_feature: MA Experiment 20000234 PARAMETER Experiment Name: At_Siliques_P Parameter: Plant Line Value: WS
  misc_feature: MA Experiment 20000234 PARAMETER Experiment Name: At_Siliques_P Parameter: Tissue Value: Less Than 5mm Siliques vs. Whole Plant
  misc_feature: MA Experiment ID: 20000495 Result: Up-regulated in Transcription
  misc_feature: MA Experiment 20000495 PARAMETER Experiment Name: At_Guard_Cells_P Parameter: Harvest Date Value: 8/2/2002
  misc_feature: MA Experiment 20000495 PARAMETER Experiment Name: At_Guard_Cells_P Parameter: Organism Value: A. thaliana
  misc_feature: MA Experiment 20000495 PARAMETER Experiment Name: At_Guard_Cells_P Parameter: Tissue Value: Guard Cells vs. Leaves
  misc_feature: MA Experiment ID: 20000496 Result: Up-regulated in Transcription
  misc_feature: MA Experiment 20000496 PARAMETER Experiment Name: At_Guard_Cells_P Parameter: Harvest Date Value: 7/19/2002
  misc_feature: MA Experiment 20000496 PARAMETER Experiment Name: At_Guard_Cells_P Parameter: Organism Value: Canola
  misc_feature: MA Experiment 20000496 PARAMETER Experiment Name: At_Guard_Cells_P Parameter: Tissue Value: Guard Cells vs. Leaves
gagtgagagagagagagaaactagctccatgttcgaaacagagcatcatactctcttacctcttcttcttctcccatcgcttttgtctcttcttctcttcttgattctcttgaagagaagaaatagaaaaaccagattcaatctacctccgggtaaatccggttggccatttcttggtgaaaccatcggttatcttaaaccgtacaccgccacaacactcggtgacttcatgcaacaacatgtctccaagtatggtaagatatatagatcgaacttgtttggagaaccaacgatcgtatcagctgatgctggacttaatagattcatattacaaaacgaaggaaggctctttgaatgtagttatcctagaagtataggtgggattcttgggaaatggtcgatgcttgttcttgttggtgacatgcatagagatatgagaagtatctcgcttaacttcttaagtcacgcacgtcttagaactattctacttaaagatgttgagagacatactttgtttgttcttgattcttggcaacaaaactctattttctctgctcaagacgaggccaaaaagtttacgtttaatctaatggcgaagcatataatgagtatggatcctggagaagaagaaacagagcaattaaagaaagagtatgtaactttcatgaaaggagttgtctctgctcctctaaatctaccaggaactgcttatcataaagctcttcagtcacgagcaacgatattgaagttcattgagaggaaaatggaagagagaaaattggatatcaaggaagaagatcaagaagaagaagaagtgaaaacagaggatgaagcagagatgagtaagagtgatcatgttaggaaacaaagaacagacgatgatcttttgggatgggttttgaaacattcgaatttatcgacggagcaaattctcgatctcattcttagtttgttatttgccggacatgagacttcttctgtagccattgctctcgctatcttcttcttgcaagcttgccctaaagccgttgaagagcttagggaagagcatcttgagatcgcgagggccaagaaggaactaggagagtcagaattaaattgggatgattacaagaaaatggactttactcaatgtgttataaatgaaactcttcgattgggaaatgtagttaggtttttgcatcgcaaagcactcaaagatgttcggtacaaaggatacgatatccctagtgggtggaaagtgttaccggtgatctcagccgtacatttggataattctcgttatgaccaacctaatctctttaatccttggagatggcaacagcaaaacaacggagcgtcatcctcaggaagtggtagtttttcgacgtggggaaacaactacatgccgtttggaggagggccaaggctatgtgctggttcagagctagccaagttagaaatggcagtgtttattcatcatctagttcttaaattcaattgggaattagcagaagatgataaaccatttgcttttccttttgttgattttcctaacggtttgcctattagggtttctcgtattctgtaaaaaaaaaaaaagatgaaagtatttttattctcttcttttttttttgataattttaaatcattttttttgcccaatgatatataaaaatttggataaataatattattggatattcgttttt

SEQ ID NO: 90530 - protein, 522 aa, Arabidopsis thaliana
  peptide (1)..(522): Ceres Seq. ID no. 12724227
  misc_feature (10)..(522): Homolog of NCBI NO: 15229822 NR Description: steroid 22-alpha-hydroxylase (DWF4); protein id:
  misc_feature (10)..(522): Homolog of NCBI NO: 2935342 NR Description: steroid 22-alpha-hydroxylase; DWF4; CYP90B1
  misc_feature (21)..(318): Homolog of NCBI NO: 15239203 NR Description: cytochrome p450, putative; protein id: supported by cDNA: 36334., supported by cDNA: gi_14596098, by cDNA: gi_15450716, supported by cDNA: gi_17380617, supported
  misc_feature (289)..(520): Homolog of NCBI NO: 15239203 NR Description: cytochrome p450, putative; protein id: supported by cDNA: 36334., supported by cDNA: gi_14596098, by cDNA: gi_15450716, supported by cDNA: gi_17380617, supported
  misc_feature (272)..(518): Homolog of NCBI NO: 22326806 NR Description: cytochrome p450 family; protein id: At5g14400.1
  misc_feature (54)..(276): Homolog of NCBI NO: 22326806 NR Description: cytochrome p450 family; protein id: At5g14400.1
  misc_feature (271)..(521): Homolog of NCBI NO: 34902330 NR Description: Putative steroid 22-alpha-hydroxylase [Oryza
  misc_feature (294)..(517): Homolog of NCBI NO: 32487441 NR Description: OSJNBa0016O02.25 [Oryza sativa (japonica
  misc_feature (19)..(181): Homolog of NCBI NO: 32487441 NR Description: OSJNBa0016O02.25 [Oryza sativa (japonica
  misc_feature (42)..(319): Homolog of NCBI NO: 34902330 NR Description: Putative steroid 22-alpha-hydroxylase [Oryza
SERERETSSMFETEHHTLLPLLLLPSLLSLLLFLILLKRRNRKTRFNLPPGKSGWPFLGETIGYLKPYTATTLGDFMQQHVSKYGKIYRSNLFGEPTIVSADAGLNRFILQNEGRLFECSYPRSIGGILGKWSMLVLVGDMHRDMRSISLNFLSHARLRTILLKDVERHTLFVLDSWQQNSIFSAQDEAKKFTFNLMAKHIMSMDPGEEETEQLKKEYVTFMKGVVSAPLNLPGTAYHKALQSRATILKFIERKMEERKLDIKEEDQEEEEVKTEDEAEMSKSDHVRKQRTDDDLLGWVLKHSNLSTEQILDLILSLLFAGHETSSVAIALAIFFLQACPKAVEELREEHLEIARAKKELGESELNWDDYKKMDFTQCVINETLRLGNVVRFLHRKALKDVRYKGYDIPSGWKVLPVISAVHLDNSRYDQPNLFNPWRWQQQNNGASSSGSGSFSTWGNNYMPFGGGPRLCAGSELAKLEMAVFIHHLVLKFNWELAEDDKPFAFPFVDFPNGLPIRVSRIL

SEQ ID NO: 90531 - protein, 513 aa, Arabidopsis thaliana
  peptide (1)..(513): Ceres Seq. ID no. 12724228
  misc_feature (1)..(513): Homolog of NCBI NO: 15229822 NR Description: steroid 22-alpha-hydroxylase (DWF4); protein id:
  misc_feature (1)..(513): Homolog of NCBI NO: 2935342 NR Description: steroid 22-alpha-hydroxylase; DWF4; CYP90B1
  misc_feature (12)..(309): Homolog of NCBI NO: 15239203 NR Description: cytochrome p450, putative; protein id: supported by cDNA: 36334., supported by cDNA: gi_14596098, by cDNA: gi_15450716, supported by cDNA: gi_17380617, supported
  misc_feature (280)..(511): Homolog of NCBI NO: 15239203 NR Description: cytochrome p450, putative; protein id: supported by cDNA: 36334., supported by cDNA: gi_14596098, by cDNA: gi_15450716, supported by cDNA: gi_17380617, supported
  misc_feature (263)..(509): Homolog of NCBI NO: 22326806 NR Description: cytochrome p450 family; protein id: At5g14400.1
  misc_feature (45)..(267): Homolog of NCBI NO: 22326806 NR Description: cytochrome p450 family; protein id: At5g14400.1
  misc_feature (262)..(512): Homolog of NCBI NO: 34902330 NR Description: Putative steroid 22-alpha-hydroxylase [Oryza
  misc_feature (285)..(508): Homolog of NCBI NO: 32487441 NR Description: OSJNBa0016O02.25 [Oryza sativa (japonica
  misc_feature (10)..(172): Homolog of NCBI NO: 32487441 NR Description: OSJNBa0016O02.25 [Oryza sativa (japonica
  misc_feature (33)..(310): Homolog of NCBI NO: 34902330 NR Description: Putative steroid 22-alpha-hydroxylase [Oryza
MFETEHHTLLPLLLLPSLLSLLLFLILLKRRNRKTRFNLPPGKSGWPFLGETIGYLKPYTATTLGDFMQQHVSKYGKIYRSNLFGEPTIVSADAGLNRFILQNEGRLFECSYPRSIGGILGKWSMLVLVGDMHRDMRSISLNFLSHARLRTILLKDVERHTLFVLDSWQQNSIFSAQDEAKKFTFNLMAKHIMSMDPGEEETEQLKKEYVTFMKGVVSAPLNLPGTAYHKALQSRATILKFIERKMEERKLDIKEEDQEEEEVKTEDEAEMSKSDHVRKQRTDDDLLGWVLKHSNLSTEQILDLILSLLFAGHETSSVAIALAIFFLQACPKAVEELREEHLEIARAKKELGESELNWDDYKKMDFTQCVINETLRLGNVVRFLHRKALKDVRYKGYDIPSGWKVLPVISAVHLDNSRYDQPNLFNPWRWQQQNNGASSSGSGSFSTWGNNYMPFGGGPRLCAGSELAKLEMAVFIHHLVLKFNWELAEDDKPFAFPFVDFPNGLPIRVSRIL

SEQ ID NO: 90532 - protein, 446 aa, Arabidopsis thaliana
  peptide (1)..(446): Ceres Seq. ID no. 12724229
  misc_feature (1)..(446): Homolog of NCBI NO: 15229822 NR Description: steroid 22-alpha-hydroxylase (DWF4); protein id:
  misc_feature (1)..(446): Homolog of NCBI NO: 2935342 NR Description: steroid 22-alpha-hydroxylase; DWF4; CYP90B1
  misc_feature (1)..(242): Homolog of NCBI NO: 15239203 NR Description: cytochrome p450, putative; protein id: supported by cDNA: 36334., supported by cDNA: gi_14596098, by cDNA: gi_15450716, supported by cDNA: gi_17380617, supported
  misc_feature (213)..(444): Homolog of NCBI NO: 15239203 NR Description: cytochrome p450, putative; protein id: supported by cDNA: 36334., supported by cDNA: gi_14596098, by cDNA: gi_15450716, supported by cDNA: gi_17380617, supported
  misc_feature (196)..(442): Homolog of NCBI NO: 22326806 NR Description: cytochrome p450 family; protein id: At5g14400.1
  misc_feature (1)..(200): Homolog of NCBI NO: 22326806 NR Description: cytochrome p450 family; protein id: At5g14400.1
  misc_feature (195)..(445): Homolog of NCBI NO: 34902330 NR Description: Putative steroid 22-alpha-hydroxylase [Oryza
  misc_feature (218)..(441): Homolog of NCBI NO: 32487441 NR Description: OSJNBa0016O02.25 [Oryza sativa (japonica
  misc_feature (1)..(105): Homolog of NCBI NO: 32487441 NR Description: OSJNBa0016O02.25 [Oryza sativa (japonica
  misc_feature (1)..(243): Homolog of NCBI NO: 34902330 NR Description: Putative steroid 22-alpha-hydroxylase [Oryza
MQQHVSKYGKIYRSNLFGEPTIVSADAGLNRFILQNEGRLFECSYPRSIGGILGKWSMLVLVGDMHRDMRSISLNFLSHARLRTILLKDVERHTLFVLDSWQQNSIFSAQDEAKKFTFNLMAKHIMSMDPGEEETEQLKKEYVTFMKGVVSAPLNLPGTAYHKALQSRATILKFIERKMEERKLDIKEEDQEEEEVKTEDEAEMSKSDHVRKQRTDDDLLGWVLKHSNLSTEQILDLILSLLFAGHETSSVAIALAIFFLQACPKAVEELREEHLEIARAKKELGESELNWDDYKKMDFTQCVINETLRLGNVVRFLHRKALKDVRYKGYDIPSGWKVLPVISAVHLDNSRYDQPNLFNPWRWQQQNNGASSSGSGSFSTWGNNYMPFGGGPRLCAGSELAKLEMAVFIHHLVLKFNWELAEDDKPFAFPFVDFPNGLPIRVSRIL

SEQ ID NO: 90533 - DNA, 2424 bp, Arabidopsis thaliana
  misc_feature (1)..(2424): Ceres Seq. ID no. 12724230
  misc_feature: MA Experiment ID: 20000265 Result: Up-regulated in Transcription
  misc_feature: MA Experiment 20000265 PARAMETER Experiment Name: At_Open_Flower_P Parameter: Age (day) Value: 21
  misc_feature: MA Experiment 20000265 PARAMETER Experiment Name: At_Open_Flower_P Parameter: Plant Line Value: WS
  misc_feature: MA Experiment 20000265 PARAMETER Experiment Name: At_Open_Flower_P Parameter: Tissue Value: Closed Flower vs. Whole Plant
  misc_feature: MA Experiment ID: 20000495 Result: Up-regulated in Transcription
  misc_feature: MA Experiment 20000495 PARAMETER Experiment Name: At_Guard_Cells_P Parameter: Harvest Date Value: 8/2/2002
  misc_feature: MA Experiment 20000495 PARAMETER Experiment Name: At_Guard_Cells_P Parameter: Organism Value: A. thaliana
  misc_feature: MA Experiment 20000495 PARAMETER Experiment Name: At_Guard_Cells_P Parameter: Tissue Value: Guard Cells vs. Leaves
  misc_feature: MA Experiment ID: 20000794 Result: Up-regulated in Transcription
  misc_feature: MA Experiment 20000794 PARAMETER Experiment Name: At_Petals_P Parameter: Age (day) Value: 23-25 days
  misc_feature: MA Experiment 20000794 PARAMETER Experiment Name: At_Petals_P Parameter: Plant Line Value: WS
  misc_feature: MA Experiment 20000794 PARAMETER Experiment Name: At_Petals_P Parameter: Tissue Value: Petals vs. Whole plant
gttttgcttcttctctctgcaaaaatcctccatccgcttcctcacgaaaaaccctagcacagctccgagatcccttttgtcgccatgggagactccggcgatcctttcttgcgtaatccaaacgccgctgttcaagctcgcgctaaagttcagaacagagccaatgttcttcagcttaagctgatgggtcagagccaccctactggcttaacaaacaatctcttgaagctttttgagccacgtccgccattggagtacaaaccaccaccagagaagagaaagtgcccgccttatacaggtatggctcagtttgtaagtaactttgctgagcctggggatccagaatacgctccacctaagccagaagttgaattaccttcgcagaaaagggaaagaattcataaattgcgactggagaaaggtgttgaaaaggctgctgaggacttaaagaaatatgaccccaataatgatccaaatgctactggagatccatacaagacattgttcgtttcaagacttaactacgaatcctcagagagtaagattaaaagggagtttgaatcttatggaccaattaaacgggtaggttattctgagcattcccttgctggttcggtaagaatttgtgtaatggcttccctctctagagctctttgctcaatttgttttattttatctacaaaagtcttccaaggttagaatttttcagtcccttataaatttgcatcttttctgctagaccaaaaggccattctacatttgctttgttttgcatgccttctttagactgtgtaaagccatcaagtctcttagacctttctcaataactgaatatatagatgcataagtgcttctcatataatgacacagctcctctctccatggtgtttgtttgagatgttttcggtaaatttggcctggtatttttatttccttgtcccttcagagagcaaatacttttacaatgatatatcatatagtggttataggcacacggtttacctaatcaattagttgttttctgaatctataatgagctcaactcatcctgctggtaagcaacttataaaatattatctgcccatatcccaaagccattcaaatgctttattttcaagcaaccaaggttggattatcgaaaacccttctctcttttcctatcttaacatctatatatattcagtatctgggacttgggctactatgaaggtgatctggttcactttttaatacatttttagttatctaagtttctataccctggtaaggggtggtttattagactcttcaaaaatggtaattttgctgcaatacatccatttttctgccaattcttgatgtgggtggtgacattctcggatttggacacaacataaaggttgcctgccttatagagctgcatgtttgtttgatatgaaacacttttatcttgaatctgattttgttctcacagatttgatttgttaattgtcttcttctgaaacttctcaggttcatttggtgactgatcagctgaccaataaacccaaaggatatgctttcattgagtacatgcacacccgtgacatgaaagctgcatataagcaagctgatggacaaaagattgacggcagaagagttttggttgatgtggagagaggtagaaccgtcccaaactggcgtccacgcaggcttggtggtggacttgggacctcaagagtgggtggtggtgaagaaattgttggggaacaacaaccgcaaggaagaacctcccagtcagaggagccatcgagaccacgggaagagcgtgagaaatctcgggaaaagggaaaagaaagggaaaggtctcgtgagctgtctcacgaacaacctcgagagaggtctcgtgacagaccgagagaggataagcaccacagagaccgagaccaaggaggcagagacagggatagggacagcagacgtgatcgtgaccggacccgtgacagaggagacagagaccgccgtgaccgtgacaggggacgggatcgtacttcaagggatcatgaccgagaccgcagtagaaagaaggagcgggattatgaaggaggtgaatatgagcatgagggtggtggtcggtcccgtgagagagatgcagagtaccgtggcgagccagaagaaactcgtggctactatgaagacgatcaaggggacacagaccggtacagtcatcgctacgataaaatggaggaagatgacttcagatatgaacgtgagtacaagcggtctaagagatcagaatcgcgagagtatgttcgttgatgtttcattcggctgtttaaaactctaaaaacttaagaatcctttttgtttattctaaatcaaaacttgatgcaattctgtttgttacctctgaacttgattgctattttttctcttttgaagtttgtcatattattaatcaaaatc

SEQ ID NO: 90534 - protein, 241 aa, Arabidopsis thaliana
  peptide (1)..(241): Ceres Seq. ID no. 12724231
  misc_feature (52)..(237): Pfam Name: Caldesmon Pfam Description: Caldesmon
  misc_feature (1)..(241): Homolog of NCBI NO: 15229825 NR Description: U1 small nuclear ribonucleoprotein 70 (U1-70k); id: At3g50670.1, supported by cDNA: gi_14532499, supported by gi_20334805 [Arabidopsis thaliana]
  misc_feature (1)..(222): Homolog of NCBI NO: 322618 NR Description: U1 snRNP 70K protein - Arabidopsis thaliana
  misc_feature (1)..(239): Homolog of NCBI NO: 37530562 NR Description: putative U1 small nuclear ribonucleoprotein
  misc_feature (65)..(221): Homolog of NCBI NO: 37530562 NR Description: putative U1 small nuclear ribonucleoprotein
  misc_feature (63)..(240): Homolog of NCBI NO: 37530562 NR Description: putative U1 small nuclear ribonucleoprotein
  misc_feature (1)..(238): Homolog of NCBI NO: 134091 NR Description: U1 small nuclear ribonucleoprotein 70 kDa (U1
  misc_feature (1)..(219): Homolog of NCBI NO: 337445 NR Description: ribonucleoprotein antigen
  misc_feature (1)..(237): Homolog of NCBI NO: 88959 NR Description: U1 snRNP 70K protein - human
  misc_feature (1)..(237): Homolog of NCBI NO: 29568103 NR Description: U1 small nuclear ribonucleoprotein 70 kDa; small ribonucleoprotein 70kD polypeptide (RNP antigen) [Homo sapiens]
  misc_feature (1)..(191): Homolog of NCBI NO: 34856077 NR Description: similar to U1 small nuclear ribonucleoprotein 70
MHTRDMKAAYKQADGQKIDGRRVLVDVERGRTVPNWRPRRLGGGLGTSRVGGGEEIVGEQQPQGRTSQSEEPSRPREEREKSREKGKERERSRELSHEQPRERSRDRPREDKHHRDRDQGGRDRDRDSRRDRDRTRDRGDRDRRDRDRGRDRTSRDHDRDRSRKKERDYEGGEYEHEGGGRSRERDAEYRGEPEETRGYYEDDQGDTDRYSHRYDKMEEDDFRYEREYKRSKRSESREYVR

SEQ ID NO: 90535 - protein, 237 aa, Arabidopsis thaliana
  peptide (1)..(237): Ceres Seq. ID no. 12724232
MDKRLTAEEFWLMWREVEPSQTGVHAGLVVDLGPQEWVVVKKLLGNNNRKEEPPSQRSHRDHGKSVRNLGKREKKGKGLVSCLTNNLERGLVTDRERISTTETETKEAETGIGTADVIVTGPVTEETETAVTVTGDGIVLQGIMTETAVERRSGIMKEVNMSMRVVVGPVREMQSTVASQKKLVATMKTIKGTQTGTVIATIKWRKMTSDMNVSTSGLRDQNRESMFVDVSFGCLKL

SEQ ID NO: 90536 - protein, 236 aa, Arabidopsis thaliana
  peptide (1)..(236): Ceres Seq. ID no. 12724233
  misc_feature (47)..(232): Pfam Name: Caldesmon Pfam Description: Caldesmon
  misc_feature (1)..(236): Homolog of NCBI NO: 15229825 NR Description: U1 small nuclear ribonucleoprotein 70 (U1-70k); id: At3g50670.1, supported by cDNA: gi_14532499, supported by gi_20334805 [Arabidopsis thaliana]
  misc_feature (1)..(217): Homolog of NCBI NO: 322618 NR Description: U1 snRNP 70K protein - Arabidopsis thaliana
  misc_feature (1)..(234): Homolog of NCBI NO: 37530562 NR Description: putative U1 small nuclear ribonucleoprotein
  misc_feature (60)..(216): Homolog of NCBI NO: 37530562 NR Description: putative U1 small nuclear ribonucleoprotein
  misc_feature (58)..(235): Homolog of NCBI NO: 37530562 NR Description: putative U1 small nuclear ribonucleoprotein
  misc_feature (1)..(233): Homolog of NCBI NO: 134091 NR Description: U1 small nuclear ribonucleoprotein 70 kDa (U1
  misc_feature (1)..(214): Homolog of NCBI NO: 337445 NR Description: ribonucleoprotein antigen
  misc_feature (1)..(232): Homolog of NCBI NO: 88959 NR Description: U1 snRNP 70K protein - human
  misc_feature (1)..(232): Homolog of NCBI NO: 29568103 NR Description: U1 small nuclear ribonucleoprotein 70 kDa; small ribonucleoprotein 70kD polypeptide (RNP antigen) [Homo sapiens]
  misc_feature (1)..(186): Homolog of NCBI NO: 34856077 NR Description: similar to U1 small nuclear ribonucleoprotein 70
MKAAYKQADGQKIDGRRVLVDVERGRTVPNWRPRRLGGGLGTSRVGGGEEIVGEQQPQGRTSQSEEPSRPREEREKSREKGKERERSRELSHEQPRERSRDRPREDKHHRDRDQGGRDRDRDSRRDRDRTRDRGDRDRRDRDRGRDRTSRDHDRDRSRKKERDYEGGEYEHEGGGRSRERDAEYRGEPEETRGYYEDDQGDTDRYSHRYDKMEEDDFRYEREYKRSKRSESREYVR

SEQ ID NO: 90537 - DNA, 1113 bp, Arabidopsis thaliana
  misc_feature (1)..(1113): Ceres Seq. ID no. 12724242
  misc_feature: MA Experiment ID: 20000184 Result: Up-regulated in Transcription
  misc_feature: MA Experiment 20000184 PARAMETER Experiment Name: At_Shoots__P Parameter: Age (day) Value: 7
  misc_feature: MA Experiment 20000184 PARAMETER Experiment Name: At_Shoots__P Parameter: Tissue Value: Shoots vs. Whole Plant
atgatatctcgaatgattttcagaaactatccttctcacaatgagtccgacgacgagccattccatttcagtatcagcagagaattgcttctcgaccgaaacgatgtcgtagtgggagagatgattggagaaggagcttactccatcgtctacaaaggattgctaagaaaccaatttcccgtggcggtgaagatcatggatccgagtacaacttccgctgtaaccaaagcgcacaaaaaaacgtttcaaaaggaagttctgttactatccaagatgaaacatgacaacattgtgaagtttgttggagcttgcatagaaccacaattgattatagttaccgaactcgttgaaggcggcactctacagaggttcatgcactctcgtccgggtcctcttgacctaaagatgtcactaagctttgctttggatatttcacgagccatggagtttgtgcactcaaatggcatcattcaccgtgatttaaatccaaggaatttgttggtaaccggtgatctgaaacatgtgaaattggctgactttggaattgcaagagaagaaactagaggtggcatgacctgtgaggctggcacctctaaatggatggctcctgaggtgtatagccctgagccgctgagagttggggagaagaaggaatatgaccataaggctgatatttacagctttgccatagtattatggcagctggttacgaacgaagaaccattccctgacgtgcctaatagcctctttgttccctatcttgttagccaaggtcggagaccaatacttacgaagactcccgacgtgtttgtcccaatcgttgaatcatgttgggcacaagacccggatgcgcgtccggaatttaaagagatttcggttatgctgacaaacttgctaagaagaatgagctcagacagtagcattggcacaacactaccggatggggaagcttatgaaggtgagatggaggaatcagagaactctcctcttcttcaagagcatttttgcaaggtgaagaaacctaaggagaagaagaagaagaagaaactggtgaagatgagatttcctttctttaagaagttcaaggtttggttgtacaactacaagccatga

SEQ ID NO: 90538 - protein, 370 aa, Arabidopsis thaliana
  peptide (1)..(370): Ceres Seq. ID no. 12724243
  misc_feature (36)..(295): Pfam Name: Protein kinase domain Pfam Description: Protein kinase domain
  misc_feature (1)..(370): Homolog of NCBI NO: 15230296 NR Description: protein kinase ATN1 - like protein; protein id:
  misc_feature (13)..(361): Homolog of NCBI NO: 15230295 NR Description: protein kinase ATN1 -like protein; protein id:
  misc_feature (8)..(362): Homolog of NCBI NO: 15240070 NR Description: protein kinase ATN1-like protein; protein id:
  misc_feature (23)..(308): Homolog of NCBI NO: 32815816 NR Description: protein kinase [Cucumis sativus]
  misc_feature (23)..(329): Homolog of NCBI NO: 15232197 NR Description: putative protein kinase, ATN1; protein id: supported by cDNA: gi_16604327, supported by cDNA: gi_19699189 thaliana] >gi|11994183|dbj|BAB01286.1| nearly identical to
  misc_feature (23)..(308): Homolog of NCBI NO: 2129698 NR Description: protein kinase ATN1 (EC 2.7.1.-) - Arabidopsis
  misc_feature (23)..(307): Homolog of NCBI NO: 15240630 NR Description: protein kinase ATN1-like protein; protein id:
  misc_feature (23)..(304): Homolog of NCBI NO: 15237443 NR Description: protein kinase - like protein; protein id: [Arabidopsis thaliana] >gi|9758080|dbj|BAB08524.1| protein kinase
  misc_feature (25)..(299): Homolog of NCBI NO: 28876011 NR Description: putative protein kinase [Oryza sativa (japonica
  misc_feature (24)..(299): Homolog of NCBI NO: 30679428 NR Description: protein kinase, putative [Arabidopsis thaliana]
MISRMIFRNYPSHNESDDEPFHFSISRELLLDRNDVVVGEMIGEGAYSIVYKGLLRNQFPVAVKIMDPSTTSAVTKAHKKTFQKEVLLLSKMKHDNIVKFVGACIEPQLIIVTELVEGGTLQRFMHSRPGPLDLKMSLSFALDISRAMEFVHSNGIIHRDLNPRNLLVTGDLKHVKLADFGIAREETRGGMTCEAGTSKWMAPEVYSPEPLRVGEKKEYDHKADIYSFAIVLWQLVTNEEPFPDVPNSLFVPYLVSQGRRPILTKTPDVFVPIVESCWAQDPDARPEFKEISVMLTNLLRRMSSDSSIGTTLPDGEAYEGEMEESENSPLLQEHFCKVKKPKEKKKKKKLVKMRFPFFKKFKVWLYNYKP

SEQ ID NO: 90539 - protein, 366 aa, Arabidopsis thaliana
  peptide (1)..(366): Ceres Seq. ID no. 12724244
  misc_feature (32)..(291): Pfam Name: Protein kinase domain Pfam Description: Protein kinase domain
  misc_feature (1)..(366): Homolog of NCBI NO: 15230296 NR Description: protein kinase ATN1 - like protein; protein id:
  misc_feature (9)..(357): Homolog of NCBI NO: 15230295 NR Description: protein kinase ATN1 -like protein; protein id:
  misc_feature (4)..(358): Homolog of NCBI NO: 15240070 NR Description: protein kinase ATN1-like protein; protein id:
  misc_feature (19)..(304): Homolog of NCBI NO: 32815816 NR Description: protein kinase [Cucumis sativus]
  misc_feature (19)..(325): Homolog of NCBI NO: 15232197 NR Description: putative protein kinase, ATN1; protein id: supported by cDNA: gi_16604327, supported by cDNA: gi_19699189 thaliana] >gi|11994183|dbj|BAB01286.1| nearly identical to
  misc_feature (19)..(304): Homolog of NCBI NO: 2129698 NR Description: protein kinase ATN1 (EC 2.7.1.-) - Arabidopsis
  misc_feature (19)..(303): Homolog of NCBI NO: 15240630 NR Description: protein kinase ATN1-like protein; protein id:
  misc_feature (19)..(300): Homolog of NCBI NO: 15237443 NR Description: protein kinase - like protein; protein id: [Arabidopsis thaliana] >gi|9758080|dbj|BAB08524.1| protein kinase
  misc_feature (21)..(295): Homolog of NCBI NO: 28876011 NR Description: putative protein kinase [Oryza sativa (japonica
  misc_feature (20)..(295): Homolog of NCBI NO: 30679428 NR Description: protein kinase, putative [Arabidopsis thaliana]
MIFRNYPSHNESDDEPFHFSISRELLLDRNDVVVGEMIGEGAYSIVYKGLLRNQFPVAVKIMDPSTTSAVTKAHKKTFQKEVLLLSKMKHDNIVKFVGACIEPQLIIVTELVEGGTLQRFMHSRPGPLDLKMSLSFALDISRAMEFVHSNGIIHRDLNPRNLLVTGDLKHVKLADFGIAREETRGGMTCEAGTSKWMAPEVYSPEPLRVGEKKEYDHKADIYSFAIVLWQLVTNEEPFPDVPNSLFVPYLVSQGRRPILTKTPDVFVPIVESCWAQDPDARPEFKEISVMLTNLLRRMSSDSSIGTTLPDGEAYEGEMEESENSPLLQEHFCKVKKPKEKKKKKKLVKMRFPFFKKFKVWLYNYKP

SEQ ID NO: 90540 - protein, 330 aa, Arabidopsis thaliana
  peptide (1)..(330): Ceres Seq. ID no. 12724245
  misc_feature (1)..(255): Pfam Name: Protein kinase domain Pfam Description: Protein kinase domain
  misc_feature (1)..(330): Homolog of NCBI NO: 15230296 NR Description: protein kinase ATN1 - like protein; protein id:
  misc_feature (1)..(321): Homolog of NCBI NO: 15230295 NR Description: protein kinase ATN1 -like protein; protein id:
  misc_feature (1)..(322): Homolog of NCBI NO: 15240070 NR Description: protein kinase ATN1-like protein; protein id:
  misc_feature (1)..(268): Homolog of NCBI NO: 32815816 NR Description: protein kinase [Cucumis sativus]
  misc_feature (1)..(289): Homolog of NCBI NO: 15232197 NR Description: putative protein kinase, ATN1; protein id: supported by cDNA: gi_16604327, supported by cDNA: gi_19699189 thaliana] >gi|11994183|dbj|BAB01286.1| nearly identical to
  misc_feature (1)..(268): Homolog of NCBI NO: 2129698 NR Description: protein kinase ATN1 (EC 2.7.1.-) - Arabidopsis
  misc_feature (1)..(267): Homolog of NCBI NO: 15240630 NR Description: protein kinase ATN1-like protein; protein id:
  misc_feature (1)..(264): Homolog of NCBI NO: 15237443 NR Description: protein kinase - like protein; protein id: [Arabidopsis thaliana] >gi|9758080|dbj|BAB08524.1| protein kinase
  misc_feature (1)..(259): Homolog of NCBI NO: 28876011 NR Description: putative protein kinase [Oryza sativa (japonica
  misc_feature (1)..(259): Homolog of NCBI NO: 30679428 NR Description: protein kinase, putative [Arabidopsis thaliana]
MIGEGAYSIVYKGLLRNQFPVAVKIMDPSTTSAVTKAHKKTFQKEVLLLSKMKHDNIVKFVGACIEPQLIIVTELVEGGTLQRFMHSRPGPLDLKMSLSFALDISRAMEFVHSNGIIHRDLNPRNLLVTGDLKHVKLADFGIAREETRGGMTCEAGTSKWMAPEVYSPEPLRVGEKKEYDHKADIYSFAIVLWQLVTNEEPFPDVPNSLFVPYLVSQGRRPILTKTPDVFVPIVESCWAQDPDARPEFKEISVMLTNLLRRMSSDSSIGTTLPDGEAYEGEMEESENSPLLQEHFCKVKKPKEKKKKKKLVKMRFPFFKKFKVWLYNYKP

SEQ ID NO: 90541 - DNA, 2820 bp, Arabidopsis thaliana
  misc_feature (1)..(2820): Ceres Seq. ID no. 12724263
  misc_feature: MA Experiment ID: 20000794 Result: Up-regulated in Transcription
  misc_feature: MA Experiment 20000794 PARAMETER Experiment Name: At_Petals_P Parameter: Age (day) Value: 23-25 days
  misc_feature: MA Experiment 20000794 PARAMETER Experiment Name: At_Petals_P Parameter: Plant Line Value: WS
  misc_feature: MA Experiment 20000794 PARAMETER Experiment Name: At_Petals_P Parameter: Tissue Value: Petals vs. Whole plant
  misc_feature: MA Experiment ID: 20001451 Result: Up-regulated in Transcription
  misc_feature: MA Experiment 20001451 PARAMETER Experiment Name: At_Far-red-induction_P Parameter: Age (day) Value: 7
  misc_feature: MA Experiment 20001451 PARAMETER Experiment Name: At_Far-red-induction_P Parameter: Light Value: Far-red vs. White
  misc_feature: MA Experiment 20001451 PARAMETER Experiment Name: At_Far-red-induction_P Parameter: Organism Value: A. thaliana
  misc_feature: MA Experiment 20001451 PARAMETER Experiment Name: At_Far-red-induction_P Parameter: Plant Line Value: Columbia
  misc_feature: MA Experiment 20001451 PARAMETER Experiment Name: At_Far-red-induction_P Parameter: Timepoint (hr) Value: 24
  misc_feature: MA Experiment 20001451 PARAMETER Experiment Name: At_Far-red-induction_P Parameter: Tissue Value: Whole Plant
  misc_feature: MA Experiment ID: 20001905 Result: Up-regulated in Transcription
  misc_feature: MA Experiment 20001905 PARAMETER Experiment Name: At_Drought_Reproduction_P Parameter: Age (day) Value: 40
  misc_feature: MA Experiment 20001905 PARAMETER Experiment Name: At_Drought_Reproduction_P Parameter: Organism Value: A. thaliana
  misc_feature: MA Experiment 20001905 PARAMETER Experiment Name: At_Drought_Reproduction_P Parameter: Plant Line Value: WS
  misc_feature: MA Experiment 20001905 PARAMETER Experiment Name: At_Drought_Reproduction_P Parameter: Timepoint (day) Value: 10
  misc_feature: MA Experiment 20001905 PARAMETER Experiment Name: At_Drought_Reproduction_P Parameter: Tissue Value: Rosettes
  misc_feature: MA Experiment 20001905 PARAMETER Experiment Name: At_Drought_Reproduction_P Parameter: Treatment Value: Drought vs. No Drought
  misc_feature: MA Experiment ID: 20001911 Result: Up-regulated in Transcription
  misc_feature: MA Experiment 20001911 PARAMETER Experiment Name: At_Drought_Reproduction_P Parameter: Age (day) Value: 40
  misc_feature: MA Experiment 20001911 PARAMETER Experiment Name: At_Drought_Reproduction_P Parameter: Organism Value: A. thaliana
  misc_feature: MA Experiment 20001911 PARAMETER Experiment Name: At_Drought_Reproduction_P Parameter: Plant Line Value: WS
  misc_feature: MA Experiment 20001911 PARAMETER Experiment Name: At_Drought_Reproduction_P Parameter: Timepoint (day) Value: 10
  misc_feature: MA Experiment 20001911 PARAMETER Experiment Name: At_Drought_Reproduction_P Parameter: Tissue Value: Flowers
  misc_feature: MA Experiment 20001911 PARAMETER Experiment Name: At_Drought_Reproduction_P Parameter: Treatment Value: Drought vs. No Drought
aagttttccaaaattgttgactctcttttacaactacacaaaaacctttcttcaaaatattctcagattctcttcttcttccttcgagctttcacagttgattcaattcccgatttcaaactcaatcaccttcagattccgatctccattctctacatcaatcacaatggagaatccgaatccaccagcagagaagctattgaagaagatacgagagctagaagaaagccaagaagatctaaagcgagagatgtcaaaactcaaagtatcagcagagattaaaaggcgttcgcattcttcatcacctaaacgaccttcaaggagaaacagtggagaaggaactccgttatggagaaaaaccggcgccgcatcgttccgtcacgcttctccgttacggaaagagagtcattctaaagacggagtagctggtggtggtgatggaccatcggcaggcaagttcaccgataaacagtatttgaatattttgcagtctatggctcaagctgttcatgtcttcgatcttaatggccaaattatcttttggaactcgatggcggagaagctttatggattctcagctgcagaagcgttagggaaggactcgattaatatactcgtagatggtcaagatgctgctgttgcaaaaaatatctttcagcgttgcagcagtggagagagttggactggagagtttcctgttaagaataaaatgggagagaggttttcggttgtgactacgatttctcctttttatgatgatgatggtttgcttattgggattatatgtatcacgaatgattcggcactttttcaacggccgagagttcctcccgctaaaaacaggtggcaagaaggggattcaagcttttgccgggggactaatggtgttgcttctaggcttggttttgattccaaagaagctgttgtgtcgaaacttggccttgattctcagcagcctattcaagctgctatagcatctaagatctcagatttggcatccaaggtgggcaacaaggtcaggtcgaaaatgcgagcaggtgataataacgcctcacaccctgagggtggaaatgggggcagtcatcagtctgatcagggtttcttcgatgctgctttctctgaccagagggaagatgcagaaacaaatgatgctagcacacctagggggaatttgatccagtctccttttggtgtgttcttatgtaacgatgataagtcttcttcaaaagcctccggagaatccaatgatgaaaatgatagaaactctgttgtccctaagaaacttacctcaaagactgaagagtggatggtaaagaaaggactgtcatggccatggaaaggaaatgagcgggaaggtttggaaagaagaaatgctcattctgtgtggccttgggtgcataatgaacaacaaaaagaagaggctcatcatagtaattcctataacagtgttaagtctgaaagcctggcaagtgaaagtaataaacctgccaataatgagaatatgggttctgttaatgtgaatagcgcaagcagtgctagcagctgtggaagtaccagcagcagtgttatgaacaaggttgacatggatagcgactgcttagactatgaaatcttatgggaggatttgacaattggagaacaaatcgggcaaggttcatgtggaactgtctatcatggtctatggtttggatctgatgtggctgtaaaggtgttttccaaacaagaatattcagaagagatcataacatctttcaaacaagaggtatcattgatgaaaaggcttagacatccaaacgttctgctgtttatgggagctgtggcatcacctcagcgtctttgtatagtgacagagtttctaccacgtggaagtctctttcgtttgctgcagaggaacaagtcaaaactagatttgaggcgacgtatccatatggcatcagacattgctcgtggcatgaattatcttcaccactgtagtcctcccatcattcaccgtgatctgaagtcgtcaaatctactggttgatcggaactggactgtgaaggttgctgattttggtctttctcgcatcaagcatgagacgtacctcactacaaacggaaggggaacgcctcaatggatggcaccagaagttcttcgaaatgaggctgctgatgaaaagtctgacgtttacagttttggagtagtactatgggagcttgtgacagagaagatcccatgggaaaatctaaatgctatgcaggtgattggagccgtggggttcatgaaccagaggctggaagtcccaaaagacgttgaccctcagtggattgctttaatggaaagctgctggcacagcgaaccgcaatgtagaccatcgttccaagaattgatggacaaattaagagagcttcaaagaaagtatactatacagttccaagcagctcgtgctgcatcgatagacaactcttctctcaaggaaaaataaacccaacgagcagagaatctgaatatgcatttcgcgatcaacacaacaaaagaagaaagctcaatgaagaaatgcaataaagaaaagcagctaaagcagactttgatatgctctctcattgcgtgagagaggcattctttatatggagttcaattcgaaatcgtcatgtgatgcgatgcgagctacagaggttatacatatgtaattgttgtgccaatctatttatgtaattcttaacagagagagagagagagacagacccagtttttaagaatagtctgtacatgtaacaaacgagtaaaaaccaagatttgtaaccctgatttttagtaaatattgtcacatttatttggatc

SEQ ID NO: 90542 - protein, 820 aa, Arabidopsis thaliana
  peptide (1)..(820): Ceres Seq. ID no. 12724264
  misc_feature (156)..(219): Pfam Name: PAS domain Pfam Description: PAS domain
  misc_feature (60)..(819): Homolog of NCBI NO: 15230753 NR Description: protein kinase, putative; protein id:
  misc_feature (128)..(820): Homolog of NCBI NO: 12321912 NR Description: protein kinase, putative; 42705-46677
  misc_feature (128)..(820): Homolog of NCBI NO: 15230755 NR Description: protein kinase, putative; protein id: At3g06640.1
  misc_feature (56)..(106): Homolog of NCBI NO: 12321912 NR Description: protein kinase, putative; 42705-46677
  misc_feature (56)..(106): Homolog of NCBI NO: 15230755 NR Description: protein kinase, putative; protein id: At3g06640.1
  misc_feature (148)..(777): Homolog of NCBI NO: 15230754 NR Description: protein kinase, putative; protein id: At3g06630.1
  misc_feature (64)..(111): Homolog of NCBI NO: 15230754 NR Description: protein kinase, putative; protein id: At3g06630.1
  misc_feature (343)..(820): Homolog of NCBI NO: 22327668 NR Description: protein kinase; protein id: At5g49470.1,
  misc_feature (151)..(620): Homolog of NCBI NO: 29367363 NR Description: protein kinase-like protein [Oryza sativa
  misc_feature (524)..(799): Homolog of NCBI NO: 30686028 NR Description: serine/threonine kinase -related [Arabidopsis
SFPKLLTLFYNYTKTFLQNILRFSSSSFELSQLIQFPISNSITFRFRSPFSTSITMENPNPPAEKLLKKIRELEESQEDLKREMSKLKVSAEIKRRSHSSSPKRPSRRNSGEGTPLWRKTGAASFRHASPLRKESHSKDGVAGGGDGPSAGKFTDKQYLNILQSMAQAVHVFDLNGQIIFWNSMAEKLYGFSAAEALGKDSINILVDGQDAAVAKNIFQRCSSGESWTGEFPVKNKMGERFSVVTTISPFYDDDGLLIGIICITNDSALFQRPRVPPAKNRWQEGDSSFCRGTNGVASRLGFDSKEAVVSKLGLDSQQPIQAAIASKISDLASKVGNKVRSKMRAGDNNASHPEGGNGGSHQSDQGFFDAAFSDQREDAETNDASTPRGNLIQSPFGVFLCNDDKSSSKASGESNDENDRNSVVPKKLTSKTEEWMVKKGLSWPWKGNEREGLERRNAHSVWPWVHNEQQKEEAHHSNSYNSVKSESLASESNKPANNENMGSVNVNSASSASSCGSTSSSVMNKVDMDSDCLDYEILWEDLTIGEQIGQGSCGTVYHGLWFGSDVAVKVFSKQEYSEEIITSFKQEVSLMKRLRHPNVLLFMGAVASPQRLCIVTEFLPRGSLFRLLQRNKSKLDLRRRIHMASDIARGMNYLHHCSPPIIHRDLKSSNLLVDRNWTVKVADFGLSRIKHETYLTTNGRGTPQWMAPEVLRNEAADEKSDVYSFGVVLWELVTEKIPWENLNAMQVIGAVGFMNQRLEVPKDVDPQWIALMESCWHSEPQCRPSFQELMDKLRELQRKYTIQFQAARAASIDNSSLKEK

SEQ ID NO: 90543 - protein, 765 aa, Arabidopsis thaliana
  peptide (1)..(765): Ceres Seq. ID no. 12724265
  misc_feature (101)..(164): Pfam Name: PAS domain Pfam Description: PAS domain
  misc_feature (5)..(764): Homolog of NCBI NO: 15230753 NR Description: protein kinase, putative; protein id:
  misc_feature (73)..(765): Homolog of NCBI NO: 12321912 NR Description: protein kinase, putative; 42705-46677
  misc_feature (73)..(765): Homolog of NCBI NO: 15230755 NR Description: protein kinase, putative; protein id: At3g06640.1
  misc_feature (1)..(51): Homolog of NCBI NO: 12321912 NR Description: protein kinase, putative; 42705-46677
  misc_feature (1)..(51): Homolog of NCBI NO: 15230755 NR Description: protein kinase, putative; protein id: At3g06640.1
  misc_feature (93)..(722): Homolog of NCBI NO: 15230754 NR Description: protein kinase, putative; protein id: At3g06630.1
  misc_feature (9)..(56): Homolog of NCBI NO: 15230754 NR Description: protein kinase, putative; protein id: At3g06630.1
  misc_feature (288)..(765): Homolog of NCBI NO: 22327668 NR Description: protein kinase; protein id: At5g49470.1,
  misc_feature (96)..(565): Homolog of NCBI NO: 29367363 NR Description: protein kinase-like protein [Oryza sativa
  misc_feature (469)..(744): Homolog of NCBI NO: 30686028 NR Description: serine/threonine kinase -related [Arabidopsis
MENPNPPAEKLLKKIRELEESQEDLKREMSKLKVSAEIKRRSHSSSPKRPSRRNSGEGTPLWRKTGAASFRHASPLRKESHSKDGVAGGGDGPSAGKFTDKQYLNILQSMAQAVHVFDLNGQIIFWNSMAEKLYGFSAAEALGKDSINILVDGQDAAVAKNIFQRCSSGESWTGEFPVKNKMGERFSVVTTISPFYDDDGLLIGIICITNDSALFQRPRVPPAKNRWQEGDSSFCRGTNGVASRLGFDSKEAVVSKLGLDSQQPIQAAIASKISDLASKVGNKVRSKMRAGDNNASHPEGGNGGSHQSDQGFFDAAFSDQREDAETNDASTPRGNLIQSPFGVFLCNDDKSSSKASGESNDENDRNSVVPKKLTSKTEEWMVKKGLSWPWKGNEREGLERRNAHSVWPWVHNEQQKEEAHHSNSYNSVKSESLASESNKPANNENMGSVNVNSASSASSCGSTSSSVMNKVDMDSDCLDYEILWEDLTIGEQIGQGSCGTVYHGLWFGSDVAVKVFSKQEYSEEIITSFKQEVSLMKRLRHPNVLLFMGAVASPQRLCIVTEFLPRGSLFRLLQRNKSKLDLRRRIHMASDIARGMNYLHHCSPPIIHRDLKSSNLLVDRNWTVKVADFGLSRIKHETYLTTNGRGTPQWMAPEVLRNEAADEKSDVYSFGVVLWELVTEKIPWENLNAMQVIGAVGFMNQRLEVPKDVDPQWIALMESCWHSEPQCRPSFQELMDKLRELQRKYTIQFQAARAASIDNSSLKEK

SEQ ID NO: 90544 - protein, 737 aa, Arabidopsis thaliana
  peptide (1)..(737): Ceres Seq. ID no. 12724266
  misc_feature (73)..(136): Pfam Name: PAS domain Pfam Description: PAS domain
  misc_feature (1)..(736): Homolog of NCBI NO: 15230753 NR Description: protein kinase, putative; protein id:
  misc_feature (45)..(737): Homolog of NCBI NO: 12321912 NR Description: protein kinase, putative; 42705-46677
  misc_feature (45)..(737): Homolog of NCBI NO: 15230755 NR Description: protein kinase, putative; protein id: At3g06640.1
  misc_feature (1)..(23): Homolog of NCBI NO: 12321912 NR Description: protein kinase, putative; 42705-46677
  misc_feature (1)..(23): Homolog of NCBI NO: 15230755 NR Description: protein kinase, putative; protein id: At3g06640.1
  misc_feature (65)..(694): Homolog of NCBI NO: 15230754 NR Description: protein kinase, putative; protein id: At3g06630.1
  misc_feature (1)..(28): Homolog of NCBI NO: 15230754 NR Description: protein kinase, putative; protein id: At3g06630.1
  misc_feature (260)..(737): Homolog of NCBI NO: 22327668 NR Description: protein kinase; protein id: At5g49470.1,
  misc_feature (68)..(537): Homolog of NCBI NO: 29367363 NR Description: protein kinase-like protein [Oryza sativa
  misc_feature (441)..(716): Homolog of NCBI NO: 30686028 NR Description: serine/threonine kinase -related [Arabidopsis
MSKLKVSAEIKRRSHSSSPKRPSRRNSGEGTPLWRKTGAASFRHASPLRKESHSKDGVAGGGDGPSAGKFTDKQYLNILQSMAQAVHVFDLNGQIIFWNSMAEKLYGFSAAEALGKDSINILVDGQDAAVAKNIFQRCSSGESWTGEFPVKNKMGERFSVVTTISPFYDDDGLLIGIICITNDSALFQRPRVPPAKNRWQEGDSSFCRGTNGVASRLGFDSKEAVVSKLGLDSQQPIQAAIASKISDLASKVGNKVRSKMRAGDNNASHPEGGNGGSHQSDQGFFDAAFSDQREDAETNDASTPRGNLIQSPFGVFLCNDDKSSSKASGESNDENDRNSVVPKKLTSKTEEWMVKKGLSWPWKGNEREGLERRNAHSVWPWVHNEQQKEEAHHSNSYNSVKSESLASESNKPANNENMGSVNVNSASSASSCGSTSSSVMNKVDMDSDCLDYEILWEDLTIGEQIGQGSCGTVYHGLWFGSDVAVKVFSKQEYSEEIITSFKQEVSLMKRLRHPNVLLFMGAVASPQRLCIVTEFLPRGSLFRLLQRNKSKLDLRRRIHMASDIARGMNYLHHCSPPIIHRDLKSSNLLVDRNWTVKVADFGLSRIKHETYLTTNGRGTPQWMAPEVLRNEAADEKSDVYSFGVVLWELVTEKIPWENLNAMQVIGAVGFMNQRLEVPKDVDPQWIALMESCWHSEPQCRPSFQELMDKLRELQRKYTIQFQAARAASIDNSSLKEK

SEQ ID NO: 90545 - DNA, 964 bp, Arabidopsis thaliana
  misc_feature (1)..(964): Ceres Seq. ID no. 12724275
  misc_feature: MA Experiment ID: 20000185 Result: Down-regulated in Transcription
  misc_feature: MA Experiment 20000185 PARAMETER Experiment Name: At_Roots__P Parameter: Age (day) Value: 7 vs. 21
  misc_feature: MA Experiment 20000185 PARAMETER Experiment Name: At_Roots__P Parameter: Organism Value: A. thaliana
  misc_feature: MA Experiment 20000185 PARAMETER Experiment Name: At_Roots__P Parameter: Tissue Value: Roots vs. Whole Plant
  misc_feature: MA Experiment ID: 20000234 Result: Down-regulated in Transcription
  misc_feature: MA Experiment 20000234 PARAMETER Experiment Name: At_Siliques_P Parameter: Age (day) Value: 21
  misc_feature: MA Experiment 20000234 PARAMETER Experiment Name: At_Siliques_P Parameter: Organism Value: A. thaliana
  misc_feature: MA Experiment 20000234 PARAMETER Experiment Name: At_Siliques_P Parameter: Plant Line Value: WS
  misc_feature: MA Experiment 20000234 PARAMETER Experiment Name: At_Siliques_P Parameter: Tissue Value: Less Than 5mm Siliques vs. Whole Plant
  misc_feature: MA Experiment ID: 20000264 Result: Down-regulated in Transcription
  misc_feature: MA Experiment 20000264 PARAMETER Experiment Name: At_Open_Flower_P Parameter: Age (day) Value: 21
  misc_feature: MA Experiment 20000264 PARAMETER Experiment Name: At_Open_Flower_P Parameter: Plant Line Value: WS
  misc_feature: MA Experiment 20000264 PARAMETER Experiment Name: At_Open_Flower_P Parameter: Tissue Value: Open Flower vs. Whole Plant
  misc_feature: MA Experiment ID: 20000265 Result: Down-regulated in Transcription
  misc_feature: MA Experiment 20000265 PARAMETER Experiment Name: At_Open_Flower_P Parameter: Age (day) Value: 21
  misc_feature: MA Experiment 20000265 PARAMETER Experiment Name: At_Open_Flower_P Parameter: Plant Line Value: WS
  misc_feature: MA Experiment 20000265 PARAMETER Experiment Name: At_Open_Flower_P Parameter: Tissue Value: Closed Flower vs. Whole Plant
  misc_feature: MA Experiment ID: 20000286 Result: Down-regulated in Transcription
  misc_feature: MA Experiment 20000286 PARAMETER Experiment Name: At_Open_Flower_P Parameter: Age (day) Value: 21
  misc_feature: MA Experiment 20000286 PARAMETER Experiment Name: At_Open_Flower_P Parameter: Plant Line Value: WS
  misc_feature: MA Experiment 20000286 PARAMETER Experiment Name: At_Open_Flower_P Parameter: Tissue Value: Half Open vs. Whole Plant
  misc_feature: MA Experiment ID: 20000439 Result: Down-regulated in Transcription
  misc_feature: MA Experiment 20000439 PARAMETER Experiment Name: At_Roots__P Parameter: Age (day) Value: 14 vs. 21
  misc_feature: MA Experiment 20000439 PARAMETER Experiment Name: At_Roots__P Parameter: Organism Value: A. thaliana
  misc_feature: MA Experiment 20000439 PARAMETER Experiment Name: At_Roots__P Parameter: Tissue Value: Roots vs. Whole Plant
  misc_feature: MA Experiment ID: 20000527 Result: Down-regulated in Transcription
  misc_feature: MA Experiment 20000527 PARAMETER Experiment Name: At_10percent_PEG_P Parameter: Age (day) Value: 20
  misc_feature: MA Experiment 20000527 PARAMETER Experiment Name: At_10percent_PEG_P Parameter: Organism Value: A. thaliana
  misc_feature: MA Experiment 20000527 PARAMETER Experiment Name: At_10percent_PEG_P Parameter: Plant Line Value: WS
  misc_feature: MA Experiment 20000527 PARAMETER Experiment Name: At_10percent_PEG_P Parameter: Timepoint (day) Value: 20
  misc_feature: MA Experiment 20000527 PARAMETER Experiment Name: At_10percent_PEG_P Parameter: Tissue Value: Whole Plant
  misc_feature: MA Experiment 20000527 PARAMETER Experiment Name: At_10percent_PEG_P Parameter: Treatment Value: 10percent PEG vs. No Treatment
  misc_feature: MA Experiment ID: 20001556 Result: Down-regulated in Transcription
  misc_feature: MA Experiment 20001556 PARAMETER Experiment Name: At_Drought_Soil_Dry_P Parameter: Age (day) Value: 26
  misc_feature: MA Experiment 20001556 PARAMETER Experiment Name: At_Drought_Soil_Dry_P Parameter: Organism Value: A. thaliana
  misc_feature: MA Experiment 20001556 PARAMETER Experiment Name: At_Drought_Soil_Dry_P Parameter: Plant Line Value: WS
  misc_feature: MA Experiment 20001556 PARAMETER Experiment Name: At_Drought_Soil_Dry_P Parameter: Post Timepoint (hr) Value: None
  misc_feature: MA Experiment 20001556 PARAMETER Experiment Name: At_Drought_Soil_Dry_P Parameter: Post-Treatment Value: None
  misc_feature: MA Experiment 20001556 PARAMETER Experiment Name: At_Drought_Soil_Dry_P Parameter: Timepoint (day) Value: 12
  misc_feature: MA Experiment 20001556 PARAMETER Experiment Name: At_Drought_Soil_Dry_P Parameter: Treatment Value: Drought vs. No Drought
  misc_feature: MA Experiment ID: 20001558 Result: Down-regulated in Transcription
  misc_feature: MA Experiment 20001558 PARAMETER Experiment Name: At_Drought_Soil_Dry_P Parameter: Age (day) Value: 27
  misc_feature: MA Experiment 20001558 PARAMETER Experiment Name: At_Drought_Soil_Dry_P Parameter: Organism Value: A. thaliana
  misc_feature: MA Experiment 20001558 PARAMETER Experiment Name: At_Drought_Soil_Dry_P Parameter: Plant Line Value: WS
  misc_feature: MA Experiment 20001558 PARAMETER Experiment Name: At_Drought_Soil_Dry_P Parameter: Post Timepoint (hr) Value: 6
  misc_feature: MA Experiment 20001558 PARAMETER Experiment Name: At_Drought_Soil_Dry_P Parameter: Post-Treatment Value: Re-Water vs. No Drought
  misc_feature: MA Experiment 20001558 PARAMETER Experiment Name: At_Drought_Soil_Dry_P Parameter: Timepoint (day) Value: 13
  misc_feature: MA Experiment 20001558 PARAMETER Experiment Name: At_Drought_Soil_Dry_P Parameter: Treatment Value: Drought vs. No Drought
  misc_feature: MA Experiment ID: 20001904 Result: Down-regulated in Transcription
  misc_feature: MA Experiment 20001904 PARAMETER Experiment Name: At_Drought_Reproduction_P Parameter: Age (day) Value: 37
  misc_feature: MA Experiment 20001904 PARAMETER Experiment Name: At_Drought_Reproduction_P Parameter: Organism Value: A. thaliana
  misc_feature: MA Experiment 20001904 PARAMETER Experiment Name: At_Drought_Reproduction_P Parameter: Plant Line Value: WS
  misc_feature: MA Experiment 20001904 PARAMETER Experiment Name: At_Drought_Reproduction_P Parameter: Timepoint (day) Value: 7
  misc_feature: MA Experiment 20001904 PARAMETER Experiment Name: At_Drought_Reproduction_P Parameter: Tissue Value: Rosettes
  misc_feature: MA Experiment 20001904 PARAMETER Experiment Name: At_Drought_Reproduction_P Parameter: Treatment Value: Drought vs. No Drought
caagagcgaagctctaaaacagtacatcatggaaacgtcagcgtatccaagagagcatgaattgctcaaggaacttcgaaaagctactgtccaaaaatacggaaatttaagcgagatggaggttccggttgatgagggtcatttcctatcgatgcttgtaaagatcatgaatgcgaaaaacactatcgagatcggtgttttcaccggttactcgcttctcactacagctcttgctttacctgaagatggccgtattaccgcgatagacattgataaagaagcttacgaagttggactagagtttattaagaaggctggtgttgatcacaagattaattttatccattccgatggtcttaaggccttagaccaattggtgaacgacaaatgtgagtttgattttgcatttgcggatgctgacaaatcaagctacgtcaacttccatgagaggcttctaaaattggtgaaggttgggggaatcattgcgttcgacaacaccttgtggtttggttttgtggcggaggatgaagatggagttccggagcatatgagagaatatagagcagctcttatagaattcaataagaaattggctttggatccccgagtcgaggtctctcagatttccattggagatggtatcacgctctgtagacgtcttgtttgatcaaaagactacttgaagagtacgtagcagaaccaaagtcggagagtttggaataaaagtgttagatggttcaataacgacttcgtcttttgtcacaactttgcttgtaatggtgtgtttgattgatgctcactctttatcttctttctatgttgtggtttcgtcgatgttgttctgtctggcaacaaaactattagtacactaaattacttttaataataattgttgtaacattataatttttttttttctggtcgacacattattattactgttttttttctttttaagtgtttg

SEQ ID NO: 90546 - protein, 221 aa, Arabidopsis thaliana
  peptide (1)..(221): Ceres Seq. ID no. 12724276
  misc_feature (10)..(220): Pfam Name: O-methyltransferase Pfam Description: O-methyltransferase
  misc_feature (1)..(221): Homolog of NCBI NO: 30580369 NR Description: Putative caffeoyl-CoA O-methyltransferase
  misc_feature (10)..(221): Homolog of NCBI NO: 18408911 NR Description: caffeoyl-CoA 3-O-methyltransferase, putative; id: At1g67980.1, supported by cDNA: gi_682727 [Arabidopsis
  misc_feature (10)..(221): Homolog of NCBI NO: 682728 NR Description: S-adenosyl-L-methionine:trans-caffeoyl-Coenzyme A
  misc_feature (1)..(221): Homolog of NCBI NO: 30580370 NR Description: Putative caffeoyl-CoA O-methyltransferase
  misc_feature (1)..(221): Homolog of NCBI NO: 18408913 NR Description: caffeoyl-CoA 3-O-methyltransferase, putative;
  misc_feature (1)..(220): Homolog of NCBI NO: 3023432 NR Description: Caffeoyl-CoA O-methyltransferase
  misc_feature (37)..(221): Homolog of NCBI NO: 15221807 NR Description: caffeoyl-CoA 3-O-methyltransferase, putative; id: At1g24735.1 [Arabidopsis thaliana] >gi|25317647|pir||A86380
  misc_feature (1)..(220): Homolog of NCBI NO: 37720881 NR Description: O-methyltransferase [Mesembryanthemum
  misc_feature (1)..(220): Homolog of NCBI NO: 30580341 NR Description: Caffeoyl-CoA O-methyltransferase
  misc_feature (1)..(220): Homolog of NCBI NO: 30580333 NR Description: Caffeoyl-CoA O-methyltransferase 1
KSEALKQYIMETSAYPREHELLKELRKATVQKYGNLSEMEVPVDEGHFLSMLVKIMNAKNTIEIGVFTGYSLLTTALALPEDGRITAIDIDKEAYEVGLEFIKKAGVDHKINFIHSDGLKALDQLVNDKCEFDFAFADADKSSYVNFHERLLKLVKVGGIIAFDNTLWFGFVAEDEDGVPEHMREYRAALIEFNKKLALDPRVEVSQISIGDGITLCRRLV

SEQ ID NO: 90547 - protein, 212 aa, Arabidopsis thaliana
  peptide (1)..(212): Ceres Seq. ID no. 12724277
  misc_feature (1)..(211): Pfam Name: O-methyltransferase Pfam Description: O-methyltransferase
  misc_feature (1)..(212): Homolog of NCBI NO: 30580369 NR Description: Putative caffeoyl-CoA O-methyltransferase
  misc_feature (1)..(212): Homolog of NCBI NO: 18408911 NR Description: caffeoyl-CoA 3-O-methyltransferase, putative; id: At1g67980.1, supported by cDNA: gi_682727 [Arabidopsis
  misc_feature (1)..(212): Homolog of NCBI NO: 682728 NR Description: S-adenosyl-L-methionine:trans-caffeoyl-Coenzyme A
  misc_feature (1)..(212): Homolog of NCBI NO: 30580370 NR Description: Putative caffeoyl-CoA O-methyltransferase
  misc_feature (1)..(212): Homolog of NCBI NO: 18408913 NR Description: caffeoyl-CoA 3-O-methyltransferase, putative;
  misc_feature (1)..(211): Homolog of NCBI NO: 3023432 NR Description: Caffeoyl-CoA O-methyltransferase
  misc_feature (28)..(212): Homolog of NCBI NO: 15221807 NR Description: caffeoyl-CoA 3-O-methyltransferase, putative; id: At1g24735.1 [Arabidopsis thaliana] >gi|25317647|pir||A86380
  misc_feature (1)..(211): Homolog of NCBI NO: 37720881 NR Description: O-methyltransferase [Mesembryanthemum
  misc_feature (1)..(211): Homolog of NCBI NO: 30580341 NR Description: Caffeoyl-CoA O-methyltransferase
  misc_feature (1)..(211): Homolog of NCBI NO: 30580333 NR Description: Caffeoyl-CoA O-methyltransferase 1
METSAYPREHELLKELRKATVQKYGNLSEMEVPVDEGHFLSMLVKIMNAKNTIEIGVFTGYSLLTTALALPEDGRITAIDIDKEAYEVGLEFIKKAGVDHKINFIHSDGLKALDQLVNDKCEFDFAFADADKSSYVNFHERLLKLVKVGGIIAFDNTLWFGFVAEDEDGVPEHMREYRAALIEFNKKLALDPRVEVSQISIGDGITLCRRLV

SEQ ID NO: 90548 - protein, 183 aa, Arabidopsis thaliana
  peptide (1)..(183): Ceres Seq. ID no. 12724278
  misc_feature (1)..(182): Pfam Name: O-methyltransferase Pfam Description: O-methyltransferase
  misc_feature (1)..(183): Homolog of NCBI NO: 30580369 NR Description: Putative caffeoyl-CoA O-methyltransferase
  misc_feature (1)..(183): Homolog of NCBI NO: 18408911 NR Description: caffeoyl-CoA 3-O-methyltransferase, putative; id: At1g67980.1, supported by cDNA: gi_682727 [Arabidopsis
  misc_feature (1)..(183): Homolog of NCBI NO: 682728 NR Description: S-adenosyl-L-methionine:trans-caffeoyl-Coenzyme A
  misc_feature (1)..(183): Homolog of NCBI NO: 30580370 NR Description: Putative caffeoyl-CoA O-methyltransferase
  misc_feature (1)..(183): Homolog of NCBI NO: 18408913 NR Description: caffeoyl-CoA 3-O-methyltransferase, putative;
  misc_feature (1)..(182): Homolog of NCBI NO: 3023432 NR Description: Caffeoyl-CoA O-methyltransferase
  misc_feature (1)..(183): Homolog of NCBI NO: 15221807 NR Description: caffeoyl-CoA 3-O-methyltransferase, putative; id: At1g24735.1 [Arabidopsis thaliana] >gi|25317647|pir||A86380
  misc_feature (1)..(182): Homolog of NCBI NO: 37720881 NR Description: O-methyltransferase [Mesembryanthemum
  misc_feature (1)..(182): Homolog of NCBI NO: 30580341 NR Description: Caffeoyl-CoA O-methyltransferase
  misc_feature (1)..(182): Homolog of NCBI NO: 30580333 NR Description: Caffeoyl-CoA O-methyltransferase 1
MEVPVDEGHFLSMLVKIMNAKNTIEIGVFTGYSLLTTALALPEDGRITAIDIDKEAYEVGLEFIKKAGVDHKINFIHSDGLKALDQLVNDKCEFDFAFADADKSSYVNFHERLLKLVKVGGIIAFDNTLWFGFVAEDEDGVPEHMREYRAALIEFNKKLALDPRVEVSQISIGDGITLCRRLV

SEQ ID NO: 90549 - DNA, 1092 bp, Arabidopsis thaliana
  misc_feature (1)..(1092): Ceres Seq. ID no. 12724283
  misc_feature: MA Experiment ID: 20001451 Result: Up-regulated in Transcription
  misc_feature: MA Experiment 20001451 PARAMETER Experiment Name: At_Far-red-induction_P Parameter: Age (day) Value: 7
  misc_feature: MA Experiment 20001451 PARAMETER Experiment Name: At_Far-red-induction_P Parameter: Light Value: Far-red vs. White
  misc_feature: MA Experiment 20001451 PARAMETER Experiment Name: At_Far-red-induction_P Parameter: Organism Value: A. thaliana
  misc_feature: MA Experiment 20001451 PARAMETER Experiment Name: At_Far-red-induction_P Parameter: Plant Line Value: Columbia
  misc_feature: MA Experiment 20001451 PARAMETER Experiment Name: At_Far-red-induction_P Parameter: Timepoint (hr) Value: 24
  misc_feature: MA Experiment 20001451 PARAMETER Experiment Name: At_Far-red-induction_P Parameter: Tissue Value: Whole Plant
atgggaaaagtggagattgttcgtaactcacttcctatgagtgggggagatggtccgaacagctactctaagaattctcatttgcagagaaaaacaacaagtttgttgaaagagaaaatagacaaactggtattagagaaactcaatgcaaaaaccctaatctcatctgactccaacacattccggatagccgatcttggttgtgcaactggaccaaatacattctttctcgttgacaacatcatcaaatccattgaaaccagcttaagaaaatcaaactcgtcaaaaccagagtttcttgtcttcttcaacgacctcccacaaaacgacttcaacactctcttcacatctctccctcaagaccggagttacttggcggtcggagtcccgggttcgttctacggccgtgtccttcctcaatcctccgttcatattgtagtgacgatgggggccacacactggctatcgagtgtaccaaaagaggtgttggacaaaagctccaaggcgtggaataaaggcaaggttcactactcaaatgccgcggatgaagttgtgaaggcttatagagatcagtttggtcgggacatggagaagtttctagaagctagggctacagaaatagtaagtggaggtcttttggttgttggaatgtgtgggattcctaaaggaatgcctttctccaatcttgccgacagtatcatgtatacgtccatggctgatgttctcactcaaatgcattccgagggtttgatcagcgaagagcaagtcgataccttcaacatacctatctactcagcaacgcctgaggaggtaacagtcctggtagtgaaaaatggatgcttcactgtcgaatctatggagctgatggacccaacggcctggctcaaacggccgacgaacgtggaggatgttaggcattggatggtttgcataaaggcaacaatgggatctctcttcatcaaccattttggtgaacatctcctcgacgatgtcttcgaccgtctcaccgcaaaactggttggactcaccgagaaaattgaatccagctaccgtgagaaggtcatgttgttctttgcgttgcaacgaaaataa

SEQ ID NO: 90550 - protein, 363 aa, Arabidopsis thaliana
  peptide (1)..(363): Ceres Seq. ID no. 12724284
  misc_feature (40)..(363): Pfam Name: SAM dependent carboxyl methyltransferase Pfam Description: SAM dependent carboxyl methyltransferase
  misc_feature (1)..(363): Homolog of NCBI NO: 15220632 NR Description: methyltransferase-related; protein id: [Arabidopsis thaliana] >gi|25404692|pir||E96703 hypothetical
  misc_feature (12)..(363): Homolog of NCBI NO: 8885614 NR Description: S-adenosyl-L-methionine:salicylic acid carboxyl
  misc_feature (10)..(363): Homolog of NCBI NO: 9758498 NR Description: S-adenosyl-L-methionine:salicylic acid carboxyl
  misc_feature (10)..(363): Homolog of NCBI NO: 15240811 NR Description: methyltransferase-related; protein id:
  misc_feature (10)..(363): Homolog of NCBI NO: 15241002 NR Description: methyltransferase-related; protein id: supported by cDNA: gi_17380699, supported by cDNA: gi_20259006
  misc_feature (13)..(356): Homolog of NCBI NO: 14009292 NR Description: defense-related protein [Brassica carinata]
  misc_feature (10)..(338): Homolog of NCBI NO: 15230523 NR Description: methyltransferase-related; protein id: At3g44840.1
  misc_feature (10)..(363): Homolog of NCBI NO: 9758496 NR Description: S-adenosyl-L-methionine:salicylic acid carboxyl
  misc_feature (10)..(363): Homolog of NCBI NO: 15240809 NR Description: methyltransferase-related; protein id:
  misc_feature (13)..(362): Homolog of NCBI NO: 25402793 NR Description: protein F9L1.6 [imported] - Arabidopsis thaliana
MGKVEIVRNSLPMSGGDGPNSYSKNSHLQRKTTSLLKEKIDKLVLEKLNAKTLISSDSNTFRIADLGCATGPNTFFLVDNIIKSIETSLRKSNSSKPEFLVFFNDLPQNDFNTLFTSLPQDRSYLAVGVPGSFYGRVLPQSSVHIVVTMGATHWLSSVPKEVLDKSSKAWNKGKVHYSNAADEVVKAYRDQFGRDMEKFLEARATEIVSGGLLVVGMCGIPKGMPFSNLADSIMYTSMADVLTQMHSEGLISEEQVDTFNIPIYSATPEEVTVLVVKNGCFTVESMELMDPTAWLKRPTNVEDVRHWMVCIKATMGSLFINHFGEHLLDDVFDRLTAKLVGLTEKIESSYREKVMLFFALQRK

SEQ ID NO: 90551 - protein, 351 aa, Arabidopsis thaliana
  peptide (1)..(351): Ceres Seq. ID no. 12724285
  misc_feature (28)..(351): Pfam Name: SAM dependent carboxyl methyltransferase Pfam Description: SAM dependent carboxyl methyltransferase
  misc_feature (1)..(351): Homolog of NCBI NO: 15220632 NR Description: methyltransferase-related; protein id: [Arabidopsis thaliana] >gi|25404692|pir||E96703 hypothetical
  misc_feature (1)..(351): Homolog of NCBI NO: 8885614 NR Description: S-adenosyl-L-methionine:salicylic acid carboxyl
  misc_feature (1)..(351): Homolog of NCBI NO: 9758498 NR Description: S-adenosyl-L-methionine:salicylic acid carboxyl
  misc_feature (1)..(351): Homolog of NCBI NO: 15240811 NR Description: methyltransferase-related; protein id:
  misc_feature (1)..(351): Homolog of NCBI NO: 15241002 NR Description: methyltransferase-related; protein id: supported by cDNA: gi_17380699, supported by cDNA: gi_20259006
  misc_feature (1)..(344): Homolog of NCBI NO: 14009292 NR Description: defense-related protein [Brassica carinata]
  misc_feature (1)..(326): Homolog of NCBI NO: 15230523 NR Description: methyltransferase-related; protein id: At3g44840.1
  misc_feature (1)..(351): Homolog of NCBI NO: 9758496 NR Description: S-adenosyl-L-methionine:salicylic acid carboxyl
  misc_feature (1)..(351): Homolog of NCBI NO: 15240809 NR Description: methyltransferase-related; protein id:
  misc_feature (1)..(350): Homolog of NCBI NO: 25402793 NR Description: protein F9L1.6 [imported] - Arabidopsis thaliana
MSGGDGPNSYSKNSHLQRKTTSLLKEKIDKLVLEKLNAKTLISSDSNTFRIADLGCATGPNTFFLVDNIIKSIETSLRKSNSSKPEFLVFFNDLPQNDFNTLFTSLPQDRSYLAVGVPGSFYGRVLPQSSVHIVVTMGATHWLSSVPKEVLDKSSKAWNKGKVHYSNAADEVVKAYRDQFGRDMEKFLEARATEIVSGGLLVVGMCGIPKGMPFSNLADSIMYTSMADVLTQMHSEGLISEEQVDTFNIPIYSATPEEVTVLVVKNGCFTVESMELMDPTAWLKRPTNVEDVRHWMVCIKATMGSLFINHFGEHLLDDVFDRLTAKLVGLTEKIESSYREKVMLFFALQRK

SEQ ID NO: 90552 - protein, 215 aa, Arabidopsis thaliana
  peptide (1)..(215): Ceres Seq. ID no. 12724286
  misc_feature (1)..(215): Pfam Name: SAM dependent carboxyl methyltransferase Pfam Description: SAM dependent carboxyl methyltransferase
  misc_feature (1)..(215): Homolog of NCBI NO: 15220632 NR Description: methyltransferase-related; protein id: [Arabidopsis thaliana] >gi|25404692|pir||E96703 hypothetical
  misc_feature (1)..(215): Homolog of NCBI NO: 8885614 NR Description: S-adenosyl-L-methionine:salicylic acid carboxyl
  misc_feature (1)..(215): Homolog of NCBI NO: 9758498 NR Description: S-adenosyl-L-methionine:salicylic acid carboxyl
  misc_feature (1)..(215): Homolog of NCBI NO: 15240811 NR Description: methyltransferase-related; protein id:
  misc_feature (1)..(215): Homolog of NCBI NO: 15241002 NR Description: methyltransferase-related; protein id: supported by cDNA: gi_17380699, supported by cDNA: gi_20259006
  misc_feature (1)..(208): Homolog of NCBI NO: 14009292 NR Description: defense-related protein [Brassica carinata]
  misc_feature (1)..(190): Homolog of NCBI NO: 15230523 NR Description: methyltransferase-related; protein id: At3g44840.1
  misc_feature (1)..(215): Homolog of NCBI NO: 9758496 NR Description: S-adenosyl-L-methionine:salicylic acid carboxyl
  misc_feature (1)..(215): Homolog of NCBI NO: 15240809 NR Description: methyltransferase-related; protein id:
  misc_feature (1)..(214): Homolog of NCBI NO: 25402793 NR Description: protein F9L1.6 [imported] - Arabidopsis thaliana
MGATHWLSSVPKEVLDKSSKAWNKGKVHYSNAADEVVKAYRDQFGRDMEKFLEARATEIVSGGLLVVGMCGIPKGMPFSNLADSIMYTSMADVLTQMHSEGLISEEQVDTFNIPIYSATPEEVTVLVVKNGCFTVESMELMDPTAWLKRPTNVEDVRHWMVCIKATMGSLFINHFGEHLLDDVFDRLTAKLVGLTEKIESSYREKVMLFFALQRK

SEQ ID NO: 90553 - DNA, 951 bp, Arabidopsis thaliana
  misc_feature (1)..(951): Ceres Seq. ID no. 12724287
  misc_feature: MA Experiment ID: 20001910 Result: Up-regulated in Transcription
  misc_feature: MA Experiment 20001910 PARAMETER Experiment Name: At_Drought_Reproduction_P Parameter: Age (day) Value: 37
  misc_feature: MA Experiment 20001910 PARAMETER Experiment Name: At_Drought_Reproduction_P Parameter: Organism Value: A. thaliana
  misc_feature: MA Experiment 20001910 PARAMETER Experiment Name: At_Drought_Reproduction_P Parameter: Plant Line Value: WS
  misc_feature: MA Experiment 20001910 PARAMETER Experiment Name: At_Drought_Reproduction_P Parameter: Timepoint (day) Value: 7
  misc_feature: MA Experiment 20001910 PARAMETER Experiment Name: At_Drought_Reproduction_P Parameter: Tissue Value: Flowers
  misc_feature: MA Experiment 20001910 PARAMETER Experiment Name: At_Drought_Reproduction_P Parameter: Treatment Value: Drought vs. No Drought
atggcaacaatgaaaataccaatgacggtaccttctcctcgagtcgatgctgaccaactctttaaggccttcaaaggaagaggctgcgatacttcggtgatcatcaacatcttagctcatcgcaatgcaacacaacgagctctcatcgaacaagaatacgaaaccaaattctcggatgacctccgaaaacgtctccactctgagcttcatggtcatctcaagaaagccgttcttttgtggatgcctgaagcagtggagcgagacgcttcaatactgaaacgctccttaagaggagccgtgactgatcataaagcgattgctgagattatatgcacacgatctggctctcagcttcgtcagatcaaacaggtctactcaaacactttcggtgtgaaacttgaagaggacatcgaatccgaagcttctggcaatcacaaaagagttttgctcgcgtatttgaacactacgcgatatgaaggaccagagatcgataatgcgagtgtagagaacgatgctaggactctcaagagcgcggttgcaaggaagcataaatctgatgaccagacgttgattcagatattcactgaccgaagcaggactcatttggtcgctgtaagatctacttaccgttccatgtacggcaaagaacttggaaaggccataagagatgagactcgcgggaacttcgagcatgtccttctaacaattttacaatgtgctgaaaactcttgtttctatttcgcaaaggcattgaggaaatcaatgaaaggattaggaacagatgacacggcgttgataagaatcgtggtgacgagagcagaggtggatatgcagttcatcatcacagaataccgtaagagatacaagaagactttgtacaatgctgttcattctgatacaactagtcattacaggacttttctcctctctcttttaggccccaacgtttga

SEQ ID NO: 90554 - protein, 316 aa, Arabidopsis thaliana
  peptide (1)..(316): Ceres Seq. ID no. 12724288
  misc_feature (13)..(80): Pfam Name: Annexin Pfam Description: Annexin
  misc_feature (1)..(316): Homolog of NCBI NO: 18408941 NR Description: putative annexin; protein id: At1g68090.1,
  misc_feature (1)..(316): Homolog of NCBI NO: 12667520 NR Description: calcium-binding protein annexin 5 [Arabidopsis
  misc_feature (1)..(316): Homolog of NCBI NO: 25295766 NR Description: probable annexin T23K23.6 [imported] -
  misc_feature (1)..(307): Homolog of NCBI NO: 3881978 NR Description: annexin-like protein [Medicago sativa]
  misc_feature (1)..(313): Homolog of NCBI NO: 34905010 NR Description: P0456B03.13 [Oryza sativa (japonica
  misc_feature (1)..(313): Homolog of NCBI NO: 38606205 NR Description: annexin [Triticum aestivum]
  misc_feature (1)..(313): Homolog of NCBI NO: 11177826 NR Description: annexin [Ceratopteris richardii]
  misc_feature (1)..(313): Homolog of NCBI NO: 11177824 NR Description: annexin [Ceratopteris richardii]
  misc_feature (1)..(313): Homolog of NCBI NO: 15238105 NR Description: annexin -like protein; protein id: At5g10230.1,
  misc_feature (1)..(313): Homolog of NCBI NO: 6272285 NR Description: annexin p33 [Zea mays]
MATMKIPMTVPSPRVDADQLFKAFKGRGCDTSVIINILAHRNATQRALIEQEYETKFSDDLRKRLHSELHGHLKKAVLLWMPEAVERDASILKRSLRGAVTDHKAIAEIICTRSGSQLRQIKQVYSNTFGVKLEEDIESEASGNHKRVLLAYLNTTRYEGPEIDNASVENDARTLKSAVARKHKSDDQTLIQIFTDRSRTHLVAVRSTYRSMYGKELGKAIRDETRGNFEHVLLTILQCAENSCFYFAKALRKSMKGLGTDDTALIRIVVTRAEVDMQFIITEYRKRYKKTLYNAVHSDTTSHYRTFLLSLLGPNV

SEQ ID NO: 90555 - protein, 313 aa, Arabidopsis thaliana
  peptide (1)..(313): Ceres Seq. ID no. 12724289
  misc_feature (10)..(77): Pfam Name: Annexin Pfam Description: Annexin
  misc_feature (1)..(313): Homolog of NCBI NO: 18408941 NR Description: putative annexin; protein id: At1g68090.1,
  misc_feature (1)..(313): Homolog of NCBI NO: 12667520 NR Description: calcium-binding protein annexin 5 [Arabidopsis
  misc_feature (1)..(313): Homolog of NCBI NO: 25295766 NR Description: probable annexin T23K23.6 [imported] -
  misc_feature (1)..(304): Homolog of NCBI NO: 3881978 NR Description: annexin-like protein [Medicago sativa]
  misc_feature (1)..(310): Homolog of NCBI NO: 34905010 NR Description: P0456B03.13 [Oryza sativa (japonica
  misc_feature (1)..(310): Homolog of NCBI NO: 38606205 NR Description: annexin [Triticum aestivum]
  misc_feature (1)..(310): Homolog of NCBI NO: 11177826 NR Description: annexin [Ceratopteris richardii]
  misc_feature (1)..(310): Homolog of NCBI NO: 11177824 NR Description: annexin [Ceratopteris richardii]
  misc_feature (1)..(310): Homolog of NCBI NO: 15238105 NR Description: annexin -like protein; protein id: At5g10230.1,
  misc_feature (1)..(310): Homolog of NCBI NO: 6272285 NR Description: annexin p33 [Zea mays]
MKIPMTVPSPRVDADQLFKAFKGRGCDTSVIINILAHRNATQRALIEQEYETKFSDDLRKRLHSELHGHLKKAVLLWMPEAVERDASILKRSLRGAVTDHKAIAEIICTRSGSQLRQIKQVYSNTFGVKLEEDIESEASGNHKRVLLAYLNTTRYEGPEIDNASVENDARTLKSAVARKHKSDDQTLIQIFTDRSRTHLVAVRSTYRSMYGKELGKAIRDETRGNFEHVLLTILQCAENSCFYFAKALRKSMKGLGTDDTALIRIVVTRAEVDMQFIITEYRKRYKKTLYNAVHSDTTSHYRTFLLSLLGPNV

SEQ ID NO: 90556 - protein, 309 aa, Arabidopsis thaliana
  peptide (1)..(309): Ceres Seq. ID no. 12724290
  misc_feature (6)..(73): Pfam Name: Annexin Pfam Description: Annexin
  misc_feature (1)..(309): Homolog of NCBI NO: 18408941 NR Description: putative annexin; protein id: At1g68090.1,
  misc_feature (1)..(309): Homolog of NCBI NO: 12667520 NR Description: calcium-binding protein annexin 5 [Arabidopsis
  misc_feature (1)..(309): Homolog of NCBI NO: 25295766 NR Description: probable annexin T23K23.6 [imported] -
  misc_feature (1)..(300): Homolog of NCBI NO: 3881978 NR Description: annexin-like protein [Medicago sativa]
  misc_feature (1)..(306): Homolog of NCBI NO: 34905010 NR Description: P0456B03.13 [Oryza sativa (japonica
  misc_feature (1)..(306): Homolog of NCBI NO: 38606205 NR Description: annexin [Triticum aestivum]
  misc_feature (1)..(306): Homolog of NCBI NO: 11177826 NR Description: annexin [Ceratopteris richardii]
  misc_feature (1)..(306): Homolog of NCBI NO: 11177824 NR Description: annexin [Ceratopteris richardii]
  misc_feature (1)..(306): Homolog of NCBI NO: 15238105 NR Description: annexin -like protein; protein id: At5g10230.1,
  misc_feature (1)..(306): Homolog of NCBI NO: 6272285 NR Description: annexin p33 [Zea mays]
MTVPSPRVDADQLFKAFKGRGCDTSVIINILAHRNATQRALIEQEYETKFSDDLRKRLHSELHGHLKKAVLLWMPEAVERDASILKRSLRGAVTDHKAIAEIICTRSGSQLRQIKQVYSNTFGVKLEEDIESEASGNHKRVLLAYLNTTRYEGPEIDNASVENDARTLKSAVARKHKSDDQTLIQIFTDRSRTHLVAVRSTYRSMYGKELGKAIRDETRGNFEHVLLTILQCAENSCFYFAKALRKSMKGLGTDDTALIRIVVTRAEVDMQFIITEYRKRYKKTLYNAVHSDTTSHYRTFLLSLLGPNV

SEQ ID NO: 90557 - DNA, 1521 bp, Arabidopsis thaliana
  misc_feature (1)..(1521): Ceres Seq. ID no. 12724298
  misc_feature: MA Experiment ID: 20000171 Result: Up-regulated in Transcription
  misc_feature: MA Experiment 20000171 PARAMETER Experiment Name: At_42deg_Heat_P Parameter: Age (day) Value: 14
  misc_feature: MA Experiment 20000171 PARAMETER Experiment Name: At_42deg_Heat_P Parameter: Organism Value: A. thaliana
  misc_feature: MA Experiment 20000171 PARAMETER Experiment Name: At_42deg_Heat_P Parameter: Plant Line Value: WS
  misc_feature: MA Experiment 20000171 PARAMETER Experiment Name: At_42deg_Heat_P Parameter: Temperature (deg C) Value: 42 vs. 22
  misc_feature: MA Experiment 20000171 PARAMETER Experiment Name: At_42deg_Heat_P Parameter: Timepoint (hr) Value: 1
  misc_feature: MA Experiment 20000171 PARAMETER Experiment Name: At_42deg_Heat_P Parameter: Tissue Value: Aerial
  misc_feature: MA Experiment ID: 20000173 Result: Up-regulated in Transcription
  misc_feature: MA Experiment 20000173 PARAMETER Experiment Name: At_42deg_Heat_P Parameter: Age (day) Value: 14
  misc_feature: MA Experiment 20000173 PARAMETER Experiment Name: At_42deg_Heat_P Parameter: Organism Value: A. thaliana
  misc_feature: MA Experiment 20000173 PARAMETER Experiment Name: At_42deg_Heat_P Parameter: Plant Line Value: WS
  misc_feature: MA Experiment 20000173 PARAMETER Experiment Name: At_42deg_Heat_P Parameter: Temperature (deg C) Value: 42 vs. 22
  misc_feature: MA Experiment 20000173 PARAMETER Experiment Name: At_42deg_Heat_P Parameter: Timepoint (hr) Value: 6
  misc_feature: MA Experiment 20000173 PARAMETER Experiment Name: At_42deg_Heat_P Parameter: Tissue Value: Aerial
  misc_feature: MA Experiment ID: 20000234 Result: Down-regulated in Transcription
  misc_feature: MA Experiment 20000234 PARAMETER Experiment Name: At_Siliques_P Parameter: Age (day) Value: 21
  misc_feature: MA Experiment 20000234 PARAMETER Experiment Name: At_Siliques_P Parameter: Organism Value: A. thaliana
  misc_feature: MA Experiment 20000234 PARAMETER Experiment Name: At_Siliques_P Parameter: Plant Line Value: WS
  misc_feature: MA Experiment 20000234 PARAMETER Experiment Name: At_Siliques_P Parameter: Tissue Value: Less Than 5mm Siliques vs. Whole Plant
  misc_feature: MA Experiment ID: 20000437 Result: Up-regulated in Transcription
  misc_feature: MA Experiment 20000437 PARAMETER Experiment Name: At_Drought_P Parameter: Age (day) Value: 8
  misc_feature: MA Experiment 20000437 PARAMETER Experiment Name: At_Drought_P Parameter: Organism Value: A. thaliana
  misc_feature: MA Experiment 20000437 PARAMETER Experiment Name: At_Drought_P Parameter: Plant Line Value: WS
  misc_feature: MA Experiment 20000437 PARAMETER Experiment Name: At_Drought_P Parameter: Timepoint (hr) Value: 24
  misc_feature: MA Experiment 20000437 PARAMETER Experiment Name: At_Drought_P Parameter: Tissue Value: Whole Plant
  misc_feature: MA Experiment 20000437 PARAMETER Experiment Name: At_Drought_P Parameter: Treatment Value: Drought vs. No Drought
  misc_feature: MA Experiment ID: 20000495 Result: Down-regulated in Transcription
  misc_feature: MA Experiment 20000495 PARAMETER Experiment Name: At_Guard_Cells_P Parameter: Harvest Date Value: 8/2/2002
  misc_feature: MA Experiment 20000495 PARAMETER Experiment Name: At_Guard_Cells_P Parameter: Organism Value: A. thaliana
  misc_feature: MA Experiment 20000495 PARAMETER Experiment Name: At_Guard_Cells_P Parameter: Tissue Value: Guard Cells vs. Leaves
  misc_feature: MA Experiment ID: 20001557 Result: Down-regulated in Transcription
  misc_feature: MA Experiment 20001557 PARAMETER Experiment Name: At_Drought_Soil_Dry_P Parameter: Age (day) Value: 27
  misc_feature: MA Experiment 20001557 PARAMETER Experiment Name: At_Drought_Soil_Dry_P Parameter: Organism Value: A. thaliana
  misc_feature: MA Experiment 20001557 PARAMETER Experiment Name: At_Drought_Soil_Dry_P Parameter: Plant Line Value: WS
  misc_feature: MA Experiment 20001557 PARAMETER Experiment Name: At_Drought_Soil_Dry_P Parameter: Post Timepoint (hr) Value: 3
  misc_feature: MA Experiment 20001557 PARAMETER Experiment Name: At_Drought_Soil_Dry_P Parameter: Post-Treatment Value: Re-Water vs. No Drought
  misc_feature: MA Experiment 20001557 PARAMETER Experiment Name: At_Drought_Soil_Dry_P Parameter: Timepoint (day) Value: 13
  misc_feature: MA Experiment 20001557 PARAMETER Experiment Name: At_Drought_Soil_Dry_P Parameter: Treatment Value: Drought vs. No Drought
gaaagagaaactccgataccagagcttggtggagcagtggagacgcttccacgcgaatctcgcagtcccactcgtcttcctccttccctctcttcctttgaataccttacctctctcggtctcgctccctccctcgattcaagcctattcgtcttcttacgctgtgtcttgaaaccctaatctttttcatttcaatccctaaaggtgtgattttgagattatggccaaagctaggaaggcaggacgtagggttccttcacgacgcttcagggcaagagcaaaaccatacaaatttccatcttctaaaagacttgtggcgagaaacatgtttgcggaagattgttcaaagtgtctagagaagagggattgggagaatgttatatgttcggtttgcatggagtgtccacacaacgctgtccttcttctctgctcatctcatgacaagggatgtcgtccttacatgtgtggaaccagtttccggtattctaattgcttagatcagtacaagaaagcgtcagctaagctgaagacatcgggccatcaacagatcaataagtctgagcttggaaatctcacatgcccactttgtagaggacaggtgaaaggttggacaatcgtacagcctgctcgtgactttttgaatcttaagaagaggatctgtatgcaggagaactgtgtttatgctggaaccttcaaagagctgaggaaacacatgaaagtggaccaccctagtgcgaagccgcgtgaagtggatcctgatgtggagcagaattggagaaggcttgagatcgagcatgaccgggacgatgttatgagcacgattaggtcgacaatgcctggtacagtggtgtatggtgattacgtaattgaaaggaacaatgccaacggttcagattcagacgagggtggtgatgatgatgggatcgatgctgcatttggtaggaatcttgtgaatgttttccttctgttacatgcttttggggcatcaggtaatcagatcagacgctctgattcagattcgaatgactcgacaacaatcaaccgaggaacaagtgagctgaatttctctgaagaagaagaggaagaggaggaggaggagaggcatagtaacagtaactctttggcaagtcgaatgaggcgacaaggacgcgttctgctgggacgttcaggtaggagacgtagagatagagaagctaaccagaacacaggtcctcctcctagatgagagagaatcacacgaattcaaaagaaaaccctgtctgattttgggtttcaggtaagctttatggtatggttaggtacaaatgtagtttcgacaagtttaaaacaaaacaaaaaaaggcttttggcctttctgctatcaccattggagaatttgggaatttgactcgaaattctttcatatgctagagaagcaggcttgcaatctcatgttttatttactgtattctgatgtaactttctgggtggaaaattcacaaatatctatccttgtgaataagcatgatcagtgatgatgac

SEQ ID NO: 90558 - protein, 334 aa, Arabidopsis thaliana
  peptide (1)..(334): Ceres Seq. ID no. 12724299
  misc_feature (1)..(334): Homolog of NCBI NO: 15221290 NR Description: unknown protein; protein id: At1g68140.1, by cDNA: gi_17064999 [Arabidopsis thaliana]
  misc_feature (88)..(308): Homolog of NCBI NO: 38346521 NR Description: OSJNBa0027H09.16 [Oryza sativa (japonica
  misc_feature (48)..(109): Homolog of NCBI NO: 38346521 NR Description: OSJNBa0027H09.16 [Oryza sativa (japonica
  misc_feature (42)..(269): Homolog of NCBI NO: 25365932 NR Description: unknown protein T32E8.10 [imported] - Arabidopsis
  misc_feature (42)..(269): Homolog of NCBI NO: 30699285 NR Description: expressed protein [Arabidopsis thaliana] unknown protein [Arabidopsis thaliana]
  misc_feature (43)..(232): Homolog of NCBI NO: 15236507 NR Description: hypothetical protein; protein id: At4g08460.1, by cDNA: gi_18389229 [Arabidopsis thaliana]
  misc_feature (1)..(231): Homolog of NCBI NO: 38344827 NR Description: OSJNBa0064H22.8 [Oryza sativa (japonica
  misc_feature (108)..(232): Homolog of NCBI NO: 15230170 NR Description: unknown protein; protein id: At3g24740.1, by cDNA: gi_19715578 [Arabidopsis thaliana] gb|AAF16548.1~gene_id:K7P8.3~similar to unknown protein
  misc_feature (32)..(97): Homolog of NCBI NO: 15230170 NR Description: unknown protein; protein id: At3g24740.1, by cDNA: gi_19715578 [Arabidopsis thaliana] gb|AAF16548.1~gene_id:K7P8.3~similar to unknown protein
  misc_feature (1)..(203): Homolog of NCBI NO: 34912600 NR Description: P0046B10.17 [Oryza sativa (japonica
MAKARKAGRRVPSRRFRARAKPYKFPSSKRLVARNMFAEDCSKCLEKRDWENVICSVCMECPHNAVLLLCSSHDKGCRPYMCGTSFRYSNCLDQYKKASAKLKTSGHQQINKSELGNLTCPLCRGQVKGWTIVQPARDFLNLKKRICMQENCVYAGTFKELRKHMKVDHPSAKPREVDPDVEQNWRRLEIEHDRDDVMSTIRSTMPGTVVYGDYVIERNNANGSDSDEGGDDDGIDAAFGRNLVNVFLLLHAFGASGNQIRRSDSDSNDSTTINRGTSELNFSEEEEEEEEEERHSNSNSLASRMRRQGRVLLGRSGRRRRDREANQNTGPPPR

SEQ ID NO: 90559 - protein, 299 aa, Arabidopsis thaliana
  peptide (1)..(299): Ceres Seq. ID no. 12724300
  misc_feature (1)..(299): Homolog of NCBI NO: 15221290 NR Description: unknown protein; protein id: At1g68140.1, by cDNA: gi_17064999 [Arabidopsis thaliana]
  misc_feature (53)..(273): Homolog of NCBI NO: 38346521 NR Description: OSJNBa0027H09.16 [Oryza sativa (japonica
  misc_feature (13)..(74): Homolog of NCBI NO: 38346521 NR Description: OSJNBa0027H09.16 [Oryza sativa (japonica
  misc_feature (7)..(234): Homolog of NCBI NO: 25365932 NR Description: unknown protein T32E8.10 [imported] - Arabidopsis
  misc_feature (7)..(234): Homolog of NCBI NO: 30699285 NR Description: expressed protein [Arabidopsis thaliana] unknown protein [Arabidopsis thaliana]
  misc_feature (8)..(197): Homolog of NCBI NO: 15236507 NR Description: hypothetical protein; protein id: At4g08460.1, by cDNA: gi_18389229 [Arabidopsis thaliana]
  misc_feature (1)..(196): Homolog of NCBI NO: 38344827 NR Description: OSJNBa0064H22.8 [Oryza sativa (japonica
  misc_feature (73)..(197): Homolog of NCBI NO: 15230170 NR Description: unknown protein; protein id: At3g24740.1, by cDNA: gi_19715578 [Arabidopsis thaliana] gb|AAF16548.1~gene_id:K7P8.3~similar to unknown protein
  misc_feature (1)..(62): Homolog of NCBI NO: 15230170 NR Description: unknown protein; protein id: At3g24740.1, by cDNA: gi_19715578 [Arabidopsis thaliana] gb|AAF16548.1~gene_id:K7P8.3~similar to unknown protein
  misc_feature (1)..(168): Homolog of NCBI NO: 34912600 NR Description: P0046B10.17 [Oryza sativa (japonica
MFAEDCSKCLEKRDWENVICSVCMECPHNAVLLLCSSHDKGCRPYMCGTSFRYSNCLDQYKKASAKLKTSGHQQINKSELGNLTCPLCRGQVKGWTIVQPARDFLNLKKRICMQENCVYAGTFKELRKHMKVDHPSAKPREVDPDVEQNWRRLEIEHDRDDVMSTIRSTMPGTVVYGDYVIERNNANGSDSDEGGDDDGIDAAFGRNLVNVFLLLHAFGASGNQIRRSDSDSNDSTTINRGTSELNFSEEEEEEEEEERHSNSNSLASRMRRQGRVLLGRSGRRRRDREANQNTGPPPR

SEQ ID NO: 90560 - protein, 276 aa, Arabidopsis thaliana
  peptide (1)..(276): Ceres Seq. ID no. 12724301
  misc_feature (1)..(276): Homolog of NCBI NO: 15221290 NR Description: unknown protein; protein id: At1g68140.1, by cDNA: gi_17064999 [Arabidopsis thaliana]
  misc_feature (30)..(250): Homolog of NCBI NO: 38346521 NR Description: OSJNBa0027H09.16 [Oryza sativa (japonica
  misc_feature (1)..(51): Homolog of NCBI NO: 38346521 NR Description: OSJNBa0027H09.16 [Oryza sativa (japonica
  misc_feature (1)..(211): Homolog of NCBI NO: 25365932 NR Description: unknown protein T32E8.10 [imported] - Arabidopsis
  misc_feature (1)..(211): Homolog of NCBI NO: 30699285 NR Description: expressed protein [Arabidopsis thaliana] unknown protein [Arabidopsis thaliana]
  misc_feature (1)..(174): Homolog of NCBI NO: 15236507 NR Description: hypothetical protein; protein id: At4g08460.1, by cDNA: gi_18389229 [Arabidopsis thaliana]
  misc_feature (1)..(173): Homolog of NCBI NO: 38344827 NR Description: OSJNBa0064H22.8 [Oryza sativa (japonica
  misc_feature (50)..(174): Homolog of NCBI NO: 15230170 NR Description: unknown protein; protein id: At3g24740.1, by cDNA: gi_19715578 [Arabidopsis thaliana] gb|AAF16548.1~gene_id:K7P8.3~similar to unknown protein
  misc_feature (1)..(39): Homolog of NCBI NO: 15230170 NR Description: unknown protein; protein id: At3g24740.1, by cDNA: gi_19715578 [Arabidopsis thaliana] gb|AAF16548.1~gene_id:K7P8.3~similar to unknown protein
  misc_feature (1)..(145): Homolog of NCBI NO: 34912600 NR Description: P0046B10.17 [Oryza sativa (japonica
MECPHNAVLLLCSSHDKGCRPYMCGTSFRYSNCLDQYKKASAKLKTSGHQQINKSELGNLTCPLCRGQVKGWTIVQPARDFLNLKKRICMQENCVYAGTFKELRKHMKVDHPSAKPREVDPDVEQNWRRLEIEHDRDDVMSTIRSTMPGTVVYGDYVIERNNANGSDSDEGGDDDGIDAAFGRNLVNVFLLLHAFGASGNQIRRSDSDSNDSTTINRGTSELNFSEEEEEEEEEERHSNSNSLASRMRRQGRVLLGRSGRRRRDREANQNTGPPPR

SEQ ID NO: 90561 - DNA, 1125 bp, Arabidopsis thaliana
  misc_feature (1)..(1125): Ceres Seq. ID no. 12724302
  misc_feature: MA Experiment ID: 20000436 Result: Down-regulated in Transcription
  misc_feature: MA Experiment 20000436 PARAMETER Experiment Name: At_Drought_P Parameter: Age (day) Value: 7
  misc_feature: MA Experiment 20000436 PARAMETER Experiment Name: At_Drought_P Parameter: Organism Value: A. thaliana
  misc_feature: MA Experiment 20000436 PARAMETER Experiment Name: At_Drought_P Parameter: Plant Line Value: WS
  misc_feature: MA Experiment 20000436 PARAMETER Experiment Name: At_Drought_P Parameter: Timepoint (hr) Value: 12
  misc_feature: MA Experiment 20000436 PARAMETER Experiment Name: At_Drought_P Parameter: Tissue Value: Whole Plant
  misc_feature: MA Experiment 20000436 PARAMETER Experiment Name: At_Drought_P Parameter: Treatment Value: Drought vs. No Drought
  misc_feature: MA Experiment ID: 20000439 Result: Up-regulated in Transcription
  misc_feature: MA Experiment 20000439 PARAMETER Experiment Name: At_Roots__P Parameter: Age (day) Value: 14 vs. 21
  misc_feature: MA Experiment 20000439 PARAMETER Experiment Name: At_Roots__P Parameter: Organism Value: A. thaliana
  misc_feature: MA Experiment 20000439 PARAMETER Experiment Name: At_Roots__P Parameter: Tissue Value: Roots vs. Whole Plant
atgggatttgactttagcacttcaaaatccaaagctaaaagacaaaaaagaatagaggttcgatttgcatctccattaatgggcatcgatctttctcttaagctcgaggccgaggagaaaaagaaagagatagaaggatcgaaacatagccgtgagaacaaagaagacgaagaacatgatgctagtggtgatgaagatgaacaaatggtgaaagaagacgaagatgattcttcttctttaggtttaagaacccgagaagaagaaaacgaacgtgaagagctcttgcagctacagatccagatggaaagtgtgaaagaagagaatactaggttgaggaagcttgtcgagcagactcttgaagattatcgtcatcttgagatgaaattcccggttatcgataaaaccaagaagatggatcttgaaatgttccttggagtacaaggcaaacgatgtgtggatataacaagtaaggctcggaaaagaggagctgagagatctccgtcaatggaaagagaaatagggctttcactttctctagagaaaaaacagaaacaagaagagagcaaagaagctgttcagtctcatcaccaaagatacaatagtagcagcttagatatgaatatgccacgtatcatttcatcttctcaaggtaatagaaaggccagggtgtccgtgagggcgagatgtgagaccgcaacaatgaatgatggatgccaatggaggaagtacggtcagaaaaccgcgaaagggaatccatgtcctcgagcttattaccgatgcaccgtggctccaggatgtcccgttagaaaacaggtgcaaaggtgtttagaagacatgtcaatactgataacaacctacgaaggaacacataaccatccacttccggtcggagcaacagccatggcttccactgcctctacttctccattcttgttactcgattccagtgacaacctctctcatccttcctattaccaaactcctcaagccatagactcttctttgattacatacccacaaaatagcagctacaacaatcgaaccataagaagcttgaactttgatggtccatctagaggagatcacgtttcatcttctcaaaaccgattaaattggatgatgtag

SEQ ID NO: 90562 - protein, 374 aa, Arabidopsis thaliana
  peptide (1)..(374): Ceres Seq. ID no. 12724303
  misc_feature (234)..(294): Pfam Name: WRKY DNA -binding domain Pfam Description: WRKY DNA -binding domain
  misc_feature (1)..(374): Homolog of NCBI NO: 15221291 NR Description: WRKY family transcription factor; protein id: supported by cDNA: gi_15990587 [Arabidopsis thaliana]
  misc_feature (87)..(357): Homolog of NCBI NO: 15234284 NR Description: WRKY family transcription factor; protein id: supported by cDNA: gi_19172391 [Arabidopsis thaliana]
  misc_feature (66)..(366): Homolog of NCBI NO: 18407554 NR Description: WRKY family transcription factor; protein id: supported by cDNA: gi_12658409, supported by cDNA: gi_15810266 thaliana] >gi|20978780|sp|Q9C519|WRK6_ARATH WRKY transcription
  misc_feature (42)..(372): Homolog of NCBI NO: 15242221 NR Description: WRKY family transcription factor; protein id:
  misc_feature (27)..(323): Homolog of NCBI NO: 18415833 NR Description: WRKY family transcription factor; protein id: supported by cDNA: gi_15990589 [Arabidopsis thaliana]
  misc_feature (50)..(323): Homolog of NCBI NO: 11357339 NR Description: hypothetical protein AT4g22070 - Arabidopsis >gi|2961352|emb|CAA18110.1| putative protein [Arabidopsis >gi|7269052|emb|CAB79162.1| putative protein [Arabidopsis
  misc_feature (85)..(320): Homolog of NCBI NO: 30686070 NR Description: WRKY family transcription factor [Arabidopsis >gi|20978774|sp|Q8VWV6|WR61_ARATH Probable WRKY transcription
  misc_feature (212)..(318): Homolog of NCBI NO: 30013667 NR Description: Avr9/Cf-9 rapidly elicited protein 126 [Nicotiana
  misc_feature (29)..(367): Homolog of NCBI NO: 15233516 NR Description: WRKY family transcription factor; protein id: supported by cDNA: gi_15990593 [Arabidopsis thaliana]
  misc_feature (219)..(316): Homolog of NCBI NO: 5042446 NR Description: putative WRKY DNA binding protein [Oryza sativa
MGFDFSTSKSKAKRQKRIEVRFASPLMGIDLSLKLEAEEKKKEIEGSKHSRENKEDEEHDASGDEDEQMVKEDEDDSSSLGLRTREEENEREELLQLQIQMESVKEENTRLRKLVEQTLEDYRHLEMKFPVIDKTKKMDLEMFLGVQGKRCVDITSKARKRGAERSPSMEREIGLSLSLEKKQKQEESKEAVQSHHQRYNSSSLDMNMPRIISSSQGNRKARVSVRARCETATMNDGCQWRKYGQKTAKGNPCPRAYYRCTVAPGCPVRKQVQRCLEDMSILITTYEGTHNHPLPVGATAMASTASTSPFLLLDSSDNLSHPSYYQTPQAIDSSLITYPQNSSYNNRTIRSLNFDGPSRGDHVSSSQNRLNWMM

SEQ ID NO: 90563 - protein, 348 aa, Arabidopsis thaliana; identical to SEQ ID NO: 88886
  peptide (1)..(348): Ceres Seq. ID no. 12724304
  misc_feature (208)..(268): Pfam Name: WRKY DNA -binding domain Pfam Description: WRKY DNA -binding domain
  misc_feature (1)..(348): Homolog of NCBI NO: 15221291 NR Description: WRKY family transcription factor; protein id: supported by cDNA: gi_15990587 [Arabidopsis thaliana]
  misc_feature (61)..(331): Homolog of NCBI NO: 15234284 NR Description: WRKY family transcription factor; protein id: supported by cDNA: gi_19172391 [Arabidopsis thaliana]
  misc_feature (40)..(340): Homolog of NCBI NO: 18407554 NR Description: WRKY family transcription factor; protein id: supported by cDNA: gi_12658409, supported by cDNA: gi_15810266 thaliana] >gi|20978780|sp|Q9C519|WRK6_ARATH WRKY transcription
  misc_feature (16)..(346): Homolog of NCBI NO: 15242221 NR Description: WRKY family transcription factor; protein id:
  misc_feature (1)..(297): Homolog of NCBI NO: 18415833 NR Description: WRKY family transcription factor; protein id: supported by cDNA: gi_15990589 [Arabidopsis thaliana]
  misc_feature (24)..(297): Homolog of NCBI NO: 11357339 NR Description: hypothetical protein AT4g22070 - Arabidopsis >gi|2961352|emb|CAA18110.1| putative protein [Arabidopsis >gi|7269052|emb|CAB79162.1| putative protein [Arabidopsis
  misc_feature (59)..(294): Homolog of NCBI NO: 30686070 NR Description: WRKY family transcription factor [Arabidopsis >gi|20978774|sp|Q8VWV6|WR61_ARATH Probable WRKY transcription
  misc_feature (186)..(292): Homolog of NCBI NO: 30013667 NR Description: Avr9/Cf-9 rapidly elicited protein 126 [Nicotiana
  misc_feature (3)..(341): Homolog of NCBI NO: 15233516 NR Description: WRKY family transcription factor; protein id: supported by cDNA: gi_15990593 [Arabidopsis thaliana]
  misc_feature (193)..(290): Homolog of NCBI NO: 5042446 NR Description: putative WRKY DNA binding protein [Oryza sativa

SEQ ID NO: 90564 - protein, 306 aa, Arabidopsis thaliana; identical to SEQ ID NO: 88887
  peptide (1)..(306): Ceres Seq. ID no. 12724305
  misc_feature (166)..(226): Pfam Name: WRKY DNA -binding domain Pfam Description: WRKY DNA -binding domain
  misc_feature (1)..(306): Homolog of NCBI NO: 15221291 NR Description: WRKY family transcription factor; protein id: supported by cDNA: gi_15990587 [Arabidopsis thaliana]
  misc_feature (19)..(289): Homolog of NCBI NO: 15234284 NR Description: WRKY family transcription factor; protein id: supported by cDNA: gi_19172391 [Arabidopsis thaliana]
  misc_feature (1)..(298): Homolog of NCBI NO: 18407554 NR Description: WRKY family transcription factor; protein id: supported by cDNA: gi_12658409, supported by cDNA: gi_15810266 thaliana] >gi|20978780|sp|Q9C519|WRK6_ARATH WRKY transcription
  misc_feature (1)..(304): Homolog of NCBI NO: 15242221 NR Description: WRKY family transcription factor; protein id:
  misc_feature (1)..(255): Homolog of NCBI NO: 18415833 NR Description: WRKY family transcription factor; protein id: supported by cDNA: gi_15990589 [Arabidopsis thaliana]
  misc_feature (1)..(255): Homolog of NCBI NO: 11357339 NR Description: hypothetical protein AT4g22070 - Arabidopsis >gi|2961352|emb|CAA18110.1| putative protein [Arabidopsis >gi|7269052|emb|CAB79162.1| putative protein [Arabidopsis
  misc_feature (17)..(252): Homolog of NCBI NO: 30686070 NR Description: WRKY family transcription factor [Arabidopsis >gi|20978774|sp|Q8VWV6|WR61_ARATH Probable WRKY transcription
  misc_feature (144)..(250): Homolog of NCBI NO: 30013667 NR Description: Avr9/Cf-9 rapidly elicited protein 126 [Nicotiana
  misc_feature (1)..(299): Homolog of NCBI NO: 15233516 NR Description: WRKY family transcription factor; protein id: supported by cDNA: gi_15990593 [Arabidopsis thaliana]
  misc_feature (151)..(248): Homolog of NCBI NO: 5042446 NR Description: putative WRKY DNA binding protein [Oryza sativa

SEQ ID NO: 90565 - DNA, 1071 bp, Arabidopsis thaliana
  misc_feature (1)..(1071): Ceres Seq. ID no. 12724330
  misc_feature: MA Experiment ID: 20000349 Result: Up-regulated in Transcription
  misc_feature: MA Experiment 20000349 PARAMETER Experiment Name: At_100uM_ABA_Sub_P Parameter: Age (day) Value: 14
  misc_feature: MA Experiment 20000349 PARAMETER Experiment Name: At_100uM_ABA_Sub_P Parameter: Organism Value: A. thaliana
  misc_feature: MA Experiment 20000349 PARAMETER Experiment Name: At_100uM_ABA_Sub_P Parameter: Plant Line Value: WS
  misc_feature: MA Experiment 20000349 PARAMETER Experiment Name: At_100uM_ABA_Sub_P Parameter: Timepoint (hr) Value: 6
  misc_feature: MA Experiment 20000349 PARAMETER Experiment Name: At_100uM_ABA_Sub_P Parameter: Tissue Value: Aerial
  misc_feature: MA Experiment 20000349 PARAMETER Experiment Name: At_100uM_ABA_Sub_P Parameter: Treatment Value: 100uM ABA vs. No Treatment
atggaaaattcgatgaagaagaagaagagcttcaaagaaagtgaagatgaagaactaagaagagggccttggactttggaggaagacacacttctcacaaattacatcctccataacggtgagggtcgttggaatcacgtcgccaaatgtgctgggctaaagagaactgggaaaagttgtagattgagatggttgaattacttgaaacccgacataagacgagggaatcttactcctcaagaacagcttttgatccttgagcttcactctaaatggggtaataggtggtccaagattgcacagtacttgccaggaagaacggataacgagatcaagaactattggagaacaagagttcaaaaacaagctcgtcaactcaacatcgaatctaacagcgacaagttctttgacgctgttcgtagtttttgggtccctagattgatcgagaagatggaacaaaactcatccactactactacttattgttgtccccaaaacaacaacaacaactctcttcttcttccttctcaatctcacgactctttaagtatgcaaaaagatatagattactcgggtttcagcaacatagacggttcttcttcaacttctacttgcatgtctcatctaacaacagttccacactttatggatcaaagcaacaccaatatcatcgatggctcgatgtgtttccatgaaggcaatgttcaagaattcggaggatatgttcctggcatggaggattacatggtaaactcggacatctcaatggaatgtcacgtggcggatggttattcagcgtacgaggatgttacacaagatcccatgtggaatgtggatgacatttggcagtttagggagtaattaagtcgtcaagagatgagatggtagagcctaccactacggttctattatatggactaatatacttcttttgcttaactaagcaaaaagtttcgaaccttttacccatattatctcgggttggagactagaacatgttaaatttgtatcttctttgttgcgagtacttactaagtcattggataaatatttataatgatagtttcttgt

SEQ ID NO: 90566 - protein, 286 aa, Arabidopsis thaliana
  peptide (1)..(286): Ceres Seq. ID no. 12724331
  misc_feature (21)..(68): Pfam Name: Myb-like DNA-binding domain Pfam Description: Myb-like DNA-binding domain
  misc_feature (1)..(286): Homolog of NCBI NO: 15221373 NR Description: myb family transcription factor; protein id: [Arabidopsis thaliana] >gi|25294102|pir||H96706 probable
  misc_feature (83)..(286): Homolog of NCBI NO: 11358550 NR Description: myb-related transcription factor MYB62 [imported] Arabidopsis thaliana (fragment) >gi|3941486|gb|AAC83619.1|
  misc_feature (1)..(286): Homolog of NCBI NO: 18395645 NR Description: myb-related transcription factor (cpm7), protein id: At1g25340.1, supported by cDNA: gi_15375294 thaliana] >gi|15375295|gb|AAK25748.2|AF334815_1 putative
  misc_feature (1)..(286): Homolog of NCBI NO: 25294097 NR Description: probable Myb-like protein (Myb26) [imported] -
  misc_feature (6)..(227): Homolog of NCBI NO: 34895506 NR Description: putative myb-related transcription factor [Oryza
  misc_feature (14)..(282): Homolog of NCBI NO: 14249015 NR Description: myb-like transcription factor Myb 5 [Gossypium
  misc_feature (14)..(282): Homolog of NCBI NO: 23476301 NR Description: myb-like transcription factor 5 [Gossypium
  misc_feature (14)..(282): Homolog of NCBI NO: 23476307 NR Description: myb-like transcription factor 5 [Gossypioides
  misc_feature (12)..(282): Homolog of NCBI NO: 23476305 NR Description: myb-like transcription factor 5 [Gossypium
  misc_feature (12)..(282): Homolog of NCBI NO: 14249019 NR Description: recombinant myb-like transcription factor Myb 5
MENSMKKKKSFKESEDEELRRGPWTLEEDTLLTNYILHNGEGRWNHVAKCAGLKRTGKSCRLRWLNYLKPDIRRGNLTPQEQLLILELHSKWGNRWSKIAQYLPGRTDNEIKNYWRTRVQKQARQLNIESNSDKFFDAVRSFWVPRLIEKMEQNSSTTTTYCCPQNNNNNSLLLPSQSHDSLSMQKDIDYSGFSNIDGSSSTSTCMSHLTTVPHFMDQSNTNIIDGSMCFHEGNVQEFGGYVPGMEDYMVNSDISMECHVADGYSAYEDVTQDPMWNVDDIWQFRE

SEQ ID NO: 90567 - protein, 282 aa, Arabidopsis thaliana
  peptide (1)..(282): Ceres Seq. ID no. 12724332
  misc_feature (17)..(64): Pfam Name: Myb-like DNA-binding domain Pfam Description: Myb-like DNA-binding domain
  misc_feature (1)..(282): Homolog of NCBI NO: 15221373 NR Description: myb family transcription factor; protein id: [Arabidopsis thaliana] >gi|25294102|pir||H96706 probable
  misc_feature (79)..(282): Homolog of NCBI NO: 11358550 NR Description: myb-related transcription factor MYB62 [imported] Arabidopsis thaliana (fragment) >gi|3941486|gb|AAC83619.1|
  misc_feature (1)..(282): Homolog of NCBI NO: 18395645 NR Description: myb-related transcription factor (cpm7), protein id: At1g25340.1, supported by cDNA: gi_15375294 thaliana] >gi|15375295|gb|AAK25748.2|AF334815_1 putative
  misc_feature (1)..(282): Homolog of NCBI NO: 25294097 NR Description: probable Myb-like protein (Myb26) [imported] -
  misc_feature (2)..(223): Homolog of NCBI NO: 34895506 NR Description: putative myb-related transcription factor [Oryza
  misc_feature (10)..(278): Homolog of NCBI NO: 14249015 NR Description: myb-like transcription factor Myb 5 [Gossypium
  misc_feature (10)..(278): Homolog of NCBI NO: 23476301 NR Description: myb-like transcription factor 5 [Gossypium
  misc_feature (10)..(278): Homolog of NCBI NO: 23476307 NR Description: myb-like transcription factor 5 [Gossypioides
  misc_feature (8)..(278): Homolog of NCBI NO: 23476305 NR Description: myb-like transcription factor 5 [Gossypium
  misc_feature (8)..(278): Homolog of NCBI NO: 14249019 NR Description: recombinant myb-like transcription factor Myb 5
MKKKKSFKESEDEELRRGPWTLEEDTLLTNYILHNGEGRWNHVAKCAGLKRTGKSCRLRWLNYLKPDIRRGNLTPQEQLLILELHSKWGNRWSKIAQYLPGRTDNEIKNYWRTRVQKQARQLNIESNSDKFFDAVRSFWVPRLIEKMEQNSSTTTTYCCPQNNNNNSLLLPSQSHDSLSMQKDIDYSGFSNIDGSSSTSTCMSHLTTVPHFMDQSNTNIIDGSMCFHEGNVQEFGGYVPGMEDYMVNSDISMECHVADGYSAYEDVTQDPMWNVDDIWQFRE

SEQ ID NO: 90568 - DNA, 1730 bp, Arabidopsis thaliana
  misc_feature (1)..(1730): Ceres Seq. ID no. 12724350
  misc_feature: MA Experiment ID: 20000182 Result: Up-regulated in Transcription
  misc_feature: MA Experiment 20000182 PARAMETER Experiment Name: At_2mM_SA_P Parameter: Age (day) Value: 14
  misc_feature: MA Experiment 20000182 PARAMETER Experiment Name: At_2mM_SA_P Parameter: Organism Value: A. thaliana
  misc_feature: MA Experiment 20000182 PARAMETER Experiment Name: At_2mM_SA_P Parameter: Plant Line Value: WS
  misc_feature: MA Experiment 20000182 PARAMETER Experiment Name: At_2mM_SA_P Parameter: Timepoint (hr) Value: 6
  misc_feature: MA Experiment 20000182 PARAMETER Experiment Name: At_2mM_SA_P Parameter: Tissue Value: Aerial
  misc_feature: MA Experiment 20000182 PARAMETER Experiment Name: At_2mM_SA_P Parameter: Treatment Value: 2mM SA vs. No Treatment
  misc_feature: MA Experiment ID: 20000227 Result: Up-regulated in Transcription
  misc_feature: MA Experiment 20000227 PARAMETER Experiment Name: At_Root-Tips-vs-Tops_P Parameter: Tissue Value: Root Tips vs. Root Tops
  misc_feature: MA Experiment ID: 20000709 Result: Up-regulated in Transcription
  misc_feature: MA Experiment 20000709 PARAMETER Experiment Name: At_15mM_NH4NO3_L-to-H_P Parameter: Age (hr) Value: 14
  misc_feature: MA Experiment 20000709 PARAMETER Experiment Name: At_15mM_NH4NO3_L-to-H_P Parameter: Organism Value: A. thaliana
  misc_feature: MA Experiment 20000709 PARAMETER Experiment Name: At_15mM_NH4NO3_L-to-H_P Parameter: Plant Line Value: WS
  misc_feature: MA Experiment 20000709 PARAMETER Experiment Name: At_15mM_NH4NO3_L-to-H_P Parameter: Timepoint (hr) Value: 4
  misc_feature: MA Experiment 20000709 PARAMETER Experiment Name: At_15mM_NH4NO3_L-to-H_P Parameter: Tissue Value: Aerial
  misc_feature: MA Experiment 20000709 PARAMETER Experiment Name: At_15mM_NH4NO3_L-to-H_P Parameter: Treatment Value: 15mM NH4NO3 vs. 30mM Mannitol
  misc_feature: MA Experiment ID: 20000794 Result: Up-regulated in Transcription
  misc_feature: MA Experiment 20000794 PARAMETER Experiment Name: At_Petals_P Parameter: Age (day) Value: 23-25 days
  misc_feature: MA Experiment 20000794 PARAMETER Experiment Name: At_Petals_P Parameter: Plant Line Value: WS
  misc_feature: MA Experiment 20000794 PARAMETER Experiment Name: At_Petals_P Parameter: Tissue Value: Petals vs. Whole plant
  misc_feature: MA Experiment ID: 20001247 Result: Up-regulated in Transcription
  misc_feature: MA Experiment 20001247 PARAMETER Experiment Name: At_Far-red-induction_P Parameter: Age (day) Value: 7
  misc_feature: MA Experiment 20001247 PARAMETER Experiment Name: At_Far-red-induction_P Parameter: Light Value: Far-red vs. White
  misc_feature: MA Experiment 20001247 PARAMETER Experiment Name: At_Far-red-induction_P Parameter: Organism Value: A. thaliana
  misc_feature: MA Experiment 20001247 PARAMETER Experiment Name: At_Far-red-induction_P Parameter: Plant Line Value: Columbia
  misc_feature: MA Experiment 20001247 PARAMETER Experiment Name: At_Far-red-induction_P Parameter: Timepoint (hr) Value: 1
  misc_feature: MA Experiment 20001247 PARAMETER Experiment Name: At_Far-red-induction_P Parameter: Tissue Value: Whole Plant
  misc_feature: MA Experiment ID: 20001557 Result: Up-regulated in Transcription
  misc_feature: MA Experiment 20001557 PARAMETER Experiment Name: At_Drought_Soil_Dry_P Parameter: Age (day) Value: 27
  misc_feature: MA Experiment 20001557 PARAMETER Experiment Name: At_Drought_Soil_Dry_P Parameter: Organism Value: A. thaliana
  misc_feature: MA Experiment 20001557 PARAMETER Experiment Name: At_Drought_Soil_Dry_P Parameter: Plant Line Value: WS
  misc_feature: MA Experiment 20001557 PARAMETER Experiment Name: At_Drought_Soil_Dry_P Parameter: Post Timepoint (hr) Value: 3
  misc_feature: MA Experiment 20001557 PARAMETER Experiment Name: At_Drought_Soil_Dry_P Parameter: Post-Treatment Value: Re-Water vs. No Drought
  misc_feature: MA Experiment 20001557 PARAMETER Experiment Name: At_Drought_Soil_Dry_P Parameter: Timepoint (day) Value: 13
  misc_feature: MA Experiment 20001557 PARAMETER Experiment Name: At_Drought_Soil_Dry_P Parameter: Treatment Value: Drought vs. No Drought
  misc_feature: MA Experiment ID: 20001558 Result: Up-regulated in Transcription
  misc_feature: MA Experiment 20001558 PARAMETER Experiment Name: At_Drought_Soil_Dry_P Parameter: Age (day) Value: 27
  misc_feature: MA Experiment 20001558 PARAMETER Experiment Name: At_Drought_Soil_Dry_P Parameter: Organism Value: A. thaliana
  misc_feature: MA Experiment 20001558 PARAMETER Experiment Name: At_Drought_Soil_Dry_P Parameter: Plant Line Value: WS
  misc_feature: MA Experiment 20001558 PARAMETER Experiment Name: At_Drought_Soil_Dry_P Parameter: Post Timepoint (hr) Value: 6
  misc_feature: MA Experiment 20001558 PARAMETER Experiment Name: At_Drought_Soil_Dry_P Parameter: Post-Treatment Value: Re-Water vs. No Drought
  misc_feature: MA Experiment 20001558 PARAMETER Experiment Name: At_Drought_Soil_Dry_P Parameter: Timepoint (day) Value: 13
  misc_feature: MA Experiment 20001558 PARAMETER Experiment Name: At_Drought_Soil_Dry_P Parameter: Treatment Value: Drought vs. No Drought
gttgcaatctttttccctggattcttgtttgcaacctacctataattctggtcagatctgcatttgttgttgtcgaaaccaaaacggtcgaagaagaagaagaagaacatcagagtactaagtaaagtttgttgtatcttggctacgaattcatgacttcttggctcagaaagattgtgttataagatttgagagtgtgaagggtctttcaagaagttgttacaatggcgtctagagaaggaaagagacgtaatcataatcatgatgatgagaagcttgtgcctcttgctgctttgataagtagagagacgaaagctgctaaaatggagaaaccgattgtgagatttggacaagctgctcaatctaggaaaggagaagattatgtcttgatcaagactgatagtcttcgtgttccttccaattcttcaactgctttctctgtttttgcggtatttgatgggcataatggaaaagcggcagcggtttatacaagggagaatctgttgaaccatgttattagtgctcttcctagtgggcttagccgtgacgagtggcttcacgctttacctcgtgcattagtttctggatttgtgaagactgataaggagtttcagagcagaggggaaacttctggaacaacagcaacgtttgtgatagtagatggatggactgtgaccgttgcatgtgttggcgactcgcgctgcatcttggatactaagggtggttcagtttctaaccttactgttgatcacaggcttgaagataatacagaagagagggaacgcgttactgcgagtggtggagaagttggcaggctaagcattgttggaggcgttgagattggtccactacggtgttggcctggaggtctctgcctttcaaggtctattggggatatggatgttggggagttcattgttccagttccctttgtaaagcaagtgaagctatcaaaccttggaggaaggcttatcattgcatcagatggcatatgggatgctctctcctcagaagtcgcagctaaaacttgccgtgggttatctgctgaacttgctgctagacaagtagttaaggaagcattgagaagaaggggacttaaggatgacacaacttgcattgtggtcgacataatcccacccgaaaacttccaagaaccaccgccttcacctcctaagaagcacaacaacttctttaaatcattactcttcagaaagaaatcaaactcatctaacaaactctccaagaaactttccactgttggtattgttgaagagctcttcgaagaaggttcggcaatgctcgctgaaaggttaggatcaggtgactgttctaaggaatcaacaacaggaggagggatattcacgtgtgccatatgccaactagacctagctccaagcgagggaatatcagtccacgcaggttcaatcttctcgacaagtctaaaaccgtggcaaggaccgttcttatgcacagattgtcgtgacaaaaaagacgcgatggaagggaaacgtccaagtggagttaaagtcatctagattgaaagatggtaatctgcatcatctctcacttacacacacacattctctattcgttcattataattctttcttctttcgttctttgttgttacattacatctacgcatccattggaataaaatttgagtagtagacctgattctttatggatctgagaatcgggttcgatatagagtgagtttgattgattgg

SEQ ID NO: 90569 - protein, 436 aa, Arabidopsis thaliana
  peptide (1)..(436): Ceres Seq. ID no. 12724351
  misc_feature (51)..(294): Pfam Name: Protein phosphatase 2C Pfam Description: Protein phosphatase 2C
  misc_feature (1)..(436): Homolog of NCBI NO: 15221404 NR Description: putative protein phosphatase; protein id: supported by cDNA: gi_15292894, supported by cDNA: gi_20259036
  misc_feature (33)..(436): Homolog of NCBI NO: 34914644 NR Description: OSJNBa0054L14.21 [Oryza sativa (japonica
  misc_feature (18)..(431): Homolog of NCBI NO: 15217454 NR Description: putative protein phosphatase 2C; protein id: supported by cDNA: gi_16930414 [Arabidopsis thaliana]
  misc_feature (19)..(431): Homolog of NCBI NO: 34394411 NR Description: protein phosphatase 2C-like [Oryza sativa
  misc_feature (19)..(432): Homolog of NCBI NO: 18401703 NR Description: expressed protein; protein id: At1g47380.1
  misc_feature (19)..(432): Homolog of NCBI NO: 15292869 NR Description: unknown protein [Arabidopsis thaliana]
  misc_feature (18)..(360): Homolog of NCBI NO: 16930415 NR Description: At1g09160/T12M4_13 [Arabidopsis thaliana]
  misc_feature (19)..(362): Homolog of NCBI NO: 34898168 NR Description: protein phosphatase 2C-like [Oryza sativa
  misc_feature (19)..(429): Homolog of NCBI NO: 14029015 NR Description: Unknown protein [Oryza sativa]
  misc_feature (36)..(431): Homolog of NCBI NO: 38344839 NR Description: OSJNBa0064H22.20 [Oryza sativa (japonica
MASREGKRRNHNHDDEKLVPLAALISRETKAAKMEKPIVRFGQAAQSRKGEDYVLIKTDSLRVPSNSSTAFSVFAVFDGHNGKAAAVYTRENLLNHVISALPSGLSRDEWLHALPRALVSGFVKTDKEFQSRGETSGTTATFVIVDGWTVTVACVGDSRCILDTKGGSVSNLTVDHRLEDNTEERERVTASGGEVGRLSIVGGVEIGPLRCWPGGLCLSRSIGDMDVGEFIVPVPFVKQVKLSNLGGRLIIASDGIWDALSSEVAAKTCRGLSAELAARQVVKEALRRRGLKDDTTCIVVDIIPPENFQEPPPSPPKKHNNFFKSLLFRKKSNSSNKLSKKLSTVGIVEELFEEGSAMLAERLGSGDCSKESTTGGGIFTCAICQLDLAPSEGISVHAGSIFSTSLKPWQGPFLCTDCRDKKDAMEGKRPSGVKVI

SEQ ID NO: 90570 - protein, 403 aa, Arabidopsis thaliana
  peptide (1)..(403): Ceres Seq. ID no. 12724352
  misc_feature (18)..(261): Pfam Name: Protein phosphatase 2C Pfam Description: Protein phosphatase 2C
  misc_feature (1)..(403): Homolog of NCBI NO: 15221404 NR Description: putative protein phosphatase; protein id: supported by cDNA: gi_15292894, supported by cDNA: gi_20259036
  misc_feature (1)..(403): Homolog of NCBI NO: 34914644 NR Description: OSJNBa0054L14.21 [Oryza sativa (japonica
  misc_feature (1)..(398): Homolog of NCBI NO: 15217454 NR Description: putative protein phosphatase 2C; protein id: supported by cDNA: gi_16930414 [Arabidopsis thaliana]
  misc_feature (1)..(398): Homolog of NCBI NO: 34394411 NR Description: protein phosphatase 2C-like [Oryza sativa
  misc_feature (1)..(399): Homolog of NCBI NO: 18401703 NR Description: expressed protein; protein id: At1g47380.1
  misc_feature (1)..(399): Homolog of NCBI NO: 15292869 NR Description: unknown protein [Arabidopsis thaliana]
  misc_feature (1)..(327): Homolog of NCBI NO: 16930415 NR Description: At1g09160/T12M4_13 [Arabidopsis thaliana]
  misc_feature (1)..(329): Homolog of NCBI NO: 34898168 NR Description: protein phosphatase 2C-like [Oryza sativa
  misc_feature (1)..(396): Homolog of NCBI NO: 14029015 NR Description: Unknown protein [Oryza sativa]
  misc_feature (3)..(398): Homolog of NCBI NO: 38344839 NR Description: OSJNBa0064H22.20 [Oryza sativa (japonica
MEKPIVRFGQAAQSRKGEDYVLIKTDSLRVPSNSSTAFSVFAVFDGHNGKAAAVYTRENLLNHVISALPSGLSRDEWLHALPRALVSGFVKTDKEFQSRGETSGTTATFVIVDGWTVTVACVGDSRCILDTKGGSVSNLTVDHRLEDNTEERERVTASGGEVGRLSIVGGVEIGPLRCWPGGLCLSRSIGDMDVGEFIVPVPFVKQVKLSNLGGRLIIASDGIWDALSSEVAAKTCRGLSAELAARQVVKEALRRRGLKDDTTCIVVDIIPPENFQEPPPSPPKKHNNFFKSLLFRKKSNSSNKLSKKLSTVGIVEELFEEGSAMLAERLGSGDCSKESTTGGGIFTCAICQLDLAPSEGISVHAGSIFSTSLKPWQGPFLCTDCRDKKDAMEGKRPSGVKVI

SEQ ID NO: 90571 - DNA, 983 bp, Arabidopsis thaliana
  misc_feature (1)..(983): Ceres Seq. ID no. 12724364
  misc_feature: MA Experiment ID: 20000179 Result: Up-regulated in Transcription
  misc_feature: MA Experiment 20000179 PARAMETER Experiment Name: At_Germinating_Seeds_P Parameter: Age (hr) Value: 6 vs. 0
  misc_feature: MA Experiment 20000179 PARAMETER Experiment Name: At_Germinating_Seeds_P Parameter: Tissue Value: Germinating Seeds
  misc_feature: MA Experiment ID: 20000180 Result: Down-regulated in Transcription
  misc_feature: MA Experiment 20000180 PARAMETER Experiment Name: At_Germinating_Seeds_P Parameter: Age (hr) Value: 24 vs. 0
  misc_feature: MA Experiment 20000180 PARAMETER Experiment Name: At_Germinating_Seeds_P Parameter: Tissue Value: Germinating Seeds
  misc_feature: MA Experiment ID: 20001906 Result: Up-regulated in Transcription
  misc_feature: MA Experiment 20001906 PARAMETER Experiment Name: At_Drought_Reproduction_P Parameter: Age (day) Value: 35
  misc_feature: MA Experiment 20001906 PARAMETER Experiment Name: At_Drought_Reproduction_P Parameter: Organism Value: A. thaliana
  misc_feature: MA Experiment 20001906 PARAMETER Experiment Name: At_Drought_Reproduction_P Parameter: Plant Line Value: WS
  misc_feature: MA Experiment 20001906 PARAMETER Experiment Name: At_Drought_Reproduction_P Parameter: Timepoint (day) Value: 5
  misc_feature: MA Experiment 20001906 PARAMETER Experiment Name: At_Drought_Reproduction_P Parameter: Tissue Value: Siliques
  misc_feature: MA Experiment 20001906 PARAMETER Experiment Name: At_Drought_Reproduction_P Parameter: Treatment Value: Drought vs. No Drought
  misc_feature: MA Experiment ID: 20001908 Result: Up-regulated in Transcription
  misc_feature: MA Experiment 20001908 PARAMETER Experiment Name: At_Drought_Reproduction_P Parameter: Age (day) Value: 40
  misc_feature: MA Experiment 20001908 PARAMETER Experiment Name: At_Drought_Reproduction_P Parameter: Organism Value: A. thaliana
  misc_feature: MA Experiment 20001908 PARAMETER Experiment Name: At_Drought_Reproduction_P Parameter: Plant Line Value: WS
  misc_feature: MA Experiment 20001908 PARAMETER Experiment Name: At_Drought_Reproduction_P Parameter: Timepoint (day) Value: 10
  misc_feature: MA Experiment 20001908 PARAMETER Experiment Name: At_Drought_Reproduction_P Parameter: Tissue Value: Siliques
  misc_feature: MA Experiment 20001908 PARAMETER Experiment Name: At_Drought_Reproduction_P Parameter: Treatment Value: Drought vs. No Drought
caaaagttgaaaaataccagctcattcacttatgactcatgagtaacttcttccttataaattcaaattgttcacaacttccttgagttccatttccgaacacaaacacacatcatacgtatatttgtcactaataaacatataaaggaatatgagaatcagctgcaacgggtgtagggttctacgcaaaggttgcaaccaagattgcaccattcgaccatgccttcaatggatcaaatccgcagactctcaagccaatgctacactcttccttgctaagttctacggtcgagccggtcttcttaacctcatcgaatccggtcctgatcaccttcgtcccgcaatatttaggtcacttctgtacgaggcttgtggtcggatcgtgaaccctgtagatggttcggttggtttgatgtggtcagggaactgggctcagtgccaagcagctgttgacgccgtgctcaacggcttacccataactcacacacctcttccaagtgcatccgcgtcgcaccagatcattcctccccacaggacttacgatatacgccacgtggctaaagatccaacaaccggcggcgacagttcggagaatctggccacacgtgtaaacgctaacaagagcaagacgcaaactggccgattcaaacgtgaatccgtgaaccaactaggtgaatgtagtcatgacatgtggcaactcccaagttctagtgctacgcatggttatggccacttcacgttggagaatgtggagagccgaagggaagctccatttaatcaaagttctccaaatcttgggtttgatgatcaagtcgatatcaacgaggttggcttagagctcagacttggttagaaccagaagattgcattattattatcataattctgtctttttaattaataatttcactttctatataaaaggagaaaaaaaaactaaagcaaatcaaatttagtattattgtcaatcattaggttatcat

SEQ ID NO: 90572 - protein, 233 aa, Arabidopsis thaliana
  peptide (1)..(233): Ceres Seq. ID no. 12724365
  misc_feature (4)..(109): Pfam Name: Protein of unknown function DUF260 Pfam Description: Protein of unknown function DUF260
  misc_feature (1)..(233): Homolog of NCBI NO: 15221429 NR Description: expressed protein; protein id: At1g68510.1, by cDNA: gi_17227173 [Arabidopsis thaliana] LOB domain protein 42 >gi|25404746|pir||C96709 hypothetical
  misc_feature (1)..(169): Homolog of NCBI NO: 34914608 NR Description: P0520B06.17 [Oryza sativa (japonica
  misc_feature (1)..(179): Homolog of NCBI NO: 21554191 NR Description: unknown [Arabidopsis thaliana]
  misc_feature (1)..(179): Homolog of NCBI NO: 18396229 NR Description: expressed protein; protein id: At3g02550.1, by cDNA: 20907., supported by cDNA: gi_17227171, supported by gi_19699325 [Arabidopsis thaliana]
  misc_feature (1)..(136): Homolog of NCBI NO: 15219829 NR Description: hypothetical protein; protein id: At1g67100.1
  misc_feature (1)..(135): Homolog of NCBI NO: 34895540 NR Description: unnamed protein product [Oryza sativa (japonica group)] >gi|9558469|dbj|BAB03390.1| unnamed protein product
  misc_feature (3)..(115): Homolog of NCBI NO: 15240739 NR Description: putative protein; protein id: At5g67420.1, by cDNA: 40250., supported by cDNA: gi_17227169 [Arabidopsis >gi|27805497|sp|Q9FN11|LB37_ARATH LOB domain protein 37 to
  misc_feature (3)..(115): Homolog of NCBI NO: 21593577 NR Description: unknown [Arabidopsis thaliana]
  misc_feature (3)..(152): Homolog of NCBI NO: 21592894 NR Description: unknown [Arabidopsis thaliana]
  misc_feature (3)..(106): Homolog of NCBI NO: 15235604 NR Description: putative protein; protein id: At4g37540.1, by cDNA: 33704., supported by cDNA: gi_18176002 [Arabidopsis >gi|29428053|sp|Q9SZE8|LB39_ARATH LOB domain protein 39
MRISCNGCRVLRKGCNQDCTIRPCLQWIKSADSQANATLFLAKFYGRAGLLNLIESGPDHLRPAIFRSLLYEACGRIVNPVDGSVGLMWSGNWAQCQAAVDAVLNGLPITHTPLPSASASHQIIPPHRTYDIRHVAKDPTTGGDSSENLATRVNANKSKTQTGRFKRESVNQLGECSHDMWQLPSSSATHGYGHFTLENVESRREAPFNQSSPNLGFDDQVDINEVGLELRLG

SEQ ID NO: 90573 - protein, 146 aa, Arabidopsis thaliana
  peptide (1)..(146): Ceres Seq. ID no. 12724366
  misc_feature (1)..(146): Homolog of NCBI NO: 15221429 NR Description: expressed protein; protein id: At1g68510.1, by cDNA: gi_17227173 [Arabidopsis thaliana] LOB domain protein 42 >gi|25404746|pir||C96709 hypothetical
  misc_feature (1)..(82): Homolog of NCBI NO: 34914608 NR Description: P0520B06.17 [Oryza sativa (japonica
  misc_feature (1)..(92): Homolog of NCBI NO: 21554191 NR Description: unknown [Arabidopsis thaliana]
  misc_feature (1)..(92): Homolog of NCBI NO: 18396229 NR Description: expressed protein; protein id: At3g02550.1, by cDNA: 20907., supported by cDNA: gi_17227171, supported by gi_19699325 [Arabidopsis thaliana]
  misc_feature (1)..(49): Homolog of NCBI NO: 15219829 NR Description: hypothetical protein; protein id: At1g67100.1
  misc_feature (1)..(48): Homolog of NCBI NO: 34895540 NR Description: unnamed protein product [Oryza sativa (japonica group)] >gi|9558469|dbj|BAB03390.1| unnamed protein product
  misc_feature (1)..(28): Homolog of NCBI NO: 15240739 NR Description: putative protein; protein id: At5g67420.1, by cDNA: 40250., supported by cDNA: gi_17227169 [Arabidopsis >gi|27805497|sp|Q9FN11|LB37_ARATH LOB domain protein 37 to
  misc_feature (1)..(28): Homolog of NCBI NO: 21593577 NR Description: unknown [Arabidopsis thaliana]
  misc_feature (1)..(65): Homolog of NCBI NO: 21592894 NR Description: unknown [Arabidopsis thaliana]
  misc_feature (1)..(19): Homolog of NCBI NO: 15235604 NR Description: putative protein; protein id: At4g37540.1, by cDNA: 33704., supported by cDNA: gi_18176002 [Arabidopsis >gi|29428053|sp|Q9SZE8|LB39_ARATH LOB domain protein 39
MWSGNWAQCQAAVDAVLNGLPITHTPLPSASASHQIIPPHRTYDIRHVAKDPTTGGDSSENLATRVNANKSKTQTGRFKRESVNQLGECSHDMWQLPSSSATHGYGHFTLENVESRREAPFNQSSPNLGFDDQVDINEVGLELRLG

SEQ ID NO: 90574 - DNA, 1860 bp, Arabidopsis thaliana
  misc_feature (1)..(1860): Ceres Seq. ID no. 12724367
  misc_feature: MA Experiment ID: 108561 Result: Up-regulated in Transcription
  misc_feature: MA Experiment 108561 PARAMETER Experiment Name: At_100uM_ABA_cDNA_P Parameter: Timepoint (hr) Value: 6
  misc_feature: MA Experiment 108561 PARAMETER Experiment Name: At_100uM_ABA_cDNA_P Parameter: Tissue Value: Aerial
  misc_feature: MA Experiment 108561 PARAMETER Experiment Name: At_100uM_ABA_cDNA_P Parameter: Treatment Value: 100uM ABA vs. No Treatment
  misc_feature: MA Experiment ID: 108572 Result: Up-regulated in Transcription
  misc_feature: MA Experiment 108572 PARAMETER Experiment Name: At_Drought_cDNA_P Parameter: Timepoint (hr) Value: 1
  misc_feature: MA Experiment 108572 PARAMETER Experiment Name: At_Drought_cDNA_P Parameter: Tissue Value: Aerial
  misc_feature: MA Experiment 108572 PARAMETER Experiment Name: At_Drought_cDNA_P Parameter: Treatment Value: Drought vs. No Drought
  misc_feature: MA Experiment ID: 20000169 Result: Up-regulated in Transcription
  misc_feature: MA Experiment 20000169 PARAMETER Experiment Name: At_100uM_ABA_P Parameter: Age (day) Value: 14
  misc_feature: MA Experiment 20000169 PARAMETER Experiment Name: At_100uM_ABA_P Parameter: Organism Value: A. thaliana
  misc_feature: MA Experiment 20000169 PARAMETER Experiment Name: At_100uM_ABA_P Parameter: Plant Line Value: WS
  misc_feature: MA Experiment 20000169 PARAMETER Experiment Name: At_100uM_ABA_P Parameter: Timepoint (hr) Value: 6
  misc_feature: MA Experiment 20000169 PARAMETER Experiment Name: At_100uM_ABA_P Parameter: Tissue Value: Aerial
  misc_feature: MA Experiment 20000169 PARAMETER Experiment Name: At_100uM_ABA_P Parameter: Treatment Value: 100uM ABA vs. No Treatment
  misc_feature: MA Experiment ID: 20000180 Result: Up-regulated in Transcription
  misc_feature: MA Experiment 20000180 PARAMETER Experiment Name: At_Germinating_Seeds_P Parameter: Age (hr) Value: 24 vs. 0
  misc_feature: MA Experiment 20000180 PARAMETER Experiment Name: At_Germinating_Seeds_P Parameter: Tissue Value: Germinating Seeds
  misc_feature: MA Experiment ID: 20000185 Result: Down-regulated in Transcription
  misc_feature: MA Experiment 20000185 PARAMETER Experiment Name: At_Roots__P Parameter: Age (day) Value: 7 vs. 21
  misc_feature: MA Experiment 20000185 PARAMETER Experiment Name: At_Roots__P Parameter: Organism Value: A. thaliana
  misc_feature: MA Experiment 20000185 PARAMETER Experiment Name: At_Roots__P Parameter: Tissue Value: Roots vs. Whole Plant
  misc_feature: MA Experiment ID: 20000439 Result: Down-regulated in Transcription
  misc_feature: MA Experiment 20000439 PARAMETER Experiment Name: At_Roots__P Parameter: Age (day) Value: 14 vs. 21
  misc_feature: MA Experiment 20000439 PARAMETER Experiment Name: At_Roots__P Parameter: Organism Value: A. thaliana
  misc_feature: MA Experiment 20000439 PARAMETER Experiment Name: At_Roots__P Parameter: Tissue Value: Roots vs. Whole Plant
  misc_feature: MA Experiment ID: 20000794 Result: Up-regulated in Transcription
  misc_feature: MA Experiment 20000794 PARAMETER Experiment Name: At_Petals_P Parameter: Age (day) Value: 23-25 days
  misc_feature: MA Experiment 20000794 PARAMETER Experiment Name: At_Petals_P Parameter: Plant Line Value: WS
  misc_feature: MA Experiment 20000794 PARAMETER Experiment Name: At_Petals_P Parameter: Tissue Value: Petals vs. Whole plant
  misc_feature: MA Experiment ID: 20001554 Result: Up-regulated in Transcription
  misc_feature: MA Experiment 20001554 PARAMETER Experiment Name: At_Drought_Soil_Dry_P Parameter: Age (day) Value: 21
  misc_feature: MA Experiment 20001554 PARAMETER Experiment Name: At_Drought_Soil_Dry_P Parameter: Organism Value: A. thaliana
  misc_feature: MA Experiment 20001554 PARAMETER Experiment Name: At_Drought_Soil_Dry_P Parameter: Plant Line Value: WS
  misc_feature: MA Experiment 20001554 PARAMETER Experiment Name: At_Drought_Soil_Dry_P Parameter: Post Timepoint (hr) Value: None
  misc_feature: MA Experiment 20001554 PARAMETER Experiment Name: At_Drought_Soil_Dry_P Parameter: Post-Treatment Value: None
  misc_feature: MA Experiment 20001554 PARAMETER Experiment Name: At_Drought_Soil_Dry_P Parameter: Timepoint (day) Value: 7
  misc_feature: MA Experiment 20001554 PARAMETER Experiment Name: At_Drought_Soil_Dry_P Parameter: Treatment Value: Drought vs. No Drought
attaactcatcttcaaaaataccctaatcacattttgtaacaataatacaattatacattaaaactctccgacgatgcctcaggcaccgatgccagagttctctagctcggtgaagctcaagtacgtgaaacttggttaccaatatttggttaaccatttcttgagttttcttttgatcccgatcatggctattgtcgccgttgagcttcttcggatgggtcctgaagagatccttaatgtttggaattcactccagtttgacctagttcaggttctatgttcttccttctttgtcatcttcatctccactgtttacttcatgtccaagccacgcaccatctacctcgttgactattcttgttacaagccacctgtcacgtgtcgtgtccccttcgcaactttcatggaacactctcgtttgatcctcaaggacaagcctaagagcgtcgagttccaaatgagaatccttgaacgttctggcctcggtgaggagacttgtctccctccggctattcattatattcctcccacaccaaccatggacgcggctagaagcgaggctcagatggttatcttcgaggccatggacgatcttttcaagaaaaccggtcttaaacctaaagacgtcgacatccttatcgtcaactgctctcttttctctcccacaccatcgctctcagctatggtcatcaacaaatataagcttaggagtaatatcaagagcttcaatctttcggggatgggctgcagcgcgggcctgatctcagttgatctagcccgcgacttgctccaagttcatcccaattcaaatgcaatcatcgtcagcacggagatcataacgcctaattactatcaaggcaacgagagagccatgttgttacccaattgtctcttccgcatgggtgcggcagccatacacatgtcaaaccgccggtctgaccggtggcgagccaaatacaagctttcccacctcgtccggacacaccgtggcgctgacgacaagtctttctactgtgtctacgaacaggaagacaaagaaggacacgttggcatcaacttgtccaaagatctcatggccatcgccggtgaagccctcaaggcaaacatcaccacaataggtcctttggtcctaccggcgtcagaacaacttctcttcctcacgtccctaatcggacgtaaaatcttcaacccgaaatggaaaccatacataccggatttcaagctggccttcgaacacttttgcattcacgcaggaggcagagcggtgatcgacgagctccaaaagaatctacaactatcaggagaacacgttgaggcctcaagaatgacactacatcgttttggtaacacgtcatcttcatcgttatggtacgagcttagctacatcgagtctaaagggagaatgaggagaggcgatcgcgtttggcaaatcgcgtttgggagtggtttcaagtgtaactctgccgtgtggaaatgtaaccgtacgattaagacacctaaggacggaccatggtccgattgtatcgaccgttaccctgtctttattcccgaagttgtcaaactctaaactgaaaacgtctttgaacggtttagtaacggtttgattttgtgttacggtttaggtttatttggtctcgggatttggtttaaaggggattgagaaatgggaagttagagagaagaaaaagcaaagcataaatgtttgtatttaattgctctgcatatacttaaatctctgcttttcatttggggtattttttagtttctcgtgctgtaattaataacttgtggtgtactcaaataagaatatttctctctgttttattatttttaaattggagaataaacttctttgtttt

SEQ ID NO: 90575 - protein, 497 aa, Arabidopsis thaliana; identical to SEQ ID NO: 23374
  peptide (1)..(497): Ceres Seq. ID no. 12724368
  misc_feature (330)..(470): Pfam Name: Chalcone and stilbene synthases, C-terminal domain Pfam Description: Chalcone and stilbene synthases, C-terminal
  misc_feature (1)..(497): Homolog of NCBI NO: 15221431 NR Description: very-long-chain fatty acid condensing enzyme protein id: At1g68530.1, supported by cDNA: 36276. [Arabidopsis
  misc_feature (1)..(497): Homolog of NCBI NO: 17979464 NR Description: At1g68530/T26J14_10 [Arabidopsis thaliana]
  misc_feature (6)..(497): Homolog of NCBI NO: 21593111 NR Description: very-long-chain fatty acid condensing enzyme CUT1
  misc_feature (6)..(497): Homolog of NCBI NO: 15222592 NR Description: fatty acid condensing enzyme CUT1, putative; id: At1g25450.1, supported by cDNA: 99793. [Arabidopsis thaliana]
  misc_feature (6)..(497): Homolog of NCBI NO: 21618184 NR Description: fatty acid condensing enzyme CUT1, putative
  misc_feature (6)..(497): Homolog of NCBI NO: 28393607 NR Description: putative fatty acid condensing enzyme CUT1
  misc_feature (6)..(489): Homolog of NCBI NO: 15226724 NR Description: putative beta-ketoacyl-CoA synthase; protein id:
  misc_feature (6)..(489): Homolog of NCBI NO: 15223556 NR Description: very-long-chain fatty acid condensing enzyme putative; protein id: At1g19440.1, supported by cDNA: 158882.
  misc_feature (6)..(492): Homolog of NCBI NO: 29417540 NR Description: beta-ketoacyl-CoA-synthase [Marchantia polymorpha]
  misc_feature (8)..(497): Homolog of NCBI NO: 9714501 NR Description: putative fatty acid elongase [Zea mays]

SEQ ID NO: 90576 - protein, 492 aa, Arabidopsis thaliana; identical to SEQ ID NO: 23375
  peptide (1)..(492): Ceres Seq. ID no. 12724369
  misc_feature (325)..(465): Pfam Name: Chalcone and stilbene synthases, C-terminal domain Pfam Description: Chalcone and stilbene synthases, C-terminal
  misc_feature (1)..(492): Homolog of NCBI NO: 15221431 NR Description: very-long-chain fatty acid condensing enzyme protein id: At1g68530.1, supported by cDNA: 36276. [Arabidopsis
  misc_feature (1)..(492): Homolog of NCBI NO: 17979464 NR Description: At1g68530/T26J14_10 [Arabidopsis thaliana]
  misc_feature (1)..(492): Homolog of NCBI NO: 21593111 NR Description: very-long-chain fatty acid condensing enzyme CUT1
  misc_feature (1)..(492): Homolog of NCBI NO: 15222592 NR Description: fatty acid condensing enzyme CUT1, putative; id: At1g25450.1, supported by cDNA: 99793. [Arabidopsis thaliana]
  misc_feature (1)..(492): Homolog of NCBI NO: 21618184 NR Description: fatty acid condensing enzyme CUT1, putative
  misc_feature (1)..(492): Homolog of NCBI NO: 28393607 NR Description: putative fatty acid condensing enzyme CUT1
  misc_feature (1)..(484): Homolog of NCBI NO: 15226724 NR Description: putative beta-ketoacyl-CoA synthase; protein id:
  misc_feature (1)..(484): Homolog of NCBI NO: 15223556 NR Description: very-long-chain fatty acid condensing enzyme putative; protein id: At1g19440.1, supported by cDNA: 158882.
  misc_feature (1)..(487): Homolog of NCBI NO: 29417540 NR Description: beta-ketoacyl-CoA-synthase [Marchantia polymorpha]
  misc_feature (3)..(492): Homolog of NCBI NO: 9714501 NR Description: putative fatty acid elongase [Zea mays]

SEQ ID NO: 90577 - protein, 460 aa, Arabidopsis thaliana; identical to SEQ ID NO: 23376
  peptide (1)..(460): Ceres Seq. ID no. 12724370
  misc_feature (293)..(433): Pfam Name: Chalcone and stilbene synthases, C-terminal domain Pfam Description: Chalcone and stilbene synthases, C-terminal
  misc_feature (1)..(460): Homolog of NCBI NO: 15221431 NR Description: very-long-chain fatty acid condensing enzyme protein id: At1g68530.1, supported by cDNA: 36276. [Arabidopsis
  misc_feature (1)..(460): Homolog of NCBI NO: 17979464 NR Description: At1g68530/T26J14_10 [Arabidopsis thaliana]
  misc_feature (1)..(460): Homolog of NCBI NO: 21593111 NR Description: very-long-chain fatty acid condensing enzyme CUT1
  misc_feature (1)..(460): Homolog of NCBI NO: 15222592 NR Description: fatty acid condensing enzyme CUT1, putative; id: At1g25450.1, supported by cDNA: 99793. [Arabidopsis thaliana]
  misc_feature (1)..(460): Homolog of NCBI NO: 21618184 NR Description: fatty acid condensing enzyme CUT1, putative
  misc_feature (1)..(460): Homolog of NCBI NO: 28393607 NR Description: putative fatty acid condensing enzyme CUT1
  misc_feature (1)..(452): Homolog of NCBI NO: 15226724 NR Description: putative beta-ketoacyl-CoA synthase; protein id:
  misc_feature (1)..(452): Homolog of NCBI NO: 15223556 NR Description: very-long-chain fatty acid condensing enzyme putative; protein id: At1g19440.1, supported by cDNA: 158882.
  misc_feature (1)..(455): Homolog of NCBI NO: 29417540 NR Description: beta-ketoacyl-CoA-synthase [Marchantia polymorpha]
  misc_feature (1)..(460): Homolog of NCBI NO: 9714501 NR Description: putative fatty acid elongase [Zea mays]

SEQ ID NO: 90578 - DNA, 3048 bp, Arabidopsis thaliana
  misc_feature (1)..(3048): Ceres Seq. ID no. 12724375
  misc_feature: MA Experiment ID: 20000437 Result: Up-regulated in Transcription
  misc_feature: MA Experiment 20000437 PARAMETER Experiment Name: At_Drought_P Parameter: Age (day) Value: 8
  misc_feature: MA Experiment 20000437 PARAMETER Experiment Name: At_Drought_P Parameter: Organism Value: A. thaliana
  misc_feature: MA Experiment 20000437 PARAMETER Experiment Name: At_Drought_P Parameter: Plant Line Value: WS
  misc_feature: MA Experiment 20000437 PARAMETER Experiment Name: At_Drought_P Parameter: Timepoint (hr) Value: 24
  misc_feature: MA Experiment 20000437 PARAMETER Experiment Name: At_Drought_P Parameter: Tissue Value: Whole Plant
  misc_feature: MA Experiment 20000437 PARAMETER Experiment Name: At_Drought_P Parameter: Treatment Value: Drought vs. No Drought
  misc_feature: MA Experiment ID: 20000438 Result: Down-regulated in Transcription
  misc_feature: MA Experiment 20000438 PARAMETER Experiment Name: At_Shoots__P Parameter: Age (day) Value: 14
  misc_feature: MA Experiment 20000438 PARAMETER Experiment Name: At_Shoots__P Parameter: Tissue Value: Shoots vs. Whole Plant
  misc_feature: MA Experiment ID: 20000709 Result: Up-regulated in Transcription
  misc_feature: MA Experiment 20000709 PARAMETER Experiment Name: At_15mM_NH4NO3_L-to-H_P Parameter: Age (hr) Value: 14
  misc_feature: MA Experiment 20000709 PARAMETER Experiment Name: At_15mM_NH4NO3_L-to-H_P Parameter: Organism Value: A. thaliana
  misc_feature: MA Experiment 20000709 PARAMETER Experiment Name: At_15mM_NH4NO3_L-to-H_P Parameter: Plant Line Value: WS
  misc_feature: MA Experiment 20000709 PARAMETER Experiment Name: At_15mM_NH4NO3_L-to-H_P Parameter: Timepoint (hr) Value: 4
  misc_feature: MA Experiment 20000709 PARAMETER Experiment Name: At_15mM_NH4NO3_L-to-H_P Parameter: Tissue Value: Aerial
  misc_feature: MA Experiment 20000709 PARAMETER Experiment Name: At_15mM_NH4NO3_L-to-H_P Parameter: Treatment Value: 15mM NH4NO3 vs. 30mM Mannitol
  misc_feature: MA Experiment ID: 20000794 Result: Up-regulated in Transcription
  misc_feature: MA Experiment 20000794 PARAMETER Experiment Name: At_Petals_P Parameter: Age (day) Value: 23-25 days
  misc_feature: MA Experiment 20000794 PARAMETER Experiment Name: At_Petals_P Parameter: Plant Line Value: WS
  misc_feature: MA Experiment 20000794 PARAMETER Experiment Name: At_Petals_P Parameter: Tissue Value: Petals vs. Whole plant
  misc_feature: MA Experiment ID: 20001905 Result: Up-regulated in Transcription
  misc_feature: MA Experiment 20001905 PARAMETER Experiment Name: At_Drought_Reproduction_P Parameter: Age (day) Value: 40
  misc_feature: MA Experiment 20001905 PARAMETER Experiment Name: At_Drought_Reproduction_P Parameter: Organism Value: A. thaliana
  misc_feature: MA Experiment 20001905 PARAMETER Experiment Name: At_Drought_Reproduction_P Parameter: Plant Line Value: WS
  misc_feature: MA Experiment 20001905 PARAMETER Experiment Name: At_Drought_Reproduction_P Parameter: Timepoint (day) Value: 10
  misc_feature: MA Experiment 20001905 PARAMETER Experiment Name: At_Drought_Reproduction_P Parameter: Tissue Value: Rosettes
  misc_feature: MA Experiment 20001905 PARAMETER Experiment Name: At_Drought_Reproduction_P Parameter: Treatment Value: Drought vs. No Drought
aacgtagcattgaagcattttctcagagagtagagaagacgctgcgaaactcagaaaattaaattttcaagctcggaaggaaactctgattcattattacagattcgaagtttcagagaagaagggacaagacaaagtttaactgcttacttgttgtgtttttgctctctggtcttcaattgctgaagttttataacggagatgtttcagttatgatcttacagatctgaggttattgcatatccactcaaattgggtaatctcagtgatctggaattttggtggaagcaaagcaaaatttgtgttttttttgctcggccgatctgggtttgatctattacatcgtcttctctgctttgtcttgaaattagctgtgttgtgatttcgaaagtttgctacttcttcacgtttagtgttcttagttggtaaagtttggtactttcaggatactgtcatactcaaagtctgggacttttaggtgtttttgattgttcatttggtgattgatcatcgtctctgatcgttacttggaggaaagattccaaatttttgaatgagaagttgatttgttgatcggaattgagatggcaacaacaccggttcaacctccggtttcaaattctccaccggtgacttcgccgccgccgccactgaataatgctacttctccggctacaccaccaccagtaacatcgccgctacctccgtcagcacctccaccaaatagagctcctcctcctcctcctccggtgactacctcaccaccaccagttgctaatggagctcctcctcctccactgccaaaaccacctgagagctcttctccgccaccacaaccagtgatcccttcacctcctccttcaacttcgccgccaccacaaccagtaatcccttcacctcctccttcagcatctccaccacctgcattagtcccaccactaccttcttctcctccacctcctgcatctgttcctcctcctcggccatcgccttcaccaccaatcttagtacgttctcctccgccctcagtgcgtccaattcaatctcctcctcctccgccttcagaccgtcccactcaatctcctcctcctccttctcctccttcaccaccttcagagcgtcctactcaatctcctccttcgccaccttcagaacgtcctactcaatctcctccgcctccttctcctccttcaccgccttcagaccgtccctctcaatctcctcctccaccaccagaggatactaaaccccaacctcccaggagaagtccaaattctccaccaccaacattctcttctcctccacgttctcctcctgaaatacttgtcccaggttctaacaatccatctcaaaacaaccctactcttagacctcctcttgatgctccaaattctactaataatagtggaattggtactggtgctgttgttggtatcagtgtagcagtagcacttgtggtcttcactctttttggtatctttgtctggtgcttgaggaaacgagaaaaacgcctttcagctgttagtggtggcgatgttacaccatcaccaatgagctctaccgcaagatcagattcagcattttttaggatgcagtcatctgcacctgttggagcaagcaagcgttcgggcagttatcaatcacaatccggtggcttaggcaattcgaaagcattgttttcctatgaagaacttgtgaaggcaacaaatggtttttcacaagaaaatctattaggtgaaggtggatttggttgtgtatataaagggatattacctgatgggagagtagttgctgtgaaacaactaaagatcggtggaggacaaggtgacagggagtttaaagccgaagttgaaactcttagcagaattcatcaccgccatttggtttcaatcgtgggacattgtatctctggtgaccgtagattgcttatctatgattatgtttctaacaatgacctttacttccaccttcatggagaaaaatctgttctagactgggcaacacgtgttaaaattgcggctggggcagctcgtggactagcttatcttcatgaagattgtcatccgcgtatcattcacagggacatcaagtcgtctaacattcttttagaggacaactttgatgctcgggtttctgactttggccttgcaagattagctcttgattgtaacactcatatcaccacacgggtcatcggaacatttggctatatggctcctgaatatgcatcaagtggaaaattaacagagaaatcagatgtattctcctttggggttgttctgctggagttaatcactggacgtaaaccggtggatacatcgcaaccactgggagatgagagccttgttgaatgggcccggcctttgataagtcatgccatagaaaccgaggaatttgattctttagcagatcctaagcttggaggaaactatgtagaatctgaaatgtttagaatgattgaagcagcaggagcctgcgtgcggcatttagctaccaagagacctcggatgggacaaattgtgagagcttttgaaagtttagctgcggaagaccttactaacggaatgagactaggcgaaagcgaggtctttaactcagctcaacagtcagcagagatcagattgtttagaagaatggcatttggtagccaaaattacagtacagattttttctcgcatagtagttacaatagcagagacgcaaacgtgtaaatatcatacacagattgttctttttcttctctcgccattagtggcacaaaccattaagaaatatcctagttgtgtctcaaaaactcaccatctttcgcgactaaaaccagcacatcaaagctgagccttctcagagtgattgaaacaaaacagaggattacagaggagctagtggttgaacagaaagatgagaaaaagggatatagatgggtacaagagaggcttcgtttcttacatgaaattacttttgtatctattttttctattcttatacgttcaagtttgcacattatgtgacattacttatataataaatcaataaaaatcaatttgtctc

SEQ ID NO: 90579 - protein, 708 aa, Arabidopsis thaliana
  peptide (1)..(708): Ceres Seq. ID no. 12724376
  misc_feature (377)..(575): Pfam Name: Protein kinase domain Pfam Description: Protein kinase domain
  misc_feature (2)..(708): Homolog of NCBI NO: 15222649 NR Description: Pto kinase interactor, putative; protein id: [Arabidopsis thaliana] >gi|25403034|pir||F86387 probable Pto
  misc_feature (33)..(705): Homolog of NCBI NO: 15240947 NR Description: putative protein; protein id: At5g38560.1, by cDNA: gi_15983496, supported by cDNA: gi_18700152 [Arabidopsis >gi|10176824|dbj|BAB10146.1| contains similarity to protein
  misc_feature (320)..(706): Homolog of NCBI NO: 15223161 NR Description: putative protein kinase; protein id: At1g70460.1
  misc_feature (10)..(240): Homolog of NCBI NO: 15223161 NR Description: putative protein kinase; protein id: At1g70460.1
  misc_feature (1)..(228): Homolog of NCBI NO: 15223161 NR Description: putative protein kinase; protein id: At1g70460.1
  misc_feature (30)..(703): Homolog of NCBI NO: 15230108 NR Description: protein kinase, putative; protein id: At3g24400.1
  misc_feature (358)..(692): Homolog of NCBI NO: 13447449 NR Description: receptor protein kinase PERK1 [Brassica napus]
  misc_feature (13)..(139): Homolog of NCBI NO: 13447449 NR Description: receptor protein kinase PERK1 [Brassica napus]
  misc_feature (124)..(216): Homolog of NCBI NO: 13447449 NR Description: receptor protein kinase PERK1 [Brassica napus]
  misc_feature (13)..(694): Homolog of NCBI NO: 15218591 NR Description: protein kinase, putative; protein id: At1g10620.1
MATTPVQPPVSNSPPVTSPPPPLNNATSPATPPPVTSPLPPSAPPPNRAPPPPPPVTTSPPPVANGAPPPPLPKPPESSSPPPQPVIPSPPPSTSPPPQPVIPSPPPSASPPPALVPPLPSSPPPPASVPPPRPSPSPPILVRSPPPSVRPIQSPPPPPSDRPTQSPPPPSPPSPPSERPTQSPPSPPSERPTQSPPPPSPPSPPSDRPSQSPPPPPEDTKPQPPRRSPNSPPPTFSSPPRSPPEILVPGSNNPSQNNPTLRPPLDAPNSTNNSGIGTGAVVGISVAVALVVFTLFGIFVWCLRKREKRLSAVSGGDVTPSPMSSTARSDSAFFRMQSSAPVGASKRSGSYQSQSGGLGNSKALFSYEELVKATNGFSQENLLGEGGFGCVYKGILPDGRVVAVKQLKIGGGQGDREFKAEVETLSRIHHRHLVSIVGHCISGDRRLLIYDYVSNNDLYFHLHGEKSVLDWATRVKIAAGAARGLAYLHEDCHPRIIHRDIKSSNILLEDNFDARVSDFGLARLALDCNTHITTRVIGTFGYMAPEYASSGKLTEKSDVFSFGVVLLELITGRKPVDTSQPLGDESLVEWARPLISHAIETEEFDSLADPKLGGNYVESEMFRMIEAAGACVRHLATKRPRMGQIVRAFESLAAEDLTNGMRLGESEVFNSAQQSAEIRLFRRMAFGSQNYSTDFFSHSSYNSRDANV

SEQ ID NO: 90580 - protein, 386 aa, Arabidopsis thaliana
  peptide (1)..(386): Ceres Seq. ID no. 12724377
  misc_feature (55)..(253): Pfam Name: Protein kinase domain Pfam Description: Protein kinase domain
  misc_feature (1)..(386): Homolog of NCBI NO: 15222649 NR Description: Pto kinase interactor, putative; protein id: [Arabidopsis thaliana] >gi|25403034|pir||F86387 probable Pto
  misc_feature (1)..(383): Homolog of NCBI NO: 15240947 NR Description: putative protein; protein id: At5g38560.1, by cDNA: gi_15983496, supported by cDNA: gi_18700152 [Arabidopsis >gi|10176824|dbj|BAB10146.1| contains similarity to protein
  misc_feature (1)..(384): Homolog of NCBI NO: 15223161 NR Description: putative protein kinase; protein id: At1g70460.1
  misc_feature (1)..(381): Homolog of NCBI NO: 15230108 NR Description: protein kinase, putative; protein id: At3g24400.1
  misc_feature (36)..(370): Homolog of NCBI NO: 13447449 NR Description: receptor protein kinase PERK1 [Brassica napus]
  misc_feature (1)..(372): Homolog of NCBI NO: 15218591 NR Description: protein kinase, putative; protein id: At1g10620.1
  misc_feature (36)..(371): Homolog of NCBI NO: 13877617 NR Description: protein kinase-like protein [Arabidopsis thaliana]
  misc_feature (36)..(371): Homolog of NCBI NO: 15230130 NR Description: protein kinase, putative; protein id: supported by cDNA: 17909., supported by cDNA: gi_13877616,
  misc_feature (1)..(193): Homolog of NCBI NO: 15220786 NR Description: Pto kinase interactor, putative; protein id:
  misc_feature (220)..(385): Homolog of NCBI NO: 15220786 NR Description: Pto kinase interactor, putative; protein id:
MSSTARSDSAFFRMQSSAPVGASKRSGSYQSQSGGLGNSKALFSYEELVKATNGFSQENLLGEGGFGCVYKGILPDGRVVAVKQLKIGGGQGDREFKAEVETLSRIHHRHLVSIVGHCISGDRRLLIYDYVSNNDLYFHLHGEKSVLDWATRVKIAAGAARGLAYLHEDCHPRIIHRDIKSSNILLEDNFDARVSDFGLARLALDCNTHITTRVIGTFGYMAPEYASSGKLTEKSDVFSFGVVLLELITGRKPVDTSQPLGDESLVEWARPLISHAIETEEFDSLADPKLGGNYVESEMFRMIEAAGACVRHLATKRPRMGQIVRAFESLAAEDLTNGMRLGESEVFNSAQQSAEIRLFRRMAFGSQNYSTDFFSHSSYNSRDANV

SEQ ID NO: 90581 - protein, 373 aa, Arabidopsis thaliana
  peptide (1)..(373): Ceres Seq. ID no. 12724378
  misc_feature (42)..(240): Pfam Name: Protein kinase domain Pfam Description: Protein kinase domain
  misc_feature (1)..(373): Homolog of NCBI NO: 15222649 NR Description: Pto kinase interactor, putative; protein id: [Arabidopsis thaliana] >gi|25403034|pir||F86387 probable Pto
  misc_feature (1)..(370): Homolog of NCBI NO: 15240947 NR Description: putative protein; protein id: At5g38560.1, by cDNA: gi_15983496, supported by cDNA: gi_18700152 [Arabidopsis >gi|10176824|dbj|BAB10146.1| contains similarity to protein
  misc_feature (1)..(371): Homolog of NCBI NO: 15223161 NR Description: putative protein kinase; protein id: At1g70460.1
  misc_feature (1)..(368): Homolog of NCBI NO: 15230108 NR Description: protein kinase, putative; protein id: At3g24400.1
  misc_feature (23)..(357): Homolog of NCBI NO: 13447449 NR Description: receptor protein kinase PERK1 [Brassica napus]
  misc_feature (1)..(359): Homolog of NCBI NO: 15218591 NR Description: protein kinase, putative; protein id: At1g10620.1
  misc_feature (23)..(358): Homolog of NCBI NO: 13877617 NR Description: protein kinase-like protein [Arabidopsis thaliana]
  misc_feature (23)..(358): Homolog of NCBI NO: 15230130 NR Description: protein kinase, putative; protein id: supported by cDNA: 17909., supported by cDNA: gi_13877616,
  misc_feature (1)..(180): Homolog of NCBI NO: 15220786 NR Description: Pto kinase interactor, putative; protein id:
  misc_feature (207)..(372): Homolog of NCBI NO: 15220786 NR Description: Pto kinase interactor, putative; protein id:
MQSSAPVGASKRSGSYQSQSGGLGNSKALFSYEELVKATNGFSQENLLGEGGFGCVYKGILPDGRVVAVKQLKIGGGQGDREFKAEVETLSRIHHRHLVSIVGHCISGDRRLLIYDYVSNNDLYFHLHGEKSVLDWATRVKIAAGAARGLAYLHEDCHPRIIHRDIKSSNILLEDNFDARVSDFGLARLALDCNTHITTRVIGTFGYMAPEYASSGKLTEKSDVFSFGVVLLELITGRKPVDTSQPLGDESLVEWARPLISHAIETEEFDSLADPKLGGNYVESEMFRMIEAAGACVRHLATKRPRMGQIVRAFESLAAEDLTNGMRLGESEVFNSAQQSAEIRLFRRMAFGSQNYSTDFFSHSSYNSRDANV

SEQ ID NO: 90582 - DNA, 1709 bp, Arabidopsis thaliana
  misc_feature (1)..(1709): Ceres Seq. ID no. 12724407
  misc_feature: MA Experiment ID: 20000184 Result: Down-regulated in Transcription
  misc_feature: MA Experiment 20000184 PARAMETER Experiment Name: At_Shoots__P Parameter: Age (day) Value: 7
  misc_feature: MA Experiment 20000184 PARAMETER Experiment Name: At_Shoots__P Parameter: Tissue Value: Shoots vs. Whole Plant
  misc_feature: MA Experiment ID: 20000227 Result: Down-regulated in Transcription
  misc_feature: MA Experiment 20000227 PARAMETER Experiment Name: At_Root-Tips-vs-Tops_P Parameter: Tissue Value: Root Tips vs. Root Tops
  misc_feature: MA Experiment ID: 20000437 Result: Up-regulated in Transcription
  misc_feature: MA Experiment 20000437 PARAMETER Experiment Name: At_Drought_P Parameter: Age (day) Value: 8
  misc_feature: MA Experiment 20000437 PARAMETER Experiment Name: At_Drought_P Parameter: Organism Value: A. thaliana
  misc_feature: MA Experiment 20000437 PARAMETER Experiment Name: At_Drought_P Parameter: Plant Line Value: WS
  misc_feature: MA Experiment 20000437 PARAMETER Experiment Name: At_Drought_P Parameter: Timepoint (hr) Value: 24
  misc_feature: MA Experiment 20000437 PARAMETER Experiment Name: At_Drought_P Parameter: Tissue Value: Whole Plant
  misc_feature: MA Experiment 20000437 PARAMETER Experiment Name: At_Drought_P Parameter: Treatment Value: Drought vs. No Drought
  misc_feature: MA Experiment ID: 20001904 Result: Up-regulated in Transcription
  misc_feature: MA Experiment 20001904 PARAMETER Experiment Name: At_Drought_Reproduction_P Parameter: Age (day) Value: 37
  misc_feature: MA Experiment 20001904 PARAMETER Experiment Name: At_Drought_Reproduction_P Parameter: Organism Value: A. thaliana
  misc_feature: MA Experiment 20001904 PARAMETER Experiment Name: At_Drought_Reproduction_P Parameter: Plant Line Value: WS
  misc_feature: MA Experiment 20001904 PARAMETER Experiment Name: At_Drought_Reproduction_P Parameter: Timepoint (day) Value: 7
  misc_feature: MA Experiment 20001904 PARAMETER Experiment Name: At_Drought_Reproduction_P Parameter: Tissue Value: Rosettes
  misc_feature: MA Experiment 20001904 PARAMETER Experiment Name: At_Drought_Reproduction_P Parameter: Treatment Value: Drought vs. No Drought
ctcttgaaattttccgcgaaaaatctcaacttttccatctgaaaaccccccaaaatcaaacaattggatcttgatttttagctgtgatttagtgattaagaggcttagggtttgtggcgaaatgttggtacagagaagagtaatgagttggagaagagtctggaagtcgtttcaagcggcttctgcgcattgtttactcttctccttcacgcttcttctcgctttgaagcttgatcatgttgtttctcattcatggtggtttgtatttgcacccttgtggttgtttcatgctgtgattgctcgtggtagattttcattgcctgctccatcaatgcctcatgatcgacattgggctccttttcactcggttatggcaacaccacttcttgttgcttttgagatccttctctgtgtacatcttgaagataaatatgttgttgacttaaagattgtctttctaccgttgcttgcatttgaggtagcaattttgatagataatgtcagaatgtgcaggacgctcatgcctggagatgaagaaactatgagtgatgaagccatatgggaaacacttcctcatttctgggtttccatatctatggttttcttcattgccgcaacaaccttcactcttcttaaattatgtggtgacgtagctgcgttgggatggtgggacttatttataaacttcggaatagcagagtgctttgcgtttcttgtctgtacaaagtggagcaatcagtcaattcataggtattcacatataccggaacctagctcatcttcaatggtagtaagatatctggattggaacagaggtctagtagtaaccgctgacgacgagcatcagcaaagcaacagaatatgtggtctccaagatattggtggacatgttatgaaaattccatttgtgacctttcaaatcatccttttcatgcgcttagagggaacgccagcttctgccaaaaacattccgattttagttctgtttgtacctctttttctgttacaaggagctggggtactttttgctatgtatagattggttgagaaatcagtcttattaataaatagtggtagtggttcttatggaagatattttaccgcaacatcatcagctcgtgaattcctgggattctttcaacatggtgcaagattacttggctggtggtctatcgatgaaggaagtcgggaagaacaagcaaggctctactctggagaagctactggatacaacaccttctcaccagaggttgtgaagaaaatgccaaagtctgatcttgttgaagagatatggagacttcaagctgcattgagtgagcaaacagatatcaccagttatagccagcaagagtacgaaaggcttcaaaacgagaagattctttgtagagtttgctttgaagatccgatcaacgtggttctactcccatgtagacatcacgtcctctgcagtacatgctgcgagaaatgcaagaaatgtccgatttgtcgtgtcctgatcgaggagcgtatgcctgtatacgatgtgtagatttcagagctccaatccagaaatgaagaatacatttcttgcttgtttggttttgttttagtaatgaagcaagcactatatatatatatgttacaacttgcataggaaaaattctgattcgttttcgagtggatgtaaataatactgtaaaccatcgtatatgtcatgaatcttctttctc

SEQ ID NO: 90583 - protein, 468 aa, Arabidopsis thaliana
  peptide (1)..(468): Ceres Seq. ID no. 12724408
  misc_feature (421)..(455): Pfam Name: Zinc finger, C3HC4 type (RING finger) Pfam Description: Zinc finger, C3HC4 type (RING finger)
  misc_feature (1)..(468): Homolog of NCBI NO: 18409134 NR Description: expressed protein; protein id: At1g68820.1, by cDNA: gi_13878072, supported by cDNA: gi_17104740 [Arabidopsis >gi|13878073|gb|AAK44114.1|AF370299_1 unknown protein
  misc_feature (10)..(468): Homolog of NCBI NO: 22330616 NR Description: unknown protein; protein id: At1g73950.1,
  misc_feature (8)..(468): Homolog of NCBI NO: 18394611 NR Description: expressed protein; protein id: At1g18470.1, by cDNA: 33310. [Arabidopsis thaliana]
  misc_feature (4)..(468): Homolog of NCBI NO: 13937305 NR Description: unknown protein [Oryza sativa]
  misc_feature (222)..(468): Homolog of NCBI NO: 12324138 NR Description: hypothetical protein; 29936-28688 [Arabidopsis
  misc_feature (10)..(233): Homolog of NCBI NO: 25373333 NR Description: unknown protein F2P9.18 [imported] - Arabidopsis
  misc_feature (273)..(344): Homolog of NCBI NO: 25373333 NR Description: unknown protein F2P9.18 [imported] - Arabidopsis
  misc_feature (370)..(416): Homolog of NCBI NO: 25373333 NR Description: unknown protein F2P9.18 [imported] - Arabidopsis
  misc_feature (152)..(468): Homolog of NCBI NO: 6714286 NR Description: F15H18.5 [Arabidopsis thaliana]
  misc_feature (48)..(151): Homolog of NCBI NO: 6714286 NR Description: F15H18.5 [Arabidopsis thaliana]
MLVQRRVMSWRRVWKSFQAASAHCLLFSFTLLLALKLDHVVSHSWWFVFAPLWLFHAVIARGRFSLPAPSMPHDRHWAPFHSVMATPLLVAFEILLCVHLEDKYVVDLKIVFLPLLAFEVAILIDNVRMCRTLMPGDEETMSDEAIWETLPHFWVSISMVFFIAATTFTLLKLCGDVAALGWWDLFINFGIAECFAFLVCTKWSNQSIHRYSHIPEPSSSSMVVRYLDWNRGLVVTADDEHQQSNRICGLQDIGGHVMKIPFVTFQIILFMRLEGTPASAKNIPILVLFVPLFLLQGAGVLFAMYRLVEKSVLLINSGSGSYGRYFTATSSAREFLGFFQHGARLLGWWSIDEGSREEQARLYSGEATGYNTFSPEVVKKMPKSDLVEEIWRLQAALSEQTDITSYSQQEYERLQNEKILCRVCFEDPINVVLLPCRHHVLCSTCCEKCKKCPICRVLIEERMPVYDV

SEQ ID NO: 90584 - protein, 461 aa, Arabidopsis thaliana
  peptide (1)..(461): Ceres Seq. ID no. 12724409
  misc_feature (414)..(448): Pfam Name: Zinc finger, C3HC4 type (RING finger) Pfam Description: Zinc finger, C3HC4 type (RING finger)
  misc_feature (1)..(461): Homolog of NCBI NO: 18409134 NR Description: expressed protein; protein id: At1g68820.1, by cDNA: gi_13878072, supported by cDNA: gi_17104740 [Arabidopsis >gi|13878073|gb|AAK44114.1|AF370299_1 unknown protein
  misc_feature (3)..(461): Homolog of NCBI NO: 22330616 NR Description: unknown protein; protein id: At1g73950.1,
  misc_feature (1)..(461): Homolog of NCBI NO: 18394611 NR Description: expressed protein; protein id: At1g18470.1, by cDNA: 33310. [Arabidopsis thaliana]
  misc_feature (1)..(461): Homolog of NCBI NO: 13937305 NR Description: unknown protein [Oryza sativa]
  misc_feature (215)..(461): Homolog of NCBI NO: 12324138 NR Description: hypothetical protein; 29936-28688 [Arabidopsis
  misc_feature (3)..(226): Homolog of NCBI NO: 25373333 NR Description: unknown protein F2P9.18 [imported] - Arabidopsis
  misc_feature (266)..(337): Homolog of NCBI NO: 25373333 NR Description: unknown protein F2P9.18 [imported] - Arabidopsis
  misc_feature (363)..(409): Homolog of NCBI NO: 25373333 NR Description: unknown protein F2P9.18 [imported] - Arabidopsis
  misc_feature (145)..(461): Homolog of NCBI NO: 6714286 NR Description: F15H18.5 [Arabidopsis thaliana]
  misc_feature (41)..(144): Homolog of NCBI NO: 6714286 NR Description: F15H18.5 [Arabidopsis thaliana]
MSWRRVWKSFQAASAHCLLFSFTLLLALKLDHVVSHSWWFVFAPLWLFHAVIARGRFSLPAPSMPHDRHWAPFHSVMATPLLVAFEILLCVHLEDKYVVDLKIVFLPLLAFEVAILIDNVRMCRTLMPGDEETMSDEAIWETLPHFWVSISMVFFIAATTFTLLKLCGDVAALGWWDLFINFGIAECFAFLVCTKWSNQSIHRYSHIPEPSSSSMVVRYLDWNRGLVVTADDEHQQSNRICGLQDIGGHVMKIPFVTFQIILFMRLEGTPASAKNIPILVLFVPLFLLQGAGVLFAMYRLVEKSVLLINSGSGSYGRYFTATSSAREFLGFFQHGARLLGWWSIDEGSREEQARLYSGEATGYNTFSPEVVKKMPKSDLVEEIWRLQAALSEQTDITSYSQQEYERLQNEKILCRVCFEDPINVVLLPCRHHVLCSTCCEKCKKCPICRVLIEERMPVYDV

SEQ ID NO: 90585 - protein, 398 aa, Arabidopsis thaliana
  peptide (1)..(398): Ceres Seq. ID no. 12724410
  misc_feature (351)..(385): Pfam Name: Zinc finger, C3HC4 type (RING finger) Pfam Description: Zinc finger, C3HC4 type (RING finger)
  misc_feature (1)..(398): Homolog of NCBI NO: 18409134 NR Description: expressed protein; protein id: At1g68820.1, by cDNA: gi_13878072, supported by cDNA: gi_17104740 [Arabidopsis >gi|13878073|gb|AAK44114.1|AF370299_1 unknown protein
  misc_feature (1)..(398): Homolog of NCBI NO: 22330616 NR Description: unknown protein; protein id: At1g73950.1,
  misc_feature (1)..(398): Homolog of NCBI NO: 18394611 NR Description: expressed protein; protein id: At1g18470.1, by cDNA: 33310. [Arabidopsis thaliana]
  misc_feature (1)..(398): Homolog of NCBI NO: 13937305 NR Description: unknown protein [Oryza sativa]
  misc_feature (152)..(398): Homolog of NCBI NO: 12324138 NR Description: hypothetical protein; 29936-28688 [Arabidopsis
  misc_feature (1)..(163): Homolog of NCBI NO: 25373333 NR Description: unknown protein F2P9.18 [imported] - Arabidopsis
  misc_feature (203)..(274): Homolog of NCBI NO: 25373333 NR Description: unknown protein F2P9.18 [imported] - Arabidopsis
  misc_feature (300)..(346): Homolog of NCBI NO: 25373333 NR Description: unknown protein F2P9.18 [imported] - Arabidopsis
  misc_feature (82)..(398): Homolog of NCBI NO: 6714286 NR Description: F15H18.5 [Arabidopsis thaliana]
  misc_feature (1)..(81): Homolog of NCBI NO: 6714286 NR Description: F15H18.5 [Arabidopsis thaliana]
MPHDRHWAPFHSVMATPLLVAFEILLCVHLEDKYVVDLKIVFLPLLAFEVAILIDNVRMCRTLMPGDEETMSDEAIWETLPHFWVSISMVFFIAATTFTLLKLCGDVAALGWWDLFINFGIAECFAFLVCTKWSNQSIHRYSHIPEPSSSSMVVRYLDWNRGLVVTADDEHQQSNRICGLQDIGGHVMKIPFVTFQIILFMRLEGTPASAKNIPILVLFVPLFLLQGAGVLFAMYRLVEKSVLLINSGSGSYGRYFTATSSAREFLGFFQHGARLLGWWSIDEGSREEQARLYSGEATGYNTFSPEVVKKMPKSDLVEEIWRLQAALSEQTDITSYSQQEYERLQNEKILCRVCFEDPINVVLLPCRHHVLCSTCCEKCKKCPICRVLIEERMPVYDV

SEQ ID NO: 90586 - DNA, 1241 bp, Arabidopsis thaliana
  misc_feature (1)..(1241): Ceres Seq. ID no. 12724415
  misc_feature: MA Experiment ID: 20000185 Result: Up-regulated in Transcription
  misc_feature: MA Experiment 20000185 PARAMETER Experiment Name: At_Roots__P Parameter: Age (day) Value: 7 vs. 21
  misc_feature: MA Experiment 20000185 PARAMETER Experiment Name: At_Roots__P Parameter: Organism Value: A. thaliana
  misc_feature: MA Experiment 20000185 PARAMETER Experiment Name: At_Roots__P Parameter: Tissue Value: Roots vs. Whole Plant
  misc_feature: MA Experiment ID: 20000227 Result: Down-regulated in Transcription
  misc_feature: MA Experiment 20000227 PARAMETER Experiment Name: At_Root-Tips-vs-Tops_P Parameter: Tissue Value: Root Tips vs. Root Tops
  misc_feature: MA Experiment ID: 20000234 Result: Up-regulated in Transcription
  misc_feature: MA Experiment 20000234 PARAMETER Experiment Name: At_Siliques_P Parameter: Age (day) Value: 21
  misc_feature: MA Experiment 20000234 PARAMETER Experiment Name: At_Siliques_P Parameter: Organism Value: A. thaliana
  misc_feature: MA Experiment 20000234 PARAMETER Experiment Name: At_Siliques_P Parameter: Plant Line Value: WS
  misc_feature: MA Experiment 20000234 PARAMETER Experiment Name: At_Siliques_P Parameter: Tissue Value: Less Than 5mm Siliques vs. Whole Plant
  misc_feature: MA Experiment ID: 20000265 Result: Down-regulated in Transcription
  misc_feature: MA Experiment 20000265 PARAMETER Experiment Name: At_Open_Flower_P Parameter: Age (day) Value: 21
  misc_feature: MA Experiment 20000265 PARAMETER Experiment Name: At_Open_Flower_P Parameter: Plant Line Value: WS
  misc_feature: MA Experiment 20000265 PARAMETER Experiment Name: At_Open_Flower_P Parameter: Tissue Value: Closed Flower vs. Whole Plant
  misc_feature: MA Experiment ID: 20000267 Result: Up-regulated in Transcription
  misc_feature: MA Experiment 20000267 PARAMETER Experiment Name: At_Drought_P Parameter: Age (day) Value: 7
  misc_feature: MA Experiment 20000267 PARAMETER Experiment Name: At_Drought_P Parameter: Organism Value: A. thaliana
  misc_feature: MA Experiment 20000267 PARAMETER Experiment Name: At_Drought_P Parameter: Plant Line Value: WS
  misc_feature: MA Experiment 20000267 PARAMETER Experiment Name: At_Drought_P Parameter: Timepoint (hr) Value: 6
  misc_feature: MA Experiment 20000267 PARAMETER Experiment Name: At_Drought_P Parameter: Tissue Value: Whole Plant
  misc_feature: MA Experiment 20000267 PARAMETER Experiment Name: At_Drought_P Parameter: Treatment Value: Drought vs. No Drought
  misc_feature: MA Experiment ID: 20000436 Result: Up-regulated in Transcription
  misc_feature: MA Experiment 20000436 PARAMETER Experiment Name: At_Drought_P Parameter: Age (day) Value: 7
  misc_feature: MA Experiment 20000436 PARAMETER Experiment Name: At_Drought_P Parameter: Organism Value: A. thaliana
  misc_feature: MA Experiment 20000436 PARAMETER Experiment Name: At_Drought_P Parameter: Plant Line Value: WS
  misc_feature: MA Experiment 20000436 PARAMETER Experiment Name: At_Drought_P Parameter: Timepoint (hr) Value: 12
  misc_feature: MA Experiment 20000436 PARAMETER Experiment Name: At_Drought_P Parameter: Tissue Value: Whole Plant
  misc_feature: MA Experiment 20000436 PARAMETER Experiment Name: At_Drought_P Parameter: Treatment Value: Drought vs. No Drought
  misc_feature: MA Experiment ID: 20000439 Result: Up-regulated in Transcription
  misc_feature: MA Experiment 20000439 PARAMETER Experiment Name: At_Roots__P Parameter: Age (day) Value: 14 vs. 21
  misc_feature: MA Experiment 20000439 PARAMETER Experiment Name: At_Roots__P Parameter: Organism Value: A. thaliana
  misc_feature: MA Experiment 20000439 PARAMETER Experiment Name: At_Roots__P Parameter: Tissue Value: Roots vs. Whole Plant
  misc_feature: MA Experiment ID: 20000453 Result: Up-regulated in Transcription
  misc_feature: MA Experiment 20000453 PARAMETER Experiment Name: At_100uM_ABA_P Parameter: Age (day) Value: 15
  misc_feature: MA Experiment 20000453 PARAMETER Experiment Name: At_100uM_ABA_P Parameter: Organism Value: A. thaliana
  misc_feature: MA Experiment 20000453 PARAMETER Experiment Name: At_100uM_ABA_P Parameter: Plant Line Value: WS
  misc_feature: MA Experiment 20000453 PARAMETER Experiment Name: At_100uM_ABA_P Parameter: Timepoint (hr) Value: 24
  misc_feature: MA Experiment 20000453 PARAMETER Experiment Name: At_100uM_ABA_P Parameter: Tissue Value: Aerial
  misc_feature: MA Experiment 20000453 PARAMETER Experiment Name: At_100uM_ABA_P Parameter: Treatment Value: 100uM ABA vs. No Treatment
  misc_feature: MA Experiment ID: 20000460 Result: Down-regulated in Transcription
  misc_feature: MA Experiment 20000460 PARAMETER Experiment Name: At_10percent_PEG_P Parameter: Age (day) Value: 12
  misc_feature: MA Experiment 20000460 PARAMETER Experiment Name: At_10percent_PEG_P Parameter: Organism Value: A. thaliana
  misc_feature: MA Experiment 20000460 PARAMETER Experiment Name: At_10percent_PEG_P Parameter: Plant Line Value: WS
  misc_feature: MA Experiment 20000460 PARAMETER Experiment Name: At_10percent_PEG_P Parameter: Timepoint (day) Value: 12
  misc_feature: MA Experiment 20000460 PARAMETER Experiment Name: At_10percent_PEG_P Parameter: Tissue Value: Whole Plant
  misc_feature: MA Experiment 20000460 PARAMETER Experiment Name: At_10percent_PEG_P Parameter: Treatment Value: 10percent PEG vs. No Treatment
  misc_feature: MA Experiment ID: 20000527 Result: Down-regulated in Transcription
  misc_feature: MA Experiment 20000527 PARAMETER Experiment Name: At_10percent_PEG_P Parameter: Age (day) Value: 20
  misc_feature: MA Experiment 20000527 PARAMETER Experiment Name: At_10percent_PEG_P Parameter: Organism Value: A. thaliana
  misc_feature: MA Experiment 20000527 PARAMETER Experiment Name: At_10percent_PEG_P Parameter: Plant Line Value: WS
  misc_feature: MA Experiment 20000527 PARAMETER Experiment Name: At_10percent_PEG_P Parameter: Timepoint (day) Value: 20
  misc_feature: MA Experiment 20000527 PARAMETER Experiment Name: At_10percent_PEG_P Parameter: Tissue Value: Whole Plant
  misc_feature: MA Experiment 20000527 PARAMETER Experiment Name: At_10percent_PEG_P Parameter: Treatment Value: 10percent PEG vs. No Treatment
  misc_feature: MA Experiment ID: 20000573 Result: Down-regulated in Transcription
  misc_feature: MA Experiment 20000573 PARAMETER Experiment Name: At_100uM_ABA_Mutants__P Parameter: Organism Value: A. thaliana
  misc_feature: MA Experiment 20000573 PARAMETER Experiment Name: At_100uM_ABA_Mutants__P Parameter: Plant Line Value: CS22 vs. Ler wt
  misc_feature: MA Experiment 20000573 PARAMETER Experiment Name: At_100uM_ABA_Mutants__P Parameter: Timepoint (hr) Value: N/A
  misc_feature: MA Experiment 20000573 PARAMETER Experiment Name: At_100uM_ABA_Mutants__P Parameter: Tissue Value: Whole Plant
  misc_feature: MA Experiment 20000573 PARAMETER Experiment Name: At_100uM_ABA_Mutants__P Parameter: Treatment Value: None
  misc_feature: MA Experiment ID: 20001248 Result: Down-regulated in Transcription
  misc_feature: MA Experiment 20001248 PARAMETER Experiment Name: At_Far-red-induction_P Parameter: Age (day) Value: 7
  misc_feature: MA Experiment 20001248 PARAMETER Experiment Name: At_Far-red-induction_P Parameter: Light Value: Far-red vs. White
  misc_feature: MA Experiment 20001248 PARAMETER Experiment Name: At_Far-red-induction_P Parameter: Organism Value: A. thaliana
  misc_feature: MA Experiment 20001248 PARAMETER Experiment Name: At_Far-red-induction_P Parameter: Plant Line Value: Columbia
  misc_feature: MA Experiment 20001248 PARAMETER Experiment Name: At_Far-red-induction_P Parameter: Timepoint (hr) Value: 4
  misc_feature: MA Experiment 20001248 PARAMETER Experiment Name: At_Far-red-induction_P Parameter: Tissue Value: Whole Plant
  misc_feature: MA Experiment ID: 20001556 Result: Up-regulated in Transcription
  misc_feature: MA Experiment 20001556 PARAMETER Experiment Name: At_Drought_Soil_Dry_P Parameter: Age (day) Value: 26
  misc_feature: MA Experiment 20001556 PARAMETER Experiment Name: At_Drought_Soil_Dry_P Parameter: Organism Value: A. thaliana
  misc_feature: MA Experiment 20001556 PARAMETER Experiment Name: At_Drought_Soil_Dry_P Parameter: Plant Line Value: WS
  misc_feature: MA Experiment 20001556 PARAMETER Experiment Name: At_Drought_Soil_Dry_P Parameter: Post Timepoint (hr) Value: None
  misc_feature: MA Experiment 20001556 PARAMETER Experiment Name: At_Drought_Soil_Dry_P Parameter: Post-Treatment Value: None
  misc_feature: MA Experiment 20001556 PARAMETER Experiment Name: At_Drought_Soil_Dry_P Parameter: Timepoint (day) Value: 12
  misc_feature: MA Experiment 20001556 PARAMETER Experiment Name: At_Drought_Soil_Dry_P Parameter: Treatment Value: Drought vs. No Drought
  misc_feature: MA Experiment ID: 20001761 Result: Down-regulated in Transcription
  misc_feature: MA Experiment 20001761 PARAMETER Experiment Name: At_50mM_NH4NO3_L-to-H_P Parameter: Timepoint (hr) Value: 4
  misc_feature: MA Experiment 20001761 PARAMETER Experiment Name: At_50mM_NH4NO3_L-to-H_P Parameter: Tissue Value: Siliques
  misc_feature: MA Experiment 20001761 PARAMETER Experiment Name: At_50mM_NH4NO3_L-to-H_P Parameter: Treatment Value: 50mM NH4NO3 vs 100mM Mannitol
  misc_feature: MA Experiment ID: 20001904 Result: Up-regulated in Transcription
  misc_feature: MA Experiment 20001904 PARAMETER Experiment Name: At_Drought_Reproduction_P Parameter: Age (day) Value: 37
  misc_feature: MA Experiment 20001904 PARAMETER Experiment Name: At_Drought_Reproduction_P Parameter: Organism Value: A. thaliana
  misc_feature: MA Experiment 20001904 PARAMETER Experiment Name: At_Drought_Reproduction_P Parameter: Plant Line Value: WS
  misc_feature: MA Experiment 20001904 PARAMETER Experiment Name: At_Drought_Reproduction_P Parameter: Timepoint (day) Value: 7
  misc_feature: MA Experiment 20001904 PARAMETER Experiment Name: At_Drought_Reproduction_P Parameter: Tissue Value: Rosettes
  misc_feature: MA Experiment 20001904 PARAMETER Experiment Name: At_Drought_Reproduction_P Parameter: Treatment Value: Drought vs. No Drought
  misc_feature: MA Experiment ID: 20001905 Result: Up-regulated in Transcription
  misc_feature: MA Experiment 20001905 PARAMETER Experiment Name: At_Drought_Reproduction_P Parameter: Age (day) Value: 40
  misc_feature: MA Experiment 20001905 PARAMETER Experiment Name: At_Drought_Reproduction_P Parameter: Organism Value: A. thaliana
  misc_feature: MA Experiment 20001905 PARAMETER Experiment Name: At_Drought_Reproduction_P Parameter: Plant Line Value: WS
  misc_feature: MA Experiment 20001905 PARAMETER Experiment Name: At_Drought_Reproduction_P Parameter: Timepoint (day) Value: 10
  misc_feature: MA Experiment 20001905 PARAMETER Experiment Name: At_Drought_Reproduction_P Parameter: Tissue Value: Rosettes
  misc_feature: MA Experiment 20001905 PARAMETER Experiment Name: At_Drought_Reproduction_P Parameter: Treatment Value: Drought vs. No Drought
  misc_feature: MA Experiment ID: 20001906 Result: Up-regulated in Transcription
  misc_feature: MA Experiment 20001906 PARAMETER Experiment Name: At_Drought_Reproduction_P Parameter: Age (day) Value: 35
  misc_feature: MA Experiment 20001906 PARAMETER Experiment Name: At_Drought_Reproduction_P Parameter: Organism Value: A. thaliana
  misc_feature: MA Experiment 20001906 PARAMETER Experiment Name: At_Drought_Reproduction_P Parameter: Plant Line Value: WS
  misc_feature: MA Experiment 20001906 PARAMETER Experiment Name: At_Drought_Reproduction_P Parameter: Timepoint (day) Value: 5
  misc_feature: MA Experiment 20001906 PARAMETER Experiment Name: At_Drought_Reproduction_P Parameter: Tissue Value: Siliques
  misc_feature: MA Experiment 20001906 PARAMETER Experiment Name: At_Drought_Reproduction_P Parameter: Treatment Value: Drought vs. No Drought
  misc_feature: MA Experiment ID: 20001908 Result: Up-regulated in Transcription
  misc_feature: MA Experiment 20001908 PARAMETER Experiment Name: At_Drought_Reproduction_P Parameter: Age (day) Value: 40
  misc_feature: MA Experiment 20001908 PARAMETER Experiment Name: At_Drought_Reproduction_P Parameter: Organism Value: A. thaliana
  misc_feature: MA Experiment 20001908 PARAMETER Experiment Name: At_Drought_Reproduction_P Parameter: Plant Line Value: WS
  misc_feature: MA Experiment 20001908 PARAMETER Experiment Name: At_Drought_Reproduction_P Parameter: Timepoint (day) Value: 10
  misc_feature: MA Experiment 20001908 PARAMETER Experiment Name: At_Drought_Reproduction_P Parameter: Tissue Value: Siliques
  misc_feature: MA Experiment 20001908 PARAMETER Experiment Name: At_Drought_Reproduction_P Parameter: Treatment Value: Drought vs. No Drought
cacatattttcccaaaatttggatcaaaaagttttccgatagaagaaattaaatatgatgagactcctctttgtattcttcatggttcacaccatctttatcccatgcttttcctttgatacaccggggaaggatcttcctttaaccctagattattacaagtctacttgtccaaccgtatttgacgtcatcaagaaagaaatggaatgcatagtgaaggaagatcctagaaatgcagccataattattcgtcttcacttccacgactgctttgtccaaggatgtgatggatcggtgttgctagacgagacagaaactctacagggagagaagaaagcttctcccaacataaattcattgaaaggatacaaaattgtcgacagaatcaagaacataatcgaatccgaatgtcctggagttgtttcatgcgctgatcttctcacaattggtgctagagatgctacaatcctggtgggtgggccttactgggatgttcctgtgggaagaaaagattcaaaaaccgcaagctacgagcttgccacaacaaaccttccaactccagaagagggtttaatcagcatcattgctaagttctattctcaaggtctctcggttgaagacatggtcgctcttataggagcgcacacgatcggaaaagcacaatgtcgcaacttccgatcccgaatttatggagattttcaagtgacgtcagccctaaatccagtttcggagacgtacttggcaagtcttcgagagatttgtccggcgagtagcggagaaggtgatagtaacgtgacggcgatagacaatgtgacgccgaatctcttcgataactcgatctaccacacactgctaagaggagaagggttactgaattcggaccaggagatgtacacgagcttgttcgggatacaaacgcggcgaatcgtgagcaagtatgcggaggatccagtggctttcttcgagcaattctcgaagtcgatggtaaagatggggaacattttgaactctgaaagcttggctgatggagaagttagaagaaattgcagatttgtgaatacatgattcatcaacaacgaaactaaaaaatggagaaaataatctatttctgatctttatttatataagaaagaaaaaatttaatttgatgttattctttcccttatttatttctacatttttaaaactatagggttcttgaatgtttaaaaccttattctaatgattttcaattgatctgg

SEQ ID NO: 90587 - protein, 336 aa, Arabidopsis thaliana
  peptide (1)..(336): Ceres Seq. ID no. 12724416
  misc_feature (46)..(298): Pfam Name: Peroxidase Pfam Description: Peroxidase
  misc_feature (1)..(336): Homolog of NCBI NO: 18409140 NR Description: peroxidase, putative; protein id: At1g68850.1 thaliana] >gi|25453204|sp|Q96519|PE11_ARATH Peroxidase 11
  misc_feature (30)..(336): Homolog of NCBI NO: 11862958 NR Description: putative peroxidase [Oryza sativa (japonica
  misc_feature (76)..(336): Homolog of NCBI NO: 34898676 NR Description: putative peroxidase [Oryza sativa (japonica >gi|23589947|dbj|BAC20629.1| putative peroxidase [Oryza sativa
  misc_feature (27)..(335): Homolog of NCBI NO: 5002342 NR Description: peroxidase 1 precursor [Phaseolus vulgaris]
  misc_feature (33)..(335): Homolog of NCBI NO: 14031051 NR Description: peroxidase [Nicotiana tabacum]
  misc_feature (1)..(336): Homolog of NCBI NO: 15234394 NR Description: peroxidase, putative; protein id: At4g36430.1, by cDNA: gi_17530561, supported by cDNA: gi_18377685 [Arabidopsis
  misc_feature (16)..(335): Homolog of NCBI NO: 28400798 NR Description: peroxidase [Asparagus officinalis]
  misc_feature (15)..(335): Homolog of NCBI NO: 1279654 NR Description: peroxidase [Populus balsamifera subsp.
  misc_feature (25)..(335): Homolog of NCBI NO: 26397553 NR Description: Peroxidase 40 precursor (Atperox P40)
  misc_feature (193)..(336): Homolog of NCBI NO: 1890311 NR Description: peroxidase ATP23b [Arabidopsis thaliana]
MMRLLFVFFMVHTIFIPCFSFDTPGKDLPLTLDYYKSTCPTVFDVIKKEMECIVKEDPRNAAIIIRLHFHDCFVQGCDGSVLLDETETLQGEKKASPNINSLKGYKIVDRIKNIIESECPGVVSCADLLTIGARDATILVGGPYWDVPVGRKDSKTASYELATTNLPTPEEGLISIIAKFYSQGLSVEDMVALIGAHTIGKAQCRNFRSRIYGDFQVTSALNPVSETYLASLREICPASSGEGDSNVTAIDNVTPNLFDNSIYHTLLRGEGLLNSDQEMYTSLFGIQTRRIVSKYAEDPVAFFEQFSKSMVKMGNILNSESLADGEVRRNCRFVNT

SEQ ID NO: 90588 - protein, 335 aa, Arabidopsis thaliana
  peptide (1)..(335): Ceres Seq. ID no. 12724417
  misc_feature (45)..(297): Pfam Name: Peroxidase Pfam Description: Peroxidase
  misc_feature (1)..(335): Homolog of NCBI NO: 18409140 NR Description: peroxidase, putative; protein id: At1g68850.1 thaliana] >gi|25453204|sp|Q96519|PE11_ARATH Peroxidase 11
  misc_feature (29)..(335): Homolog of NCBI NO: 11862958 NR Description: putative peroxidase [Oryza sativa (japonica
  misc_feature (75)..(335): Homolog of NCBI NO: 34898676 NR Description: putative peroxidase [Oryza sativa (japonica >gi|23589947|dbj|BAC20629.1| putative peroxidase [Oryza sativa
  misc_feature (26)..(334): Homolog of NCBI NO: 5002342 NR Description: peroxidase 1 precursor [Phaseolus vulgaris]
  misc_feature (32)..(334): Homolog of NCBI NO: 14031051 NR Description: peroxidase [Nicotiana tabacum]
  misc_feature (1)..(335): Homolog of NCBI NO: 15234394 NR Description: peroxidase, putative; protein id: At4g36430.1, by cDNA: gi_17530561, supported by cDNA: gi_18377685 [Arabidopsis
  misc_feature (15)..(334): Homolog of NCBI NO: 28400798 NR Description: peroxidase [Asparagus officinalis]
  misc_feature (14)..(334): Homolog of NCBI NO: 1279654 NR Description: peroxidase [Populus balsamifera subsp.
  misc_feature (24)..(334): Homolog of NCBI NO: 26397553 NR Description: Peroxidase 40 precursor (Atperox P40)
  misc_feature (192)..(335): Homolog of NCBI NO: 1890311 NR Description: peroxidase ATP23b [Arabidopsis thaliana]
MRLLFVFFMVHTIFIPCFSFDTPGKDLPLTLDYYKSTCPTVFDVIKKEMECIVKEDPRNAAIIIRLHFHDCFVQGCDGSVLLDETETLQGEKKASPNINSLKGYKIVDRIKNIIESECPGVVSCADLLTIGARDATILVGGPYWDVPVGRKDSKTASYELATTNLPTPEEGLISIIAKFYSQGLSVEDMVALIGAHTIGKAQCRNFRSRIYGDFQVTSALNPVSETYLASLREICPASSGEGDSNVTAIDNVTPNLFDNSIYHTLLRGEGLLNSDQEMYTSLFGIQTRRIVSKYAEDPVAFFEQFSKSMVKMGNILNSESLADGEVRRNCRFVNT

SEQ ID NO: 90589 - protein, 327 aa, Arabidopsis thaliana
  peptide (1)..(327): Ceres Seq. ID no. 12724418
  misc_feature (37)..(289): Pfam Name: Peroxidase Pfam Description: Peroxidase
  misc_feature (1)..(327): Homolog of NCBI NO: 18409140 NR Description: peroxidase, putative; protein id: At1g68850.1 thaliana] >gi|25453204|sp|Q96519|PE11_ARATH Peroxidase 11
  misc_feature (21)..(327): Homolog of NCBI NO: 11862958 NR Description: putative peroxidase [Oryza sativa (japonica
  misc_feature (67)..(327): Homolog of NCBI NO: 34898676 NR Description: putative peroxidase [Oryza sativa (japonica >gi|23589947|dbj|BAC20629.1| putative peroxidase [Oryza sativa
  misc_feature (18)..(326): Homolog of NCBI NO: 5002342 NR Description: peroxidase 1 precursor [Phaseolus vulgaris]
  misc_feature (24)..(326): Homolog of NCBI NO: 14031051 NR Description: peroxidase [Nicotiana tabacum]
  misc_feature (1)..(327): Homolog of NCBI NO: 15234394 NR Description: peroxidase, putative; protein id: At4g36430.1, by cDNA: gi_17530561, supported by cDNA: gi_18377685 [Arabidopsis
  misc_feature (7)..(326): Homolog of NCBI NO: 28400798 NR Description: peroxidase [Asparagus officinalis]
  misc_feature (6)..(326): Homolog of NCBI NO: 1279654 NR Description: peroxidase [Populus balsamifera subsp.
  misc_feature (16)..(326): Homolog of NCBI NO: 26397553 NR Description: Peroxidase 40 precursor (Atperox P40)
  misc_feature (184)..(327): Homolog of NCBI NO: 1890311 NR Description: peroxidase ATP23b [Arabidopsis thaliana]
MVHTIFIPCFSFDTPGKDLPLTLDYYKSTCPTVFDVIKKEMECIVKEDPRNAAIIIRLHFHDCFVQGCDGSVLLDETETLQGEKKASPNINSLKGYKIVDRIKNIIESECPGVVSCADLLTIGARDATILVGGPYWDVPVGRKDSKTASYELATTNLPTPEEGLISIIAKFYSQGLSVEDMVALIGAHTIGKAQCRNFRSRIYGDFQVTSALNPVSETYLASLREICPASSGEGDSNVTAIDNVTPNLFDNSIYHTLLRGEGLLNSDQEMYTSLFGIQTRRIVSKYAEDPVAFFEQFSKSMVKMGNILNSESLADGEVRRNCRFVNT

SEQ ID NO: 90590 - DNA, 2232 bp, Arabidopsis thaliana
  misc_feature (1)..(2232): Ceres Seq. ID no. 12724430
  misc_feature: MA Experiment ID: 20000307 Result: Down-regulated in Transcription
  misc_feature: MA Experiment 20000307 PARAMETER Experiment Name: At_Germinating_Seeds_Sub_P Parameter: Age (hr) Value: 24 vs. 0
  misc_feature: MA Experiment 20000307 PARAMETER Experiment Name: At_Germinating_Seeds_Sub_P Parameter: Organism Value: A. thaliana
  misc_feature: MA Experiment 20000307 PARAMETER Experiment Name: At_Germinating_Seeds_Sub_P Parameter: Plant Line Value: WS
  misc_feature: MA Experiment 20000307 PARAMETER Experiment Name: At_Germinating_Seeds_Sub_P Parameter: Tissue Value: Germinating Seeds
  misc_feature: MA Experiment ID: 20000327 Result: Up-regulated in Transcription
  misc_feature: MA Experiment 20000327 PARAMETER Experiment Name: At_42deg_Heat_Sub_P Parameter: Age (day) Value: 14
  misc_feature: MA Experiment 20000327 PARAMETER Experiment Name: At_42deg_Heat_Sub_P Parameter: Organism Value: A. thaliana
  misc_feature: MA Experiment 20000327 PARAMETER Experiment Name: At_42deg_Heat_Sub_P Parameter: Plant Line Value: WS
  misc_feature: MA Experiment 20000327 PARAMETER Experiment Name: At_42deg_Heat_Sub_P Parameter: Temperature (deg C) Value: 42 vs. 22
  misc_feature: MA Experiment 20000327 PARAMETER Experiment Name: At_42deg_Heat_Sub_P Parameter: Timepoint (hr) Value: 1
  misc_feature: MA Experiment 20000327 PARAMETER Experiment Name: At_42deg_Heat_Sub_P Parameter: Tissue Value: Aerial
atggcgtcgaactactactctgttcagataaagcaatgcattgggttgggagctagaaatcagagtcgttatgtgaagatgatccacgggaatatcatcagagctcttccatatccagagacgtttttgtataacaacatcgtccacgcgtatgcgttaatgaaaagctccacttatgcacgccgagtgttcgacagaattccccaaccaaaccttttctcctggaacaatcttctcttagcttattcaaaagctgggcttatctcagagatggaaagtacctttgagaagcttcctgatagagatggtgtcacttggaacgtgcttattgaaggctattcattgagtggattggttggtgcagctgttaaggcttataatacgatgatgagagatttttctgctaatttgactagggttacgttgatgacaatgttgaaactttcttctagcaatggccatgttagtttggggaagcagattcatgggcaggttatcaaacttgggtttgagtcttatcttttagttgggagtccattgttgtatatgtatgcaaatgttggttgcatctctgatgcaaagaaggttttttacgggttggacgatagaaatacggttatgtacaattcgttgatgggtggacttctagcatgtggaatgattgaagatgcactgcagttgtttcgaggaatggagaaagattcagtttcttgggcagcgatgattaaaggacttgctcaaaacggacttgcaaaggaggctattgaatgtttcagagagatgaaagtacaaggcttgaagatggatcagtatccttttggaagtgtactgcctgcttgtggaggattaggagcaataaacgaagggaaacagattcatgcttgtataatcaggaccaattttcaggatcacatttatgtaggtagtgctctcattgacatgtattgcaagtgtaagtgtttacattatgcaaagactgtttttgatagaatgaagcagaagaatgttgtgtcttggacagcaatggttgtgggttatggccagaccgggcgtgctgaagaggctgttaagattttccttgatatgcaaagaagtggaattgacccagatcattatactctgggacaagcgatcagtgcttgtgccaacgtaagtagcttagaagagggctcccagtttcatggaaaagctataacttctggcctaatacattatgtcactgtttcaaattcattggtgactctgtatggaaaatgtggagatattgatgattcgactaggttgttcaacgagatgaatgtcagggatgcagtctcttggactgcaatggtttctgcgtatgcgcaatttggaagggccgtcgagactattcagttgtttgacaaaatggtacaacatggtctaaaacctgatggagtgactttgaccggtgttatttcagcttgcagtagggcaggattagtggagaaaggacaaagatattttaagttaatgacaagtgaatatggaatagtgccaagtattggtcattattcttgcatgatcgatctcttcagtcgatctggaaggttagaggaagccatgcgttttataaatgggatgccttttcctccagatgcaattggttggactactttactcagcgcatgtagaaataaaggtaacttggaaataggtaaatgggcggctgaatcactcatagaattagatcctcatcatcccgctggttatacgctattatcaagcatatacgcttcaaaagggaaatgggatagtgtggcccagttaagacggggaatgagagagaagaacgtgaagaaagaacccggacagagttggatcaaatggaaaggaaaattgcacagtttctcagctgatgacgagtcaagtccatatttagatcagatatatgctaagcttgaggaattgaacaataaaatcatagataatggttataaaccagataccagttttgtccatcatgatgtcgaggaagctgttaaggtaaagatgcttaactatcacagtgaaaggcttgcaatagcttttggattgatatttgtaccctcagggcaacctattagagtaggaaaaaatcttagagtgtgtgtggattgccacaatgccactaaacatatctccagcgtcactggtagagagatacttgtcagagatgctgttaggtttcaccgttttaaagatggaacttgctcatgtggagatttctggtag

SEQ ID NO: 90591 - protein, 743 aa, Arabidopsis thaliana
  peptide (1)..(743): Ceres Seq. ID no. 12724431
  misc_feature (509)..(543): Pfam Name: PPR repeat Pfam Description: PPR repeat
  misc_feature (221)..(743): Homolog of NCBI NO: 15234095 NR Description: putative protein; protein id: At4g33170.1
  misc_feature (42)..(227): Homolog of NCBI NO: 15234095 NR Description: putative protein; protein id: At4g33170.1
  misc_feature (184)..(743): Homolog of NCBI NO: 15242550 NR Description: selenium-binding protein-like; protein id:
  misc_feature (76)..(253): Homolog of NCBI NO: 15242550 NR Description: selenium-binding protein-like; protein id:
  misc_feature (10)..(86): Homolog of NCBI NO: 15242550 NR Description: selenium-binding protein-like; protein id:
  misc_feature (227)..(743): Homolog of NCBI NO: 15232837 NR Description: hypothetical protein; protein id: At3g02010.1 thaliana] >gi|6091739|gb|AAF03451.1|AC010797_27 hypothetical [Arabidopsis thaliana] >gi|6513930|gb|AAF14834.1|AC011664_16
  misc_feature (26)..(233): Homolog of NCBI NO: 15232837 NR Description: hypothetical protein; protein id: At3g02010.1 thaliana] >gi|6091739|gb|AAF03451.1|AC010797_27 hypothetical [Arabidopsis thaliana] >gi|6513930|gb|AAF14834.1|AC011664_16
  misc_feature (32)..(743): Homolog of NCBI NO: 15235498 NR Description: hypothetical protein; protein id: At4g02750.1
  misc_feature (90)..(743): Homolog of NCBI NO: 33146689 NR Description: putative pentatricopeptide (PPR)
  misc_feature (218)..(743): Homolog of NCBI NO: 15220337 NR Description: hypothetical protein; protein id: At1g11290.1
MASNYYSVQIKQCIGLGARNQSRYVKMIHGNIIRALPYPETFLYNNIVHAYALMKSSTYARRVFDRIPQPNLFSWNNLLLAYSKAGLISEMESTFEKLPDRDGVTWNVLIEGYSLSGLVGAAVKAYNTMMRDFSANLTRVTLMTMLKLSSSNGHVSLGKQIHGQVIKLGFESYLLVGSPLLYMYANVGCISDAKKVFYGLDDRNTVMYNSLMGGLLACGMIEDALQLFRGMEKDSVSWAAMIKGLAQNGLAKEAIECFREMKVQGLKMDQYPFGSVLPACGGLGAINEGKQIHACIIRTNFQDHIYVGSALIDMYCKCKCLHYAKTVFDRMKQKNVVSWTAMVVGYGQTGRAEEAVKIFLDMQRSGIDPDHYTLGQAISACANVSSLEEGSQFHGKAITSGLIHYVTVSNSLVTLYGKCGDIDDSTRLFNEMNVRDAVSWTAMVSAYAQFGRAVETIQLFDKMVQHGLKPDGVTLTGVISACSRAGLVEKGQRYFKLMTSEYGIVPSIGHYSCMIDLFSRSGRLEEAMRFINGMPFPPDAIGWTTLLSACRNKGNLEIGKWAAESLIELDPHHPAGYTLLSSIYASKGKWDSVAQLRRGMREKNVKKEPGQSWIKWKGKLHSFSADDESSPYLDQIYAKLEELNNKIIDNGYKPDTSFVHHDVEEAVKVKMLNYHSERLAIAFGLIFVPSGQPIRVGKNLRVCVDCHNATKHISSVTGREILVRDAVRFHRFKDGTCSCGDFW

SEQ ID NO: 90592 - protein, 717 aa, Arabidopsis thaliana
  peptide (1)..(717): Ceres Seq. ID no. 12724432
  misc_feature (483)..(517): Pfam Name: PPR repeat Pfam Description: PPR repeat
  misc_feature (195)..(717): Homolog of NCBI NO: 15234095 NR Description: putative protein; protein id: At4g33170.1
  misc_feature (16)..(201): Homolog of NCBI NO: 15234095 NR Description: putative protein; protein id: At4g33170.1
  misc_feature (158)..(717): Homolog of NCBI NO: 15242550 NR Description: selenium-binding protein-like; protein id:
  misc_feature (50)..(227): Homolog of NCBI NO: 15242550 NR Description: selenium-binding protein-like; protein id:
  misc_feature (1)..(60): Homolog of NCBI NO: 15242550 NR Description: selenium-binding protein-like; protein id:
  misc_feature (201)..(717): Homolog of NCBI NO: 15232837 NR Description: hypothetical protein; protein id: At3g02010.1 thaliana] >gi|6091739|gb|AAF03451.1|AC010797_27 hypothetical [Arabidopsis thaliana] >gi|6513930|gb|AAF14834.1|AC011664_16
  misc_feature (1)..(207): Homolog of NCBI NO: 15232837 NR Description: hypothetical protein; protein id: At3g02010.1 thaliana] >gi|6091739|gb|AAF03451.1|AC010797_27 hypothetical [Arabidopsis thaliana] >gi|6513930|gb|AAF14834.1|AC011664_16
  misc_feature (6)..(717): Homolog of NCBI NO: 15235498 NR Description: hypothetical protein; protein id: At4g02750.1
  misc_feature (64)..(717): Homolog of NCBI NO: 33146689 NR Description: putative pentatricopeptide (PPR)
  misc_feature (192)..(717): Homolog of NCBI NO: 15220337 NR Description: hypothetical protein; protein id: At1g11290.1
MIHGNIIRALPYPETFLYNNIVHAYALMKSSTYARRVFDRIPQPNLFSWNNLLLAYSKAGLISEMESTFEKLPDRDGVTWNVLIEGYSLSGLVGAAVKAYNTMMRDFSANLTRVTLMTMLKLSSSNGHVSLGKQIHGQVIKLGFESYLLVGSPLLYMYANVGCISDAKKVFYGLDDRNTVMYNSLMGGLLACGMIEDALQLFRGMEKDSVSWAAMIKGLAQNGLAKEAIECFREMKVQGLKMDQYPFGSVLPACGGLGAINEGKQIHACIIRTNFQDHIYVGSALIDMYCKCKCLHYAKTVFDRMKQKNVVSWTAMVVGYGQTGRAEEAVKIFLDMQRSGIDPDHYTLGQAISACANVSSLEEGSQFHGKAITSGLIHYVTVSNSLVTLYGKCGDIDDSTRLFNEMNVRDAVSWTAMVSAYAQFGRAVETIQLFDKMVQHGLKPDGVTLTGVISACSRAGLVEKGQRYFKLMTSEYGIVPSIGHYSCMIDLFSRSGRLEEAMRFINGMPFPPDAIGWTTLLSACRNKGNLEIGKWAAESLIELDPHHPAGYTLLSSIYASKGKWDSVAQLRRGMREKNVKKEPGQSWIKWKGKLHSFSADDESSPYLDQIYAKLEELNNKIIDNGYKPDTSFVHHDVEEAVKVKMLNYHSERLAIAFGLIFVPSGQPIRVGKNLRVCVDCHNATKHISSVTGREILVRDAVRFHRFKDGTCSCGDFW

SEQ ID NO: 90593 - protein, 690 aa, Arabidopsis thaliana
  peptide (1)..(690): Ceres Seq. ID no. 12724433
  misc_feature (456)..(490): Pfam Name: PPR repeat Pfam Description: PPR repeat
  misc_feature (168)..(690): Homolog of NCBI NO: 15234095 NR Description: putative protein; protein id: At4g33170.1
  misc_feature (1)..(174): Homolog of NCBI NO: 15234095 NR Description: putative protein; protein id: At4g33170.1
  misc_feature (131)..(690): Homolog of NCBI NO: 15242550 NR Description: selenium-binding protein-like; protein id:
  misc_feature (23)..(200): Homolog of NCBI NO: 15242550 NR Description: selenium-binding protein-like; protein id:
  misc_feature (1)..(33): Homolog of NCBI NO: 15242550 NR Description: selenium-binding protein-like; protein id:
  misc_feature (174)..(690): Homolog of NCBI NO: 15232837 NR Description: hypothetical protein; protein id: At3g02010.1 thaliana] >gi|6091739|gb|AAF03451.1|AC010797_27 hypothetical [Arabidopsis thaliana] >gi|6513930|gb|AAF14834.1|AC011664_16
  misc_feature (1)..(180): Homolog of NCBI NO: 15232837 NR Description: hypothetical protein; protein id: At3g02010.1 thaliana] >gi|6091739|gb|AAF03451.1|AC010797_27 hypothetical [Arabidopsis thaliana] >gi|6513930|gb|AAF14834.1|AC011664_16
  misc_feature (1)..(690): Homolog of NCBI NO: 15235498 NR Description: hypothetical protein; protein id: At4g02750.1
  misc_feature (37)..(690): Homolog of NCBI NO: 33146689 NR Description: putative pentatricopeptide (PPR)
  misc_feature (165)..(690): Homolog of NCBI NO: 15220337 NR Description: hypothetical protein; protein id: At1g11290.1
MKSSTYARRVFDRIPQPNLFSWNNLLLAYSKAGLISEMESTFEKLPDRDGVTWNVLIEGYSLSGLVGAAVKAYNTMMRDFSANLTRVTLMTMLKLSSSNGHVSLGKQIHGQVIKLGFESYLLVGSPLLYMYANVGCISDAKKVFYGLDDRNTVMYNSLMGGLLACGMIEDALQLFRGMEKDSVSWAAMIKGLAQNGLAKEAIECFREMKVQGLKMDQYPFGSVLPACGGLGAINEGKQIHACIIRTNFQDHIYVGSALIDMYCKCKCLHYAKTVFDRMKQKNVVSWTAMVVGYGQTGRAEEAVKIFLDMQRSGIDPDHYTLGQAISACANVSSLEEGSQFHGKAITSGLIHYVTVSNSLVTLYGKCGDIDDSTRLFNEMNVRDAVSWTAMVSAYAQFGRAVETIQLFDKMVQHGLKPDGVTLTGVISACSRAGLVEKGQRYFKLMTSEYGIVPSIGHYSCMIDLFSRSGRLEEAMRFINGMPFPPDAIGWTTLLSACRNKGNLEIGKWAAESLIELDPHHPAGYTLLSSIYASKGKWDSVAQLRRGMREKNVKKEPGQSWIKWKGKLHSFSADDESSPYLDQIYAKLEELNNKIIDNGYKPDTSFVHHDVEEAVKVKMLNYHSERLAIAFGLIFVPSGQPIRVGKNLRVCVDCHNATKHISSVTGREILVRDAVRFHRFKDGTCSCGDFW

SEQ ID NO: 90594 - DNA, 1845 bp, Arabidopsis thaliana
  misc_feature (1)..(1845): Ceres Seq. ID no. 12724478
  misc_feature: MA Experiment ID: 20000169 Result: Down-regulated in Transcription
  misc_feature: MA Experiment 20000169 PARAMETER Experiment Name: At_100uM_ABA_P Parameter: Age (day) Value: 14
  misc_feature: MA Experiment 20000169 PARAMETER Experiment Name: At_100uM_ABA_P Parameter: Organism Value: A. thaliana
  misc_feature: MA Experiment 20000169 PARAMETER Experiment Name: At_100uM_ABA_P Parameter: Plant Line Value: WS
  misc_feature: MA Experiment 20000169 PARAMETER Experiment Name: At_100uM_ABA_P Parameter: Timepoint (hr) Value: 6
  misc_feature: MA Experiment 20000169 PARAMETER Experiment Name: At_100uM_ABA_P Parameter: Tissue Value: Aerial
  misc_feature: MA Experiment 20000169 PARAMETER Experiment Name: At_100uM_ABA_P Parameter: Treatment Value: 100uM ABA vs. No Treatment
  misc_feature: MA Experiment ID: 20000171 Result: Down-regulated in Transcription
  misc_feature: MA Experiment 20000171 PARAMETER Experiment Name: At_42deg_Heat_P Parameter: Age (day) Value: 14
  misc_feature: MA Experiment 20000171 PARAMETER Experiment Name: At_42deg_Heat_P Parameter: Organism Value: A. thaliana
  misc_feature: MA Experiment 20000171 PARAMETER Experiment Name: At_42deg_Heat_P Parameter: Plant Line Value: WS
  misc_feature: MA Experiment 20000171 PARAMETER Experiment Name: At_42deg_Heat_P Parameter: Temperature (deg C) Value: 42 vs. 22
  misc_feature: MA Experiment 20000171 PARAMETER Experiment Name: At_42deg_Heat_P Parameter: Timepoint (hr) Value: 1
  misc_feature: MA Experiment 20000171 PARAMETER Experiment Name: At_42deg_Heat_P Parameter: Tissue Value: Aerial
  misc_feature: MA Experiment ID: 20000182 Result: Down-regulated in Transcription
  misc_feature: MA Experiment 20000182 PARAMETER Experiment Name: At_2mM_SA_P Parameter: Age (day) Value: 14
  misc_feature: MA Experiment 20000182 PARAMETER Experiment Name: At_2mM_SA_P Parameter: Organism Value: A. thaliana
  misc_feature: MA Experiment 20000182 PARAMETER Experiment Name: At_2mM_SA_P Parameter: Plant Line Value: WS
  misc_feature: MA Experiment 20000182 PARAMETER Experiment Name: At_2mM_SA_P Parameter: Timepoint (hr) Value: 6
  misc_feature: MA Experiment 20000182 PARAMETER Experiment Name: At_2mM_SA_P Parameter: Tissue Value: Aerial
  misc_feature: MA Experiment 20000182 PARAMETER Experiment Name: At_2mM_SA_P Parameter: Treatment Value: 2mM SA vs. No Treatment
  misc_feature: MA Experiment ID: 20000185 Result: Down-regulated in Transcription
  misc_feature: MA Experiment 20000185 PARAMETER Experiment Name: At_Roots__P Parameter: Age (day) Value: 7 vs. 21
  misc_feature: MA Experiment 20000185 PARAMETER Experiment Name: At_Roots__P Parameter: Organism Value: A. thaliana
  misc_feature: MA Experiment 20000185 PARAMETER Experiment Name: At_Roots__P Parameter: Tissue Value: Roots vs. Whole Plant
  misc_feature: MA Experiment ID: 20000227 Result: Up-regulated in Transcription
  misc_feature: MA Experiment 20000227 PARAMETER Experiment Name: At_Root-Tips-vs-Tops_P Parameter: Tissue Value: Root Tips vs. Root Tops
  misc_feature: MA Experiment ID: 20000234 Result: Up-regulated in Transcription
  misc_feature: MA Experiment 20000234 PARAMETER Experiment Name: At_Siliques_P Parameter: Age (day) Value: 21
  misc_feature: MA Experiment 20000234 PARAMETER Experiment Name: At_Siliques_P Parameter: Organism Value: A. thaliana
  misc_feature: MA Experiment 20000234 PARAMETER Experiment Name: At_Siliques_P Parameter: Plant Line Value: WS
  misc_feature: MA Experiment 20000234 PARAMETER Experiment Name: At_Siliques_P Parameter: Tissue Value: Less Than 5mm Siliques vs. Whole Plant
  misc_feature: MA Experiment ID: 20000264 Result: Up-regulated in Transcription
  misc_feature: MA Experiment 20000264 PARAMETER Experiment Name: At_Open_Flower_P Parameter: Age (day) Value: 21
  misc_feature: MA Experiment 20000264 PARAMETER Experiment Name: At_Open_Flower_P Parameter: Plant Line Value: WS
  misc_feature: MA Experiment 20000264 PARAMETER Experiment Name: At_Open_Flower_P Parameter: Tissue Value: Open Flower vs. Whole Plant
  misc_feature: MA Experiment ID: 20000437 Result: Down-regulated in Transcription
  misc_feature: MA Experiment 20000437 PARAMETER Experiment Name: At_Drought_P Parameter: Age (day) Value: 8
  misc_feature: MA Experiment 20000437 PARAMETER Experiment Name: At_Drought_P Parameter: Organism Value: A. thaliana
  misc_feature: MA Experiment 20000437 PARAMETER Experiment Name: At_Drought_P Parameter: Plant Line Value: WS
  misc_feature: MA Experiment 20000437 PARAMETER Experiment Name: At_Drought_P Parameter: Timepoint (hr) Value: 24
  misc_feature: MA Experiment 20000437 PARAMETER Experiment Name: At_Drought_P Parameter: Tissue Value: Whole Plant
  misc_feature: MA Experiment 20000437 PARAMETER Experiment Name: At_Drought_P Parameter: Treatment Value: Drought vs. No Drought
  misc_feature: MA Experiment ID: 20000439 Result: Down-regulated in Transcription
  misc_feature: MA Experiment 20000439 PARAMETER Experiment Name: At_Roots__P Parameter: Age (day) Value: 14 vs. 21
  misc_feature: MA Experiment 20000439 PARAMETER Experiment Name: At_Roots__P Parameter: Organism Value: A. thaliana
  misc_feature: MA Experiment 20000439 PARAMETER Experiment Name: At_Roots__P Parameter: Tissue Value: Roots vs. Whole Plant
  misc_feature: MA Experiment ID: 20000453 Result: Down-regulated in Transcription
  misc_feature: MA Experiment 20000453 PARAMETER Experiment Name: At_100uM_ABA_P Parameter: Age (day) Value: 15
  misc_feature: MA Experiment 20000453 PARAMETER Experiment Name: At_100uM_ABA_P Parameter: Organism Value: A. thaliana
  misc_feature: MA Experiment 20000453 PARAMETER Experiment Name: At_100uM_ABA_P Parameter: Plant Line Value: WS
  misc_feature: MA Experiment 20000453 PARAMETER Experiment Name: At_100uM_ABA_P Parameter: Timepoint (hr) Value: 24
  misc_feature: MA Experiment 20000453 PARAMETER Experiment Name: At_100uM_ABA_P Parameter: Tissue Value: Aerial
  misc_feature: MA Experiment 20000453 PARAMETER Experiment Name: At_100uM_ABA_P Parameter: Treatment Value: 100uM ABA vs. No Treatment
  misc_feature: MA Experiment ID: 20000527 Result: Up-regulated in Transcription
  misc_feature: MA Experiment 20000527 PARAMETER Experiment Name: At_10percent_PEG_P Parameter: Age (day) Value: 20
  misc_feature: MA Experiment 20000527 PARAMETER Experiment Name: At_10percent_PEG_P Parameter: Organism Value: A. thaliana
  misc_feature: MA Experiment 20000527 PARAMETER Experiment Name: At_10percent_PEG_P Parameter: Plant Line Value: WS
  misc_feature: MA Experiment 20000527 PARAMETER Experiment Name: At_10percent_PEG_P Parameter: Timepoint (day) Value: 20
  misc_feature: MA Experiment 20000527 PARAMETER Experiment Name: At_10percent_PEG_P Parameter: Tissue Value: Whole Plant
  misc_feature: MA Experiment 20000527 PARAMETER Experiment Name: At_10percent_PEG_P Parameter: Treatment Value: 10percent PEG vs. No Treatment
  misc_feature: MA Experiment ID: 20000794 Result: Down-regulated in Transcription
  misc_feature: MA Experiment 20000794 PARAMETER Experiment Name: At_Petals_P Parameter: Age (day) Value: 23-25 days
  misc_feature: MA Experiment 20000794 PARAMETER Experiment Name: At_Petals_P Parameter: Plant Line Value: WS
  misc_feature: MA Experiment 20000794 PARAMETER Experiment Name: At_Petals_P Parameter: Tissue Value: Petals vs. Whole plant
  misc_feature: MA Experiment ID: 20001247 Result: Down-regulated in Transcription
  misc_feature: MA Experiment 20001247 PARAMETER Experiment Name: At_Far-red-induction_P Parameter: Age (day) Value: 7
  misc_feature: MA Experiment 20001247 PARAMETER Experiment Name: At_Far-red-induction_P Parameter: Light Value: Far-red vs. White
  misc_feature: MA Experiment 20001247 PARAMETER Experiment Name: At_Far-red-induction_P Parameter: Organism Value: A. thaliana
  misc_feature: MA Experiment 20001247 PARAMETER Experiment Name: At_Far-red-induction_P Parameter: Plant Line Value: Columbia
  misc_feature: MA Experiment 20001247 PARAMETER Experiment Name: At_Far-red-induction_P Parameter: Timepoint (hr) Value: 1
  misc_feature: MA Experiment 20001247 PARAMETER Experiment Name: At_Far-red-induction_P Parameter: Tissue Value: Whole Plant
  misc_feature: MA Experiment ID: 20001450 Result: Down-regulated in Transcription
  misc_feature: MA Experiment 20001450 PARAMETER Experiment Name: At_Far-red-induction_P Parameter: Age (day) Value: 7
  misc_feature: MA Experiment 20001450 PARAMETER Experiment Name: At_Far-red-induction_P Parameter: Light Value: Far-red vs. White
  misc_feature: MA Experiment 20001450 PARAMETER Experiment Name: At_Far-red-induction_P Parameter: Organism Value: A. thaliana
  misc_feature: MA Experiment 20001450 PARAMETER Experiment Name: At_Far-red-induction_P Parameter: Plant Line Value: Columbia
  misc_feature: MA Experiment 20001450 PARAMETER Experiment Name: At_Far-red-induction_P Parameter: Timepoint (hr) Value: 8
  misc_feature: MA Experiment 20001450 PARAMETER Experiment Name: At_Far-red-induction_P Parameter: Tissue Value: Whole Plant
  misc_feature: MA Experiment ID: 20001556 Result: Up-regulated in Transcription
  misc_feature: MA Experiment 20001556 PARAMETER Experiment Name: At_Drought_Soil_Dry_P Parameter: Age (day) Value: 26
  misc_feature: MA Experiment 20001556 PARAMETER Experiment Name: At_Drought_Soil_Dry_P Parameter: Organism Value: A. thaliana
  misc_feature: MA Experiment 20001556 PARAMETER Experiment Name: At_Drought_Soil_Dry_P Parameter: Plant Line Value: WS
  misc_feature: MA Experiment 20001556 PARAMETER Experiment Name: At_Drought_Soil_Dry_P Parameter: Post Timepoint (hr) Value: None
  misc_feature: MA Experiment 20001556 PARAMETER Experiment Name: At_Drought_Soil_Dry_P Parameter: Post-Treatment Value: None
  misc_feature: MA Experiment 20001556 PARAMETER Experiment Name: At_Drought_Soil_Dry_P Parameter: Timepoint (day) Value: 12
  misc_feature: MA Experiment 20001556 PARAMETER Experiment Name: At_Drought_Soil_Dry_P Parameter: Treatment Value: Drought vs. No Drought
  misc_feature: MA Experiment ID: 20001558 Result: Up-regulated in Transcription
  misc_feature: MA Experiment 20001558 PARAMETER Experiment Name: At_Drought_Soil_Dry_P Parameter: Age (day) Value: 27
  misc_feature: MA Experiment 20001558 PARAMETER Experiment Name: At_Drought_Soil_Dry_P Parameter: Organism Value: A. thaliana
  misc_feature: MA Experiment 20001558 PARAMETER Experiment Name: At_Drought_Soil_Dry_P Parameter: Plant Line Value: WS
  misc_feature: MA Experiment 20001558 PARAMETER Experiment Name: At_Drought_Soil_Dry_P Parameter: Post Timepoint (hr) Value: 6
  misc_feature: MA Experiment 20001558 PARAMETER Experiment Name: At_Drought_Soil_Dry_P Parameter: Post-Treatment Value: Re-Water vs. No Drought
  misc_feature: MA Experiment 20001558 PARAMETER Experiment Name: At_Drought_Soil_Dry_P Parameter: Timepoint (day) Value: 13
  misc_feature: MA Experiment 20001558 PARAMETER Experiment Name: At_Drought_Soil_Dry_P Parameter: Treatment Value: Drought vs. No Drought
  misc_feature: MA Experiment ID: 20001560 Result: Up-regulated in Transcription
  misc_feature: MA Experiment 20001560 PARAMETER Experiment Name: At_Drought_Soil_Dry_P Parameter: Age (day) Value: 28
  misc_feature: MA Experiment 20001560 PARAMETER Experiment Name: At_Drought_Soil_Dry_P Parameter: Organism Value: A. thaliana
  misc_feature: MA Experiment 20001560 PARAMETER Experiment Name: At_Drought_Soil_Dry_P Parameter: Plant Line Value: WS
  misc_feature: MA Experiment 20001560 PARAMETER Experiment Name: At_Drought_Soil_Dry_P Parameter: Post Timepoint (hr) Value: None
  misc_feature: MA Experiment 20001560 PARAMETER Experiment Name: At_Drought_Soil_Dry_P Parameter: Post-Treatment Value: None
  misc_feature: MA Experiment 20001560 PARAMETER Experiment Name: At_Drought_Soil_Dry_P Parameter: Timepoint (day) Value: 14
  misc_feature: MA Experiment 20001560 PARAMETER Experiment Name: At_Drought_Soil_Dry_P Parameter: Treatment Value: Drought vs. No Drought
  misc_feature: MA Experiment ID: 20001757 Result: Up-regulated in Transcription
  misc_feature: MA Experiment 20001757 PARAMETER Experiment Name: At_50mM_NH4NO3_L-to-H_P Parameter: Timepoint (hr) Value: 6
  misc_feature: MA Experiment 20001757 PARAMETER Experiment Name: At_50mM_NH4NO3_L-to-H_P Parameter: Tissue Value: Leaf
  misc_feature: MA Experiment 20001757 PARAMETER Experiment Name: At_50mM_NH4NO3_L-to-H_P Parameter: Treatment Value: 50mM NH4NO3 vs 100mM Mannitol
atggcgtctctctccttcacccaattcttatcattccccagatgcaatgcagatgttccttgtctgctccagtcgcatggttttgtgaagtttagaggtgaaagatggaatgggaaacaaagcttttctatggctgctggtaggagaaagttatcagagtcagcacctcttgaagaagaaggtaatgatggaaacggtgcggttgtgggaaagaaaccatctaaaagtgttaagagaacaacgaagaagaaggttgtggttaaggatgaaccattagaagaaatttctgaatttttggttgataatgatgatgttttagacaaggaaagcattgtctcagctttgaaaccaaaaaagacaagaactagaaagaaagctgcagcagcttcttctgatgtggaggaagtaaaaaccgagaagaaagtgagacgaaagaggactgttaagaaagataaagatgtggaggatgatttagctactattatggatgctgaggttagtgatgtcgaggaagcattggctgttgaaagcactgatacagagagtgaagaagaagagattgatctgagtaaacatgaaggtgaagatattagtcacacttatggatggcctcctctcgtgtgttgctttggatctgcacaacatgcttttgtgccttcgggaaggccagcaaacaggctattagattatgaactacacgaacggatgagagatgcaaagtgggctccagagaagtatatccgggctcctggaggatgtgcaggaggtgttgctattgctcttgcaagcttgggtggtaaggttgcttttatgggcaaacttggggctgatgactatggtcaagccatgttgtattatctgaatgtgtgcaaagtccaaactagatcagttaagattgatggtaaaagggttacggcgtgttctactatgaagatcagcaagagaggtcgcttgaaatcgacttgtattaagccatgtgcagaggattcactttcaaaatctgaaatcaacgttgatgtgctcaaagaggcgaaaatgttctacttcagcacgcattctctactcgataagaagatgatgtcaactacgatacaagccatcaagatatcaaagcaactaggcaatgtcattttttatgacttgaatctccctttaccactatggcactccagcgaagaaaccaagtctttcatacaggaagtgtggaatcttgcagacgtcattgaaatcacaaaacaggaacttgaattcttatgcggaatcgagcctactgaagagttcgatacagaaaacaatgacatcagtaagtttgtccattacccgccagaaactgtggaacagctttggcatgaaaatctcaaggtcttgtttgtgaccaatggcacttctaagatccattactataccaaagagcacaatggtgctgtttccggaatggaggatgttcccattactccttttacaagggatatgtcagcatctggagatggcatcgttgcaggtctaataagaatgcttacggttcagccagatcttatgaacaataaagggtacctggaacgcacagcgagatatgcaattgagtgtggtattattgatcaatggttgctggcacaaacccgaggatatcctccaaaggatgacatggaagaagaagaagatgatgaagaagaagatgaagtggaatcagatccaaacggtataagatcgataacagagaaggaatacagaacctcaaagccttatgatgaaccagatggtccatacgttatgaaaccagtagaggaaagggagtacaagaagttagagcttgttggctcaatgtttgaagatggtagtttatga

SEQ ID NO: 90595 - protein, 614 aa, Arabidopsis thaliana
  peptide (1)..(614): Ceres Seq. ID no. 12724479
  misc_feature (204)..(546): Pfam Name: pfkB family carbohydrate kinase Pfam Description: pfkB family carbohydrate kinase
  misc_feature (44)..(614): Homolog of NCBI NO: 6730638 NR Description: F4N2.16 [Arabidopsis thaliana]
  misc_feature (116)..(544): Homolog of NCBI NO: 34908334 NR Description: putative fructokinase [Oryza sativa (japonica group)] >gi|20805178|dbj|BAB92847.1| putative fructokinase [Oryza
  misc_feature (170)..(544): Homolog of NCBI NO: 15232415 NR Description: fructokinase - like protein; protein id: supported by cDNA: gi_20260523 [Arabidopsis thaliana]
  misc_feature (206)..(480): Homolog of NCBI NO: 7434220 NR Description: fructokinase (EC 2.7.1.4) 1 - tomato
  misc_feature (246)..(478): Homolog of NCBI NO: 1915974 NR Description: fructokinase [Lycopersicon esculentum]
  misc_feature (246)..(478): Homolog of NCBI NO: 32765547 NR Description: fructokinase 2 [Lycopersicon hirsutum]
  misc_feature (242)..(511): Homolog of NCBI NO: 15242193 NR Description: fructokinase 1; protein id: At5g51830.1, by cDNA: gi_13878052, supported by cDNA: gi_17104644 [Arabidopsis >gi|10177882|dbj|BAB11252.1| fructokinase 1 [Arabidopsis
  misc_feature (246)..(478): Homolog of NCBI NO: 33329198 NR Description: putative fructokinase; S1 self-incompatibility
  misc_feature (246)..(478): Homolog of NCBI NO: 33329200 NR Description: putative fructokinase 2; S2 self-incompatibility
  misc_feature (246)..(426): Homolog of NCBI NO: 585973 NR Description: FRUCTOKINASE >gi|626018|pir||S39997 fructokinase
MASLSFTQFLSFPRCNADVPCLLQSHGFVKFRGERWNGKQSFSMAAGRRKLSESAPLEEEGNDGNGAVVGKKPSKSVKRTTKKKVVVKDEPLEEISEFLVDNDDVLDKESIVSALKPKKTRTRKKAAAASSDVEEVKTEKKVRRKRTVKKDKDVEDDLATIMDAEVSDVEEALAVESTDTESEEEEIDLSKHEGEDISHTYGWPPLVCCFGSAQHAFVPSGRPANRLLDYELHERMRDAKWAPEKYIRAPGGCAGGVAIALASLGGKVAFMGKLGADDYGQAMLYYLNVCKVQTRSVKIDGKRVTACSTMKISKRGRLKSTCIKPCAEDSLSKSEINVDVLKEAKMFYFSTHSLLDKKMMSTTIQAIKISKQLGNVIFYDLNLPLPLWHSSEETKSFIQEVWNLADVIEITKQELEFLCGIEPTEEFDTENNDISKFVHYPPETVEQLWHENLKVLFVTNGTSKIHYYTKEHNGAVSGMEDVPITPFTRDMSASGDGIVAGLIRMLTVQPDLMNNKGYLERTARYAIECGIIDQWLLAQTRGYPPKDDMEEEEDDEEEDEVESDPNGIRSITEKEYRTSKPYDEPDGPYVMKPVEEREYKKLELVGSMFEDGSL

SEQ ID NO: 90596 - protein, 571 aa, Arabidopsis thaliana
  peptide (1)..(571): Ceres Seq. ID no. 12724480
  misc_feature (161)..(503): Pfam Name: pfkB family carbohydrate kinase Pfam Description: pfkB family carbohydrate kinase
  misc_feature (1)..(571): Homolog of NCBI NO: 6730638 NR Description: F4N2.16 [Arabidopsis thaliana]
  misc_feature (73)..(501): Homolog of NCBI NO: 34908334 NR Description: putative fructokinase [Oryza sativa (japonica group)] >gi|20805178|dbj|BAB92847.1| putative fructokinase [Oryza
  misc_feature (127)..(501): Homolog of NCBI NO: 15232415 NR Description: fructokinase - like protein; protein id: supported by cDNA: gi_20260523 [Arabidopsis thaliana]
  misc_feature (163)..(437): Homolog of NCBI NO: 7434220 NR Description: fructokinase (EC 2.7.1.4) 1 - tomato
  misc_feature (203)..(435): Homolog of NCBI NO: 1915974 NR Description: fructokinase [Lycopersicon esculentum]
  misc_feature (203)..(435): Homolog of NCBI NO: 32765547 NR Description: fructokinase 2 [Lycopersicon hirsutum]
  misc_feature (199)..(468): Homolog of NCBI NO: 15242193 NR Description: fructokinase 1; protein id: At5g51830.1, by cDNA: gi_13878052, supported by cDNA: gi_17104644 [Arabidopsis >gi|10177882|dbj|BAB11252.1| fructokinase 1 [Arabidopsis
  misc_feature (203)..(435): Homolog of NCBI NO: 33329198 NR Description: putative fructokinase; S1 self-incompatibility
  misc_feature (203)..(435): Homolog of NCBI NO: 33329200 NR Description: putative fructokinase 2; S2 self-incompatibility
  misc_feature (203)..(383): Homolog of NCBI NO: 585973 NR Description: FRUCTOKINASE >gi|626018|pir||S39997 fructokinase
MAAGRRKLSESAPLEEEGNDGNGAVVGKKPSKSVKRTTKKKVVVKDEPLEEISEFLVDNDDVLDKESIVSALKPKKTRTRKKAAAASSDVEEVKTEKKVRRKRTVKKDKDVEDDLATIMDAEVSDVEEALAVESTDTESEEEEIDLSKHEGEDISHTYGWPPLVCCFGSAQHAFVPSGRPANRLLDYELHERMRDAKWAPEKYIRAPGGCAGGVAIALASLGGKVAFMGKLGADDYGQAMLYYLNVCKVQTRSVKIDGKRVTACSTMKISKRGRLKSTCIKPCAEDSLSKSEINVDVLKEAKMFYFSTHSLLDKKMMSTTIQAIKISKQLGNVIFYDLNLPLPLWHSSEETKSFIQEVWNLADVIEITKQELEFLCGIEPTEEFDTENNDISKFVHYPPETVEQLWHENLKVLFVTNGTSKIHYYTKEHNGAVSGMEDVPITPFTRDMSASGDGIVAGLIRMLTVQPDLMNNKGYLERTARYAIECGIIDQWLLAQTRGYPPKDDMEEEEDDEEEDEVESDPNGIRSITEKEYRTSKPYDEPDGPYVMKPVEEREYKKLELVGSMFEDGSL

SEQ ID NO: 90597 - protein, 453 aa, Arabidopsis thaliana
  peptide (1)..(453): Ceres Seq. ID no. 12724481
  misc_feature (43)..(385): Pfam Name: pfkB family carbohydrate kinase Pfam Description: pfkB family carbohydrate kinase
  misc_feature (1)..(453): Homolog of NCBI NO: 6730638 NR Description: F4N2.16 [Arabidopsis thaliana]
  misc_feature (1)..(383): Homolog of NCBI NO: 34908334 NR Description: putative fructokinase [Oryza sativa (japonica group)] >gi|20805178|dbj|BAB92847.1| putative fructokinase [Oryza
  misc_feature (9)..(383): Homolog of NCBI NO: 15232415 NR Description: fructokinase - like protein; protein id: supported by cDNA: gi_20260523 [Arabidopsis thaliana]
  misc_feature (45)..(319): Homolog of NCBI NO: 7434220 NR Description: fructokinase (EC 2.7.1.4) 1 - tomato
  misc_feature (85)..(317): Homolog of NCBI NO: 1915974 NR Description: fructokinase [Lycopersicon esculentum]
  misc_feature (85)..(317): Homolog of NCBI NO: 32765547 NR Description: fructokinase 2 [Lycopersicon hirsutum]
  misc_feature (81)..(350): Homolog of NCBI NO: 15242193 NR Description: fructokinase 1; protein id: At5g51830.1, by cDNA: gi_13878052, supported by cDNA: gi_17104644 [Arabidopsis >gi|10177882|dbj|BAB11252.1| fructokinase 1 [Arabidopsis
  misc_feature (85)..(317): Homolog of NCBI NO: 33329198 NR Description: putative fructokinase; S1 self-incompatibility
  misc_feature (85)..(317): Homolog of NCBI NO: 33329200 NR Description: putative fructokinase 2; S2 self-incompatibility
  misc_feature (85)..(265): Homolog of NCBI NO: 585973 NR Description: FRUCTOKINASE >gi|626018|pir||S39997 fructokinase
MDAEVSDVEEALAVESTDTESEEEEIDLSKHEGEDISHTYGWPPLVCCFGSAQHAFVPSGRPANRLLDYELHERMRDAKWAPEKYIRAPGGCAGGVAIALASLGGKVAFMGKLGADDYGQAMLYYLNVCKVQTRSVKIDGKRVTACSTMKISKRGRLKSTCIKPCAEDSLSKSEINVDVLKEAKMFYFSTHSLLDKKMMSTTIQAIKISKQLGNVIFYDLNLPLPLWHSSEETKSFIQEVWNLADVIEITKQELEFLCGIEPTEEFDTENNDISKFVHYPPETVEQLWHENLKVLFVTNGTSKIHYYTKEHNGAVSGMEDVPITPFTRDMSASGDGIVAGLIRMLTVQPDLMNNKGYLERTARYAIECGIIDQWLLAQTRGYPPKDDMEEEEDDEEEDEVESDPNGIRSITEKEYRTSKPYDEPDGPYVMKPVEEREYKKLELVGSMFEDGSL

SEQ ID NO: 90598 - DNA, 1371 bp, Arabidopsis thaliana
  misc_feature (1)..(1371): Ceres Seq. ID no. 12724488
  misc_feature: MA Experiment ID: 20000180 Result: Up-regulated in Transcription
  misc_feature: MA Experiment 20000180 PARAMETER Experiment Name: At_Germinating_Seeds_P Parameter: Age (hr) Value: 24 vs. 0
  misc_feature: MA Experiment 20000180 PARAMETER Experiment Name: At_Germinating_Seeds_P Parameter: Tissue Value: Germinating Seeds
  misc_feature: MA Experiment ID: 20000184 Result: Up-regulated in Transcription
  misc_feature: MA Experiment 20000184 PARAMETER Experiment Name: At_Shoots__P Parameter: Age (day) Value: 7
  misc_feature: MA Experiment 20000184 PARAMETER Experiment Name: At_Shoots__P Parameter: Tissue Value: Shoots vs. Whole Plant
  misc_feature: MA Experiment ID: 20000185 Result: Up-regulated in Transcription
  misc_feature: MA Experiment 20000185 PARAMETER Experiment Name: At_Roots__P Parameter: Age (day) Value: 7 vs. 21
  misc_feature: MA Experiment 20000185 PARAMETER Experiment Name: At_Roots__P Parameter: Organism Value: A. thaliana
  misc_feature: MA Experiment 20000185 PARAMETER Experiment Name: At_Roots__P Parameter: Tissue Value: Roots vs. Whole Plant
  misc_feature: MA Experiment ID: 20000439 Result: Up-regulated in Transcription
  misc_feature: MA Experiment 20000439 PARAMETER Experiment Name: At_Roots__P Parameter: Age (day) Value: 14 vs. 21
  misc_feature: MA Experiment 20000439 PARAMETER Experiment Name: At_Roots__P Parameter: Organism Value: A. thaliana
  misc_feature: MA Experiment 20000439 PARAMETER Experiment Name: At_Roots__P Parameter: Tissue Value: Roots vs. Whole Plant
atgggaaactctttaagatgcatatcacaagaacaagatccaaaccagaagaaacctagctccgtcgtcaacggtaatagctccgagaaacacgttcggaggctgtctttgataccatctttccgacgccggacattactaccatctctctcttgctccggatcctcaacttcgtctacgtccaagaaaggagggatcaagacaaaaaagaagataagagaaagacaccaccaagagcaacatcatcatgatcatgagaaagactctcttattcaagaccaaacattagctgccactaatattctctttagtcaaacgcctcgtaacagcaactctgctcctcctttccgacgctccacctccgtcgtttacactcagccacctaccgccgctgtagccgcctccgtaggttctgtttccggcgccttgactcctaagaaatccacttatggatacgttagaagttctagcaataggcagagatcaagcactgatcctgttcttaaacccaatcagcttctagacaaggcaagcaaatttaatttgcctatctcccacaataatgagctaaaggtcgaaggtgcggagacaaagcggttcgtgctggttcatggaggagggtttggtgcatggtgttggtacaaaaccataacgctcttagagaaacatggtttccaagtagacgccgttgacttgaccggttccggtgtcagctcttttgacacaaacaacatcactagcctcgctcaatacgtcaaaccactcctccatttctttgacacccttaaacccaccgagaaggtgatattagtggggcatgattttggaggagcttgtatgtcttatgccatggagatgtacccttctaagatcgctaaggctattttcatatctgctgctatgttggctaatgcccaaagcactctcgatctctttaaccaacagcctgactcaaattatgatctgatggaacaagtccatctatttctgtacgccaacggcaaaaagaaccctccaacagccgttgatttcgacagatcattgcttagagattttttctttaatcagagccctccaaaggacgttgcattagcgtcggtatcgatgagaccaatcccgttcgcaccagtggtcgaaaagctccacgtgtcggagaaaaattacggttcaatccgacggttctacatcaaaaccatggaggatgattacgctgtaccggtttctctccaagatgcaatgatcaaatcaaaccctccagaacaagtttttcatctcaaaggctctgaccatgcacctttcttctctcgtcctcagtctttgaaccggatactcgttgagatttctcaattacctcccaagaaatcttcttga

SEQ ID NO: 90599 - protein, 456 aa, Arabidopsis thaliana
  peptide (1)..(456): Ceres Seq. ID no. 12724489
  misc_feature (235)..(432): Pfam Name: alpha/beta hydrolase fold Pfam Description: alpha/beta hydrolase fold
  misc_feature (1)..(456): Homolog of NCBI NO: 15222256 NR Description: polyneuridine aldehyde esterase, putative; id: At1g69240.1 [Arabidopsis thaliana]
  misc_feature (1)..(451): Homolog of NCBI NO: 15222699 NR Description: hypothetical protein; protein id: At1g26360.1
  misc_feature (119)..(456): Homolog of NCBI NO: 25404802 NR Description: probable alpha/beta hydrolase F23O10.18 - Arabidopsis thaliana >gi|12325081|gb|AAG52490.1|AC018364_8
  misc_feature (154)..(452): Homolog of NCBI NO: 15230077 NR Description: alpha/beta hydrolase, putative; protein id: [Arabidopsis thaliana] >gi|10092202|gb|AAG12619.1|AC074284_5
  misc_feature (235)..(432): Homolog of NCBI NO: 25518436 NR Description: hypothetical protein T1K7.26 - Arabidopsis >gi|9797761|gb|AAF98579.1|AC013427_22 Contains similarity to protein from Oryza sativa gb|Z34271 and contains an alpha/beta
  misc_feature (1)..(169): Homolog of NCBI NO: 25404802 NR Description: probable alpha/beta hydrolase F23O10.18 - Arabidopsis thaliana >gi|12325081|gb|AAG52490.1|AC018364_8
  misc_feature (185)..(451): Homolog of NCBI NO: 30681236 NR Description: hydrolase family [Arabidopsis thaliana] Unknown protein [Arabidopsis thaliana]
  misc_feature (198)..(451): Homolog of NCBI NO: 7485010 NR Description: host response protein homolog T5L19.30 - thaliana >gi|4538993|emb|CAB39614.1| putative host response [Arabidopsis thaliana] >gi|7267686|emb|CAB78113.1| putative host
  misc_feature (153)..(451): Homolog of NCBI NO: 15218463 NR Description: polyneuridine aldehyde esterase, putative; id: At1g33990.1, supported by cDNA: 8327., supported by cDNA: [Arabidopsis thaliana] >gi|10092445|gb|AAG12848.1|AC079286_5
  misc_feature (153)..(451): Homolog of NCBI NO: 21595837 NR Description: polyneuridine aldehyde esterase, putative
MGNSLRCISQEQDPNQKKPSSVVNGNSSEKHVRRLSLIPSFRRRTLLPSLSCSGSSTSSTSKKGGIKTKKKIRERHHQEQHHHDHEKDSLIQDQTLAATNILFSQTPRNSNSAPPFRRSTSVVYTQPPTAAVAASVGSVSGALTPKKSTYGYVRSSSNRQRSSTDPVLKPNQLLDKASKFNLPISHNNELKVEGAETKRFVLVHGGGFGAWCWYKTITLLEKHGFQVDAVDLTGSGVSSFDTNNITSLAQYVKPLLHFFDTLKPTEKVILVGHDFGGACMSYAMEMYPSKIAKAIFISAAMLANAQSTLDLFNQQPDSNYDLMEQVHLFLYANGKKNPPTAVDFDRSLLRDFFFNQSPPKDVALASVSMRPIPFAPVVEKLHVSEKNYGSIRRFYIKTMEDDYAVPVSLQDAMIKSNPPEQVFHLKGSDHAPFFSRPQSLNRILVEISQLPPKKSS

SEQ ID NO: 90600 - DNA, 2364 bp, Arabidopsis thaliana
  misc_feature (1)..(2364): Ceres Seq. ID no. 12724494
  misc_feature: MA Experiment ID: 20000307 Result: Down-regulated in Transcription
  misc_feature: MA Experiment 20000307 PARAMETER Experiment Name: At_Germinating_Seeds_Sub_P Parameter: Age (hr) Value: 24 vs. 0
  misc_feature: MA Experiment 20000307 PARAMETER Experiment Name: At_Germinating_Seeds_Sub_P Parameter: Organism Value: A. thaliana
  misc_feature: MA Experiment 20000307 PARAMETER Experiment Name: At_Germinating_Seeds_Sub_P Parameter: Plant Line Value: WS
  misc_feature: MA Experiment 20000307 PARAMETER Experiment Name: At_Germinating_Seeds_Sub_P Parameter: Tissue Value: Germinating Seeds
  misc_feature: MA Experiment ID: 20000355 Result: Up-regulated in Transcription
  misc_feature: MA Experiment 20000355 PARAMETER Experiment Name: At_Siliques_Sub_P Parameter: Age (day) Value: 21
  misc_feature: MA Experiment 20000355 PARAMETER Experiment Name: At_Siliques_Sub_P Parameter: Organism Value: A. thaliana
  misc_feature: MA Experiment 20000355 PARAMETER Experiment Name: At_Siliques_Sub_P Parameter: Plant Line Value: WS
  misc_feature: MA Experiment 20000355 PARAMETER Experiment Name: At_Siliques_Sub_P Parameter: Tissue Value: Less Than 5mm Siliques vs. Whole Plant
atgacgcagtacatgccattgtttagatcatgctcgagcttacgattagtaagtcagcttcatgctcacctacttgtcaccggtcgtctccgtcgtgaccctcttccagtgacgaagctcattgaatcatacgctttcatgggttctccagattcgtctaggctcgtctttgaagcttttccttaccctgattccttcatgtacggtgttctcatcaaatgcaacgtctggtgtcatttactcgacgccgccattgatctgtaccataggttggtttcggagacgacccaaatcagtaagtttgtgtttccgtctgttttgagggcttgtgcgggttcgagggagcatctgagtgttggtgggaaagtccatgggagaattatcaagggcggtgtagacgacgacgctgtgatagagacgtctctgttgtgtatgtatggtcaaactgggaatttaagtgatgcagagaaggtgttcgatggaatgcctgtgagagaccttgtggcttggagtactcttgtttctagctgtctcgagaatggtgaggtggtgaaagcattgaggatgtttaagtgtatggtggatgatggtgttgagcccgatgctgtgacgatgatcagcgttgtagaaggatgtgctgagcttggatgtttgaggatcgctagatcagttcatggccagataacgaggaaaatgtttgatttagatgaaacattatgcaattctctgcttacaatgtacagtaagtgtggggatttgcttagctcggagagaatctttgagaagatcgccaagaagaatgctgtttcgtggacagccatgatttctagttacaaccgtggcgagttctctgaaaaggcattgagaagtttcagtgagatgataaagtctggaattgagcctaatttggttaccctttatagtgttttgagctcttgtggtttgatagggttgattagagaaggtaagtcggtccatggttttgcagttagacgagagctggatccgaattacgagtcgctttctctggccttagttgagctgtacgctgaatgcgggaaactaagcgactgtgagacagttttacgtgtggttagtgatagaaatattgtcgcatggaactctcttatatctctatatgcacacagaggtatggtgattcaagcattgggcttgtttagacagatggtgacacagagaataaaaccagacgcattcactttggccagctcaatctcagcatgcgagaatgctggtttagttccgctagggaaacagattcacggacatgttataaggacagatgtttcagatgagtttgtgcagaactcgttgatagacatgtactctaaaagcggatctgtggattcagcaagcacagtgtttaatcaaatcaagcataggagcgttgtgacatggaactcaatgctctgcgggttttctcagaatggtaactctgtagaggcaattagcctcttcgactatatgtatcatagctatctcgagatgaatgaagttacatttttggcggttattcaagcatgctcaagcataggttcactggagaaagggaaatgggttcaccacaagctcattatttccggtttaaaggatcttttcactgatacagctctaatcgacatgtatgccaaatgtggagatctcaacgcagctgaaacagtcttcagggccatgtcgagtagaagcattgtgtcatggagtagtatgatcaatgcctatggaatgcacggacggataggatccgccatatctacattcaatcaaatggtggaatccggaacgaaacctaacgaagttgtcttcatgaacgttctctctgcttgtggtcactctggttccgttgaagaaggtaagtactactttaacttgatgaaaagttttggcgtatcaccaaactcagagcatttcgcctgtttcatcgaccttttgagccgttctggtgatctcaaagaagcatatagaaccatcaaggagatgccttttctagctgatgcttcagtttggggttctctggtcaatggatgcagaatccatcagaaaatggatatcatcaaagccattaaaaacgatctttcggatattgttacagatgatacgggatactacactctcttgtccaatatatatgctgaagaaggggaatgggaagaattcaggagactgagatcagctatgaagagttcgaatcttaagaaagttcctgggtacagcgcgattgagattgatcaaaaagttttcagatttggagctggtgaagaaaatcgtatccaaacagatgaaatctataggtttcttggaaatttgcagaatctaacgaatgaagaacatgtcgtagattcttag

SEQ ID NO: 90601 - protein, 787 aa, Arabidopsis thaliana
  peptide (1)..(787): Ceres Seq. ID no. 12724495
  misc_feature (471)..(505): Pfam Name: PPR repeat Pfam Description: PPR repeat
  misc_feature (19)..(787): Homolog of NCBI NO: 38606535 NR Description: OSJNBa0016O02.23 [Oryza sativa (japonica
  misc_feature (15)..(787): Homolog of NCBI NO: 38423978 NR Description: PPR-repeat protein-like [Oryza sativa (japonica
  misc_feature (20)..(748): Homolog of NCBI NO: 38567725 NR Description: B1358B12.23 [Oryza sativa (japonica
  misc_feature (20)..(748): Homolog of NCBI NO: 38347057 NR Description: OSJNBa0060P14.4 [Oryza sativa (japonica
  misc_feature (81)..(782): Homolog of NCBI NO: 15234006 NR Description: putative protein; protein id: At4g18750.1
  misc_feature (7)..(775): Homolog of NCBI NO: 15233590 NR Description: putative protein; protein id: At4g21300.1
  misc_feature (23)..(759): Homolog of NCBI NO: 18394615 NR Description: hypothetical protein; protein id: At1g18485.1
  misc_feature (23)..(759): Homolog of NCBI NO: 25402861 NR Description: protein F15H18.4 [imported] - Arabidopsis >gi|6714305|gb|AAF26001.1|AC013354_20 F15H18.4 [Arabidopsis
  misc_feature (16)..(781): Homolog of NCBI NO: 15236324 NR Description: putative protein; protein id: At4g13650.1
  misc_feature (5)..(783): Homolog of NCBI NO: 34897084 NR Description: hypothetical protein [Oryza sativa (japonica group)] >gi|12957718|gb|AAK09236.1| hypothetical protein [Oryza
MTQYMPLFRSCSSLRLVSQLHAHLLVTGRLRRDPLPVTKLIESYAFMGSPDSSRLVFEAFPYPDSFMYGVLIKCNVWCHLLDAAIDLYHRLVSETTQISKFVFPSVLRACAGSREHLSVGGKVHGRIIKGGVDDDAVIETSLLCMYGQTGNLSDAEKVFDGMPVRDLVAWSTLVSSCLENGEVVKALRMFKCMVDDGVEPDAVTMISVVEGCAELGCLRIARSVHGQITRKMFDLDETLCNSLLTMYSKCGDLLSSERIFEKIAKKNAVSWTAMISSYNRGEFSEKALRSFSEMIKSGIEPNLVTLYSVLSSCGLIGLIREGKSVHGFAVRRELDPNYESLSLALVELYAECGKLSDCETVLRVVSDRNIVAWNSLISLYAHRGMVIQALGLFRQMVTQRIKPDAFTLASSISACENAGLVPLGKQIHGHVIRTDVSDEFVQNSLIDMYSKSGSVDSASTVFNQIKHRSVVTWNSMLCGFSQNGNSVEAISLFDYMYHSYLEMNEVTFLAVIQACSSIGSLEKGKWVHHKLIISGLKDLFTDTALIDMYAKCGDLNAAETVFRAMSSRSIVSWSSMINAYGMHGRIGSAISTFNQMVESGTKPNEVVFMNVLSACGHSGSVEEGKYYFNLMKSFGVSPNSEHFACFIDLLSRSGDLKEAYRTIKEMPFLADASVWGSLVNGCRIHQKMDIIKAIKNDLSDIVTDDTGYYTLLSNIYAEEGEWEEFRRLRSAMKSSNLKKVPGYSAIEIDQKVFRFGAGEENRIQTDEIYRFLGNLQNLTNEEHVVDS

SEQ ID NO: 90602 - protein, 783 aa, Arabidopsis thaliana
  peptide (1)..(783): Ceres Seq. ID no. 12724496
  misc_feature (467)..(501): Pfam Name: PPR repeat Pfam Description: PPR repeat
  misc_feature (15)..(783): Homolog of NCBI NO: 38606535 NR Description: OSJNBa0016O02.23 [Oryza sativa (japonica
  misc_feature (11)..(783): Homolog of NCBI NO: 38423978 NR Description: PPR-repeat protein-like [Oryza sativa (japonica
  misc_feature (16)..(744): Homolog of NCBI NO: 38567725 NR Description: B1358B12.23 [Oryza sativa (japonica
  misc_feature (16)..(744): Homolog of NCBI NO: 38347057 NR Description: OSJNBa0060P14.4 [Oryza sativa (japonica
  misc_feature (77)..(778): Homolog of NCBI NO: 15234006 NR Description: putative protein; protein id: At4g18750.1
  misc_feature (3)..(771): Homolog of NCBI NO: 15233590 NR Description: putative protein; protein id: At4g21300.1
  misc_feature (19)..(755): Homolog of NCBI NO: 18394615 NR Description: hypothetical protein; protein id: At1g18485.1
  misc_feature (19)..(755): Homolog of NCBI NO: 25402861 NR Description: protein F15H18.4 [imported] - Arabidopsis >gi|6714305|gb|AAF26001.1|AC013354_20 F15H18.4 [Arabidopsis
  misc_feature (12)..(777): Homolog of NCBI NO: 15236324 NR Description: putative protein; protein id: At4g13650.1
  misc_feature (1)..(779): Homolog of NCBI NO: 34897084 NR Description: hypothetical protein [Oryza sativa (japonica group)] >gi|12957718|gb|AAK09236.1| hypothetical protein [Oryza
MPLFRSCSSLRLVSQLHAHLLVTGRLRRDPLPVTKLIESYAFMGSPDSSRLVFEAFPYPDSFMYGVLIKCNVWCHLLDAAIDLYHRLVSETTQISKFVFPSVLRACAGSREHLSVGGKVHGRIIKGGVDDDAVIETSLLCMYGQTGNLSDAEKVFDGMPVRDLVAWSTLVSSCLENGEVVKALRMFKCMVDDGVEPDAVTMISVVEGCAELGCLRIARSVHGQITRKMFDLDETLCNSLLTMYSKCGDLLSSERIFEKIAKKNAVSWTAMISSYNRGEFSEKALRSFSEMIKSGIEPNLVTLYSVLSSCGLIGLIREGKSVHGFAVRRELDPNYESLSLALVELYAECGKLSDCETVLRVVSDRNIVAWNSLISLYAHRGMVIQALGLFRQMVTQRIKPDAFTLASSISACENAGLVPLGKQIHGHVIRTDVSDEFVQNSLIDMYSKSGSVDSASTVFNQIKHRSVVTWNSMLCGFSQNGNSVEAISLFDYMYHSYLEMNEVTFLAVIQACSSIGSLEKGKWVHHKLIISGLKDLFTDTALIDMYAKCGDLNAAETVFRAMSSRSIVSWSSMINAYGMHGRIGSAISTFNQMVESGTKPNEVVFMNVLSACGHSGSVEEGKYYFNLMKSFGVSPNSEHFACFIDLLSRSGDLKEAYRTIKEMPFLADASVWGSLVNGCRIHQKMDIIKAIKNDLSDIVTDDTGYYTLLSNIYAEEGEWEEFRRLRSAMKSSNLKKVPGYSAIEIDQKVFRFGAGEENRIQTDEIYRFLGNLQNLTNEEHVVDS

SEQ ID NO: 90603 - protein, 741 aa, Arabidopsis thaliana; identical to SEQ ID NO: 88898
  peptide (1)..(741): Ceres Seq. ID no. 12724497
  misc_feature (425)..(459): Pfam Name: PPR repeat Pfam Description: PPR repeat
  misc_feature (1)..(741): Homolog of NCBI NO: 38606535 NR Description: OSJNBa0016O02.23 [Oryza sativa (japonica
  misc_feature (1)..(741): Homolog of NCBI NO: 38423978 NR Description: PPR-repeat protein-like [Oryza sativa (japonica
  misc_feature (1)..(702): Homolog of NCBI NO: 38567725 NR Description: B1358B12.23 [Oryza sativa (japonica
  misc_feature (1)..(702): Homolog of NCBI NO: 38347057 NR Description: OSJNBa0060P14.4 [Oryza sativa (japonica
  misc_feature (35)..(736): Homolog of NCBI NO: 15234006 NR Description: putative protein; protein id: At4g18750.1
  misc_feature (1)..(729): Homolog of NCBI NO: 15233590 NR Description: putative protein; protein id: At4g21300.1
  misc_feature (1)..(713): Homolog of NCBI NO: 18394615 NR Description: hypothetical protein; protein id: At1g18485.1
  misc_feature (1)..(713): Homolog of NCBI NO: 25402861 NR Description: protein F15H18.4 [imported] - Arabidopsis >gi|6714305|gb|AAF26001.1|AC013354_20 F15H18.4 [Arabidopsis
  misc_feature (1)..(735): Homolog of NCBI NO: 15236324 NR Description: putative protein; protein id: At4g13650.1
  misc_feature (1)..(737): Homolog of NCBI NO: 34897084 NR Description: hypothetical protein [Oryza sativa (japonica group)] >gi|12957718|gb|AAK09236.1| hypothetical protein [Oryza

SEQ ID NO: 90604 - DNA, 993 bp, Arabidopsis thaliana
  misc_feature (1)..(993): Ceres Seq. ID no. 12724534
  misc_feature: MA Experiment ID: 20000184 Result: Up-regulated in Transcription
  misc_feature: MA Experiment 20000184 PARAMETER Experiment Name: At_Shoots__P Parameter: Age (day) Value: 7
  misc_feature: MA Experiment 20000184 PARAMETER Experiment Name: At_Shoots__P Parameter: Tissue Value: Shoots vs. Whole Plant
atggagatggtgcatgctgacgtggcgtctctctccataacaccttgcttcccgtcttctttgtcttcgtcctcacatcatcactataaccaacaacaacattgtatcatgtcggaagatcaacaccattcgatggatcagaccacttcatcggactacttctctttaaatatcgacaatgctcaacatctccgtagctactacacaagtcatagagaagaagacatgaaccctaatctaagtgattacagtaattgcaacaagaaagacacaacagtctatagaagctgtggacactcgtcaaaagcttcggtgtctagaggacattggagaccagctgaagatactaagctcaaagaactagtcgccgtctacggtccacaaaactggaacctcatagctgagaagctccaaggaagatccgggaaaagctgtaggcttcgatggtttaaccaactagacccaaggataaatagaagagccttcactgaggaagaagaagagaggctaatgcaagctcataggctttatggtaacaaatgggcgatgatagcgaggcttttccctggtaggactgataattctgtgaagaaccattggcatgttataatggctcgcaagtttagggaacaatcttcttcttaccgtaggaggaagacgatggtttctcttaagccactcattaaccctaatcctcacattttcaatgattttgaccctacccggttagctttgacccaccttgctagtagtgaccataagcagcttatgttaccagttccttgcttcccaggttatgatcatgaaaatgagagtccattaatggtggatatgttcgaaacccaaatgatggttggcgattacattgcatggacacaagaggcaactacattcgatttcttaaaccaaaccgggaagagtgagatatttgaaagaatcaatgaggagaagaaaccaccatttttcgattttcttgggttggggacggtgtga

SEQ ID NO: 90605 - protein, 330 aa, Arabidopsis thaliana
  peptide (1)..(330): Ceres Seq. ID no. 12724535
  misc_feature (107)..(153): Pfam Name: Myb-like DNA-binding domain Pfam Description: Myb-like DNA-binding domain
  misc_feature (1)..(330): Homolog of NCBI NO: 15222362 NR Description: MYB-family transcription factor, putative; id: At1g69560.1, supported by cDNA: gi_7644365 [Arabidopsis
  misc_feature (41)..(277): Homolog of NCBI NO: 18396049 NR Description: myb-related protein, putative; protein id: supported by cDNA: gi_13430157 [Arabidopsis thaliana]
  misc_feature (41)..(277): Homolog of NCBI NO: 25403271 NR Description: protein T24P13.16 [imported] - Arabidopsis >gi|9295726|gb|AAF87032.1|AC006535_10 T24P13.16 [Arabidopsis
  misc_feature (106)..(232): Homolog of NCBI NO: 34903242 NR Description: unnamed protein product [Oryza sativa (japonica group)] >gi|6539552|dbj|BAA88169.1| unnamed protein product
  misc_feature (39)..(218): Homolog of NCBI NO: 7939552 NR Description: MYB transcription factor-like protein
  misc_feature (106)..(328): Homolog of NCBI NO: 11358543 NR Description: myb-related transcription factor MYB54 [imported] Arabidopsis thaliana >gi|3941472|gb|AAC83612.1| putative
  misc_feature (106)..(328): Homolog of NCBI NO: 15219462 NR Description: myb family transcription factor(MYB54); protein
  misc_feature (76)..(218): Homolog of NCBI NO: 18406019 NR Description: expressed protein; protein id: At3g29020.1, by cDNA: gi_9864076 [Arabidopsis thaliana]
  misc_feature (87)..(219): Homolog of NCBI NO: 15238028 NR Description: MYB56 R2R3-MYB factor family member; protein id:
  misc_feature (106)..(219): Homolog of NCBI NO: 9759057 NR Description: Myb-like transcription factor-like protein
MEMVHADVASLSITPCFPSSLSSSSHHHYNQQQHCIMSEDQHHSMDQTTSSDYFSLNIDNAQHLRSYYTSHREEDMNPNLSDYSNCNKKDTTVYRSCGHSSKASVSRGHWRPAEDTKLKELVAVYGPQNWNLIAEKLQGRSGKSCRLRWFNQLDPRINRRAFTEEEEERLMQAHRLYGNKWAMIARLFPGRTDNSVKNHWHVIMARKFREQSSSYRRRKTMVSLKPLINPNPHIFNDFDPTRLALTHLASSDHKQLMLPVPCFPGYDHENESPLMVDMFETQMMVGDYIAWTQEATTFDFLNQTGKSEIFERINEEKKPPFFDFLGLGTV

SEQ ID NO: 90606 - protein, 328 aa, Arabidopsis thaliana
  peptide (1)..(328): Ceres Seq. ID no. 12724536
  misc_feature (105)..(151): Pfam Name: Myb-like DNA-binding domain Pfam Description: Myb-like DNA-binding domain
  misc_feature (1)..(328): Homolog of NCBI NO: 15222362 NR Description: MYB-family transcription factor, putative; id: At1g69560.1, supported by cDNA: gi_7644365 [Arabidopsis
  misc_feature (39)..(275): Homolog of NCBI NO: 18396049 NR Description: myb-related protein, putative; protein id: supported by cDNA: gi_13430157 [Arabidopsis thaliana]
  misc_feature (39)..(275): Homolog of NCBI NO: 25403271 NR Description: protein T24P13.16 [imported] - Arabidopsis >gi|9295726|gb|AAF87032.1|AC006535_10 T24P13.16 [Arabidopsis
  misc_feature (104)..(230): Homolog of NCBI NO: 34903242 NR Description: unnamed protein product [Oryza sativa (japonica group)] >gi|6539552|dbj|BAA88169.1| unnamed protein product
  misc_feature (37)..(216): Homolog of NCBI NO: 7939552 NR Description: MYB transcription factor-like protein
  misc_feature (104)..(326): Homolog of NCBI NO: 11358543 NR Description: myb-related transcription factor MYB54 [imported] Arabidopsis thaliana >gi|3941472|gb|AAC83612.1| putative
  misc_feature (104)..(326): Homolog of NCBI NO: 15219462 NR Description: myb family transcription factor(MYB54); protein
  misc_feature (74)..(216): Homolog of NCBI NO: 18406019 NR Description: expressed protein; protein id: At3g29020.1, by cDNA: gi_9864076 [Arabidopsis thaliana]
  misc_feature (85)..(217): Homolog of NCBI NO: 15238028 NR Description: MYB56 R2R3-MYB factor family member; protein id:
  misc_feature (104)..(217): Homolog of NCBI NO: 9759057 NR Description: Myb-like transcription factor-like protein
MVHADVASLSITPCFPSSLSSSSHHHYNQQQHCIMSEDQHHSMDQTTSSDYFSLNIDNAQHLRSYYTSHREEDMNPNLSDYSNCNKKDTTVYRSCGHSSKASVSRGHWRPAEDTKLKELVAVYGPQNWNLIAEKLQGRSGKSCRLRWFNQLDPRINRRAFTEEEEERLMQAHRLYGNKWAMIARLFPGRTDNSVKNHWHVIMARKFREQSSSYRRRKTMVSLKPLINPNPHIFNDFDPTRLALTHLASSDHKQLMLPVPCFPGYDHENESPLMVDMFETQMMVGDYIAWTQEATTFDFLNQTGKSEIFERINEEKKPPFFDFLGLGTV

SEQ ID NO: 90607 - protein, 294 aa, Arabidopsis thaliana
  peptide (1)..(294): Ceres Seq. ID no. 12724537
  misc_feature (71)..(117): Pfam Name: Myb-like DNA-binding domain Pfam Description: Myb-like DNA-binding domain
  misc_feature (1)..(294): Homolog of NCBI NO: 15222362 NR Description: MYB-family transcription factor, putative; id: At1g69560.1, supported by cDNA: gi_7644365 [Arabidopsis
  misc_feature (5)..(241): Homolog of NCBI NO: 18396049 NR Description: myb-related protein, putative; protein id: supported by cDNA: gi_13430157 [Arabidopsis thaliana]
  misc_feature (5)..(241): Homolog of NCBI NO: 25403271 NR Description: protein T24P13.16 [imported] - Arabidopsis >gi|9295726|gb|AAF87032.1|AC006535_10 T24P13.16 [Arabidopsis
  misc_feature (70)..(196): Homolog of NCBI NO: 34903242 NR Description: unnamed protein product [Oryza sativa (japonica group)] >gi|6539552|dbj|BAA88169.1| unnamed protein product
  misc_feature (3)..(182): Homolog of NCBI NO: 7939552 NR Description: MYB transcription factor-like protein
  misc_feature (70)..(292): Homolog of NCBI NO: 11358543 NR Description: myb-related transcription factor MYB54 [imported] Arabidopsis thaliana >gi|3941472|gb|AAC83612.1| putative
  misc_feature (70)..(292): Homolog of NCBI NO: 15219462 NR Description: myb family transcription factor(MYB54); protein
  misc_feature (40)..(182): Homolog of NCBI NO: 18406019 NR Description: expressed protein; protein id: At3g29020.1, by cDNA: gi_9864076 [Arabidopsis thaliana]
  misc_feature (51)..(183): Homolog of NCBI NO: 15238028 NR Description: MYB56 R2R3-MYB factor family member; protein id:
  misc_feature (70)..(183): Homolog of NCBI NO: 9759057 NR Description: Myb-like transcription factor-like protein
MSEDQHHSMDQTTSSDYFSLNIDNAQHLRSYYTSHREEDMNPNLSDYSNCNKKDTTVYRSCGHSSKASVSRGHWRPAEDTKLKELVAVYGPQNWNLIAEKLQGRSGKSCRLRWFNQLDPRINRRAFTEEEEERLMQAHRLYGNKWAMIARLFPGRTDNSVKNHWHVIMARKFREQSSSYRRRKTMVSLKPLINPNPHIFNDFDPTRLALTHLASSDHKQLMLPVPCFPGYDHENESPLMVDMFETQMMVGDYIAWTQEATTFDFLNQTGKSEIFERINEEKKPPFFDFLGLGTV

SEQ ID NO: 90608 - DNA, 729 bp, Arabidopsis thaliana
  misc_feature (1)..(729): Ceres Seq. ID no. 12724541
  misc_feature: MA Experiment ID: 20000180 Result: Down-regulated in Transcription
  misc_feature: MA Experiment 20000180 PARAMETER Experiment Name: At_Germinating_Seeds_P Parameter: Age (hr) Value: 24 vs. 0
  misc_feature: MA Experiment 20000180 PARAMETER Experiment Name: At_Germinating_Seeds_P Parameter: Tissue Value: Germinating Seeds
  misc_feature: MA Experiment ID: 20000185 Result: Up-regulated in Transcription
  misc_feature: MA Experiment 20000185 PARAMETER Experiment Name: At_Roots__P Parameter: Age (day) Value: 7 vs. 21
  misc_feature: MA Experiment 20000185 PARAMETER Experiment Name: At_Roots__P Parameter: Organism Value: A. thaliana
  misc_feature: MA Experiment 20000185 PARAMETER Experiment Name: At_Roots__P Parameter: Tissue Value: Roots vs. Whole Plant
  misc_feature: MA Experiment ID: 20000264 Result: Up-regulated in Transcription
  misc_feature: MA Experiment 20000264 PARAMETER Experiment Name: At_Open_Flower_P Parameter: Age (day) Value: 21
  misc_feature: MA Experiment 20000264 PARAMETER Experiment Name: At_Open_Flower_P Parameter: Plant Line Value: WS
  misc_feature: MA Experiment 20000264 PARAMETER Experiment Name: At_Open_Flower_P Parameter: Tissue Value: Open Flower vs. Whole Plant
  misc_feature: MA Experiment ID: 20000265 Result: Up-regulated in Transcription
  misc_feature: MA Experiment 20000265 PARAMETER Experiment Name: At_Open_Flower_P Parameter: Age (day) Value: 21
  misc_feature: MA Experiment 20000265 PARAMETER Experiment Name: At_Open_Flower_P Parameter: Plant Line Value: WS
  misc_feature: MA Experiment 20000265 PARAMETER Experiment Name: At_Open_Flower_P Parameter: Tissue Value: Closed Flower vs. Whole Plant
  misc_feature: MA Experiment ID: 20000286 Result: Up-regulated in Transcription
  misc_feature: MA Experiment 20000286 PARAMETER Experiment Name: At_Open_Flower_P Parameter: Age (day) Value: 21
  misc_feature: MA Experiment 20000286 PARAMETER Experiment Name: At_Open_Flower_P Parameter: Plant Line Value: WS
  misc_feature: MA Experiment 20000286 PARAMETER Experiment Name: At_Open_Flower_P Parameter: Tissue Value: Half Open vs. Whole Plant
  misc_feature: MA Experiment ID: 20000437 Result: Up-regulated in Transcription
  misc_feature: MA Experiment 20000437 PARAMETER Experiment Name: At_Drought_P Parameter: Age (day) Value: 8
  misc_feature: MA Experiment 20000437 PARAMETER Experiment Name: At_Drought_P Parameter: Organism Value: A. thaliana
  misc_feature: MA Experiment 20000437 PARAMETER Experiment Name: At_Drought_P Parameter: Plant Line Value: WS
  misc_feature: MA Experiment 20000437 PARAMETER Experiment Name: At_Drought_P Parameter: Timepoint (hr) Value: 24
  misc_feature: MA Experiment 20000437 PARAMETER Experiment Name: At_Drought_P Parameter: Tissue Value: Whole Plant
  misc_feature: MA Experiment 20000437 PARAMETER Experiment Name: At_Drought_P Parameter: Treatment Value: Drought vs. No Drought
  misc_feature: MA Experiment ID: 20000439 Result: Up-regulated in Transcription
  misc_feature: MA Experiment 20000439 PARAMETER Experiment Name: At_Roots__P Parameter: Age (day) Value: 14 vs. 21
  misc_feature: MA Experiment 20000439 PARAMETER Experiment Name: At_Roots__P Parameter: Organism Value: A. thaliana
  misc_feature: MA Experiment 20000439 PARAMETER Experiment Name: At_Roots__P Parameter: Tissue Value: Roots vs. Whole Plant
  misc_feature: MA Experiment ID: 20000574 Result: Up-regulated in Transcription
  misc_feature: MA Experiment 20000574 PARAMETER Experiment Name: At_100uM_ABA_Mutants__P Parameter: Organism Value: A. thaliana
  misc_feature: MA Experiment 20000574 PARAMETER Experiment Name: At_100uM_ABA_Mutants__P Parameter: Plant Line Value: CS23 vs. Ler wt
  misc_feature: MA Experiment 20000574 PARAMETER Experiment Name: At_100uM_ABA_Mutants__P Parameter: Timepoint (hr) Value: N/A
  misc_feature: MA Experiment 20000574 PARAMETER Experiment Name: At_100uM_ABA_Mutants__P Parameter: Tissue Value: Whole Plant
  misc_feature: MA Experiment 20000574 PARAMETER Experiment Name: At_100uM_ABA_Mutants__P Parameter: Treatment Value: None
  misc_feature: MA Experiment ID: 20000794 Result: Up-regulated in Transcription
  misc_feature: MA Experiment 20000794 PARAMETER Experiment Name: At_Petals_P Parameter: Age (day) Value: 23-25 days
  misc_feature: MA Experiment 20000794 PARAMETER Experiment Name: At_Petals_P Parameter: Plant Line Value: WS
  misc_feature: MA Experiment 20000794 PARAMETER Experiment Name: At_Petals_P Parameter: Tissue Value: Petals vs. Whole plant
atggatttgtcttccaaaccacaacaacaacttctaaactctcttcccatcgccggagaactaactgtcaccggagaaatgggtgtttgttacaaagagtgtttgaaaaaccacgcggctaatctcggcggccatgctctcgacggttgcggcgagtttatgccgagtcccacggctacttccaccgatccttcttctctccgttgcgctgcttgtggctgccaccgtaacttccaccgccgtgacccttccgagaatctcaacttcctcaccgcgcctccgatttcttctccctccggcactgagtcgccgccgtctcgtcacgtgtcttctcctgttccttgctcttactacacctcagctcctccacatcacgtgattctctctctcagctccggtttccctggaccgtcagatcaagatccaacggtggttaggtcagagaacagttcaagaggagcaatgaggaaacgaacaagaaccaaattcacgccggagcagaagatcaagatgagagccttcgcagagaaagctggttggaaaatcaacggatgtgatgaaaagtcggtgagagagttttgtaacgaagttgggattgagagaggagttcttaaagtgtggatgcataacaacaagtactcacttctcaatggcaagatcagagagatcgaacatggcctgtgtctgaacactcacagcaatgatggtgatgggtcttcatcttcttga

SEQ ID NO: 90609 - protein, 242 aa, Arabidopsis thaliana
  peptide (1)..(242): Ceres Seq. ID no. 12724542
  misc_feature (26)..(87): Pfam Name: ZF-HD protein dimerisation region Pfam Description: ZF-HD protein dimerisation region
  misc_feature (1)..(242): Homolog of NCBI NO: 15222382 NR Description: hypothetical protein; protein id: At1g69600.1
  misc_feature (97)..(236): Homolog of NCBI NO: 13277220 NR Description: ZF-HD homeobox protein [Flaveria bidentis]
  misc_feature (29)..(114): Homolog of NCBI NO: 13277220 NR Description: ZF-HD homeobox protein [Flaveria bidentis]
  misc_feature (1)..(230): Homolog of NCBI NO: 9757750 NR Description: gb|AAF24606.1~gene_id:MUF9.11~similar to unknown
  misc_feature (27)..(230): Homolog of NCBI NO: 15239341 NR Description: putative protein; protein id: At5g60480.1
  misc_feature (29)..(214): Homolog of NCBI NO: 15228530 NR Description: unknown protein; protein id: At3g28920.1, by cDNA: gi_20260543 [Arabidopsis thaliana] contains similarity to unknown
  misc_feature (28)..(215): Homolog of NCBI NO: 13277218 NR Description: ZF-HD homeobox protein [Flaveria bidentis]
  misc_feature (29)..(212): Homolog of NCBI NO: 13277216 NR Description: ZF-HD homeobox protein [Flaveria trinervia]
  misc_feature (31)..(221): Homolog of NCBI NO: 15242243 NR Description: putative protein; protein id: At5g15210.1
  misc_feature (31)..(215): Homolog of NCBI NO: 15238445 NR Description: hypothetical protein common family; protein id: [Arabidopsis thaliana] >gi|9759621|dbj|BAB11563.1| contains to unknown protein~gene_id:MNA5.14~pir||T05568 [Arabidopsis
MDLSSKPQQQLLNSLPIAGELTVTGEMGVCYKECLKNHAANLGGHALDGCGEFMPSPTATSTDPSSLRCAACGCHRNFHRRDPSENLNFLTAPPISSPSGTESPPSRHVSSPVPCSYYTSAPPHHVILSLSSGFPGPSDQDPTVVRSENSSRGAMRKRTRTKFTPEQKIKMRAFAEKAGWKINGCDEKSVREFCNEVGIERGVLKVWMHNNKYSLLNGKIREIEHGLCLNTHSNDGDGSSSS

SEQ ID NO: 90610 - protein, 216 aa, Arabidopsis thaliana
  peptide (1)..(216): Ceres Seq. ID no. 12724543
  misc_feature (1)..(61): Pfam Name: ZF-HD protein dimerisation region Pfam Description: ZF-HD protein dimerisation region
  misc_feature (1)..(216): Homolog of NCBI NO: 15222382 NR Description: hypothetical protein; protein id: At1g69600.1
  misc_feature (71)..(210): Homolog of NCBI NO: 13277220 NR Description: ZF-HD homeobox protein [Flaveria bidentis]
  misc_feature (3)..(88): Homolog of NCBI NO: 13277220 NR Description: ZF-HD homeobox protein [Flaveria bidentis]
  misc_feature (1)..(204): Homolog of NCBI NO: 9757750 NR Description: gb|AAF24606.1~gene_id:MUF9.11~similar to unknown
  misc_feature (1)..(204): Homolog of NCBI NO: 15239341 NR Description: putative protein; protein id: At5g60480.1
  misc_feature (3)..(188): Homolog of NCBI NO: 15228530 NR Description: unknown protein; protein id: At3g28920.1, by cDNA: gi_20260543 [Arabidopsis thaliana] contains similarity to unknown
  misc_feature (2)..(189): Homolog of NCBI NO: 13277218 NR Description: ZF-HD homeobox protein [Flaveria bidentis]
  misc_feature (3)..(186): Homolog of NCBI NO: 13277216 NR Description: ZF-HD homeobox protein [Flaveria trinervia]
  misc_feature (5)..(195): Homolog of NCBI NO: 15242243 NR Description: putative protein; protein id: At5g15210.1
  misc_feature (5)..(189): Homolog of NCBI NO: 15238445 NR Description: hypothetical protein common family; protein id: [Arabidopsis thaliana] >gi|9759621|dbj|BAB11563.1| contains to unknown protein~gene_id:MNA5.14~pir||T05568 [Arabidopsis
MGVCYKECLKNHAANLGGHALDGCGEFMPSPTATSTDPSSLRCAACGCHRNFHRRDPSENLNFLTAPPISSPSGTESPPSRHVSSPVPCSYYTSAPPHHVILSLSSGFPGPSDQDPTVVRSENSSRGAMRKRTRTKFTPEQKIKMRAFAEKAGWKINGCDEKSVREFCNEVGIERGVLKVWMHNNKYSLLNGKIREIEHGLCLNTHSNDGDGSSSS

SEQ ID NO: 90611 - protein, 189 aa, Arabidopsis thaliana
  peptide (1)..(189): Ceres Seq. ID no. 12724544
  misc_feature (1)..(189): Homolog of NCBI NO: 15222382 NR Description: hypothetical protein; protein id: At1g69600.1
  misc_feature (44)..(183): Homolog of NCBI NO: 13277220 NR Description: ZF-HD homeobox protein [Flaveria bidentis]
  misc_feature (1)..(61): Homolog of NCBI NO: 13277220 NR Description: ZF-HD homeobox protein [Flaveria bidentis]
  misc_feature (1)..(177): Homolog of NCBI NO: 9757750 NR Description: gb|AAF24606.1~gene_id:MUF9.11~similar to unknown
  misc_feature (1)..(177): Homolog of NCBI NO: 15239341 NR Description: putative protein; protein id: At5g60480.1
  misc_feature (1)..(161): Homolog of NCBI NO: 15228530 NR Description: unknown protein; protein id: At3g28920.1, by cDNA: gi_20260543 [Arabidopsis thaliana] contains similarity to unknown
  misc_feature (1)..(162): Homolog of NCBI NO: 13277218 NR Description: ZF-HD homeobox protein [Flaveria bidentis]
  misc_feature (1)..(159): Homolog of NCBI NO: 13277216 NR Description: ZF-HD homeobox protein [Flaveria trinervia]
  misc_feature (1)..(168): Homolog of NCBI NO: 15242243 NR Description: putative protein; protein id: At5g15210.1
  misc_feature (1)..(162): Homolog of NCBI NO: 15238445 NR Description: hypothetical protein common family; protein id: [Arabidopsis thaliana] >gi|9759621|dbj|BAB11563.1| contains to unknown protein~gene_id:MNA5.14~pir||T05568 [Arabidopsis
MPSPTATSTDPSSLRCAACGCHRNFHRRDPSENLNFLTAPPISSPSGTESPPSRHVSSPVPCSYYTSAPPHHVILSLSSGFPGPSDQDPTVVRSENSSRGAMRKRTRTKFTPEQKIKMRAFAEKAGWKINGCDEKSVREFCNEVGIERGVLKVWMHNNKYSLLNGKIREIEHGLCLNTHSNDGDGSSSS

SEQ ID NO: 90612 - DNA, 2379 bp, Arabidopsis thaliana
  misc_feature (1)..(2379): Ceres Seq. ID no. 12724555
  misc_feature: MA Experiment ID: 20000185 Result: Down-regulated in Transcription
  misc_feature: MA Experiment 20000185 PARAMETER Experiment Name: At_Roots__P Parameter: Age (day) Value: 7 vs. 21
  misc_feature: MA Experiment 20000185 PARAMETER Experiment Name: At_Roots__P Parameter: Organism Value: A. thaliana
  misc_feature: MA Experiment 20000185 PARAMETER Experiment Name: At_Roots__P Parameter: Tissue Value: Roots vs. Whole Plant
  misc_feature: MA Experiment ID: 20000439 Result: Down-regulated in Transcription
  misc_feature: MA Experiment 20000439 PARAMETER Experiment Name: At_Roots__P Parameter: Age (day) Value: 14 vs. 21
  misc_feature: MA Experiment 20000439 PARAMETER Experiment Name: At_Roots__P Parameter: Organism Value: A. thaliana
  misc_feature: MA Experiment 20000439 PARAMETER Experiment Name: At_Roots__P Parameter: Tissue Value: Roots vs. Whole Plant
  misc_feature: MA Experiment ID: 20000441 Result: Up-regulated in Transcription
  misc_feature: MA Experiment 20000441 PARAMETER Experiment Name: At_1uM_BR-BRZ__P Parameter: Tissue Value: Shoot Apices
  misc_feature: MA Experiment 20000441 PARAMETER Experiment Name: At_1uM_BR-BRZ__P Parameter: Treatment Value: 1uM BR vs. No Treatment
  misc_feature: MA Experiment ID: 20000443 Result: Up-regulated in Transcription
  misc_feature: MA Experiment 20000443 PARAMETER Experiment Name: At_1uM_BR-BRZ__P Parameter: Tissue Value: Shoot Apices
  misc_feature: MA Experiment 20000443 PARAMETER Experiment Name: At_1uM_BR-BRZ__P Parameter: Treatment Value: 1uM BRZ vs. No Treatment
  misc_feature: MA Experiment ID: 20000460 Result: Down-regulated in Transcription
  misc_feature: MA Experiment 20000460 PARAMETER Experiment Name: At_10percent_PEG_P Parameter: Age (day) Value: 12
  misc_feature: MA Experiment 20000460 PARAMETER Experiment Name: At_10percent_PEG_P Parameter: Organism Value: A. thaliana
  misc_feature: MA Experiment 20000460 PARAMETER Experiment Name: At_10percent_PEG_P Parameter: Plant Line Value: WS
  misc_feature: MA Experiment 20000460 PARAMETER Experiment Name: At_10percent_PEG_P Parameter: Timepoint (day) Value: 12
  misc_feature: MA Experiment 20000460 PARAMETER Experiment Name: At_10percent_PEG_P Parameter: Tissue Value: Whole Plant
  misc_feature: MA Experiment 20000460 PARAMETER Experiment Name: At_10percent_PEG_P Parameter: Treatment Value: 10percent PEG vs. No Treatment
  misc_feature: MA Experiment ID: 20000527 Result: Down-regulated in Transcription
  misc_feature: MA Experiment 20000527 PARAMETER Experiment Name: At_10percent_PEG_P Parameter: Age (day) Value: 20
  misc_feature: MA Experiment 20000527 PARAMETER Experiment Name: At_10percent_PEG_P Parameter: Organism Value: A. thaliana
  misc_feature: MA Experiment 20000527 PARAMETER Experiment Name: At_10percent_PEG_P Parameter: Plant Line Value: WS
  misc_feature: MA Experiment 20000527 PARAMETER Experiment Name: At_10percent_PEG_P Parameter: Timepoint (day) Value: 20
  misc_feature: MA Experiment 20000527 PARAMETER Experiment Name: At_10percent_PEG_P Parameter: Tissue Value: Whole Plant
  misc_feature: MA Experiment 20000527 PARAMETER Experiment Name: At_10percent_PEG_P Parameter: Treatment Value: 10percent PEG vs. No Treatment
  misc_feature: MA Experiment ID: 20000573 Result: Down-regulated in Transcription
  misc_feature: MA Experiment 20000573 PARAMETER Experiment Name: At_100uM_ABA_Mutants__P Parameter: Organism Value: A. thaliana
  misc_feature: MA Experiment 20000573 PARAMETER Experiment Name: At_100uM_ABA_Mutants__P Parameter: Plant Line Value: CS22 vs. Ler wt
  misc_feature: MA Experiment 20000573 PARAMETER Experiment Name: At_100uM_ABA_Mutants__P Parameter: Timepoint (hr) Value: N/A
  misc_feature: MA Experiment 20000573 PARAMETER Experiment Name: At_100uM_ABA_Mutants__P Parameter: Tissue Value: Whole Plant
  misc_feature: MA Experiment 20000573 PARAMETER Experiment Name: At_100uM_ABA_Mutants__P Parameter: Treatment Value: None
  misc_feature: MA Experiment ID: 20000794 Result: Down-regulated in Transcription
  misc_feature: MA Experiment 20000794 PARAMETER Experiment Name: At_Petals_P Parameter: Age (day) Value: 23-25 days
  misc_feature: MA Experiment 20000794 PARAMETER Experiment Name: At_Petals_P Parameter: Plant Line Value: WS
  misc_feature: MA Experiment 20000794 PARAMETER Experiment Name: At_Petals_P Parameter: Tissue Value: Petals vs. Whole plant
  misc_feature: MA Experiment ID: 20001248 Result: Down-regulated in Transcription
  misc_feature: MA Experiment 20001248 PARAMETER Experiment Name: At_Far-red-induction_P Parameter: Age (day) Value: 7
  misc_feature: MA Experiment 20001248 PARAMETER Experiment Name: At_Far-red-induction_P Parameter: Light Value: Far-red vs. White
  misc_feature: MA Experiment 20001248 PARAMETER Experiment Name: At_Far-red-induction_P Parameter: Organism Value: A. thaliana
  misc_feature: MA Experiment 20001248 PARAMETER Experiment Name: At_Far-red-induction_P Parameter: Plant Line Value: Columbia
  misc_feature: MA Experiment 20001248 PARAMETER Experiment Name: At_Far-red-induction_P Parameter: Timepoint (hr) Value: 4
  misc_feature: MA Experiment 20001248 PARAMETER Experiment Name: At_Far-red-induction_P Parameter: Tissue Value: Whole Plant
  misc_feature: MA Experiment ID: 20001556 Result: Down-regulated in Transcription
  misc_feature: MA Experiment 20001556 PARAMETER Experiment Name: At_Drought_Soil_Dry_P Parameter: Age (day) Value: 26
  misc_feature: MA Experiment 20001556 PARAMETER Experiment Name: At_Drought_Soil_Dry_P Parameter: Organism Value: A. thaliana
  misc_feature: MA Experiment 20001556 PARAMETER Experiment Name: At_Drought_Soil_Dry_P Parameter: Plant Line Value: WS
  misc_feature: MA Experiment 20001556 PARAMETER Experiment Name: At_Drought_Soil_Dry_P Parameter: Post Timepoint (hr) Value: None
  misc_feature: MA Experiment 20001556 PARAMETER Experiment Name: At_Drought_Soil_Dry_P Parameter: Post-Treatment Value: None
  misc_feature: MA Experiment 20001556 PARAMETER Experiment Name: At_Drought_Soil_Dry_P Parameter: Timepoint (day) Value: 12
  misc_feature: MA Experiment 20001556 PARAMETER Experiment Name: At_Drought_Soil_Dry_P Parameter: Treatment Value: Drought vs. No Drought
  misc_feature: MA Experiment ID: 20001559 Result: Down-regulated in Transcription
  misc_feature: MA Experiment 20001559 PARAMETER Experiment Name: At_Drought_Soil_Dry_P Parameter: Age (day) Value: 28
  misc_feature: MA Experiment 20001559 PARAMETER Experiment Name: At_Drought_Soil_Dry_P Parameter: Organism Value: A. thaliana
  misc_feature: MA Experiment 20001559 PARAMETER Experiment Name: At_Drought_Soil_Dry_P Parameter: Plant Line Value: WS
  misc_feature: MA Experiment 20001559 PARAMETER Experiment Name: At_Drought_Soil_Dry_P Parameter: Post Timepoint (hr) Value: 29
  misc_feature: MA Experiment 20001559 PARAMETER Experiment Name: At_Drought_Soil_Dry_P Parameter: Post-Treatment Value: Re-Water vs. No Drought
  misc_feature: MA Experiment 20001559 PARAMETER Experiment Name: At_Drought_Soil_Dry_P Parameter: Timepoint (day) Value: 14
  misc_feature: MA Experiment 20001559 PARAMETER Experiment Name: At_Drought_Soil_Dry_P Parameter: Treatment Value: Drought vs. No Drought
  misc_feature: MA Experiment ID: 20001904 Result: Down-regulated in Transcription
  misc_feature: MA Experiment 20001904 PARAMETER Experiment Name: At_Drought_Reproduction_P Parameter: Age (day) Value: 37
  misc_feature: MA Experiment 20001904 PARAMETER Experiment Name: At_Drought_Reproduction_P Parameter: Organism Value: A. thaliana
  misc_feature: MA Experiment 20001904 PARAMETER Experiment Name: At_Drought_Reproduction_P Parameter: Plant Line Value: WS
  misc_feature: MA Experiment 20001904 PARAMETER Experiment Name: At_Drought_Reproduction_P Parameter: Timepoint (day) Value: 7
  misc_feature: MA Experiment 20001904 PARAMETER Experiment Name: At_Drought_Reproduction_P Parameter: Tissue Value: Rosettes
  misc_feature: MA Experiment 20001904 PARAMETER Experiment Name: At_Drought_Reproduction_P Parameter: Treatment Value: Drought vs. No Drought
atgagttcttataatagtttttctctttggattctcttctctttgcaactctgttttattctagattctgcggatcgcacagtttccttatgtcaacccgactgtggaggaatcaagatcccgtacccctttggaatgggaaagggttgttatctggagaagtggtacgaaattacttgtaatacctctacttctggaaagctcgtcccttatctttccgtgatcaacaaggaagttgtgggtatctctcttccgactgaaggcaggggttctagatataacaatccataccagtccgttaacattaaaaacccaatagcctcaaaggagtgctcaagcaatggagaagagcttggatcacttttgaatttgacgggtacccctttttatgttagccagcacaatgaactggtagcggttggttgcaacaacacggcatcgctgacaaatgtgaagccaagcatagtgcaatgcacatcaagctgcagcacaaaaccccatacgcatatcaaagattatcttgcagtactaaattgtcagaattacaatggctacgagaagaattgtaatgaggacagcagtatggatgaaagcattatggatgaaacaagctgcaatggtattggatgctgcaatgcatacatgcgcggcggtagtattcaacagattgttggtgtcacaatagaaaacaccataacgagagggtgcaaagttgccttcttgacaaacaaggcagaatatttgtctaataaatctgatccgcaaaagcttcatgctagaggatacagtacggtcgagctaggatggtttatccatacgacgaatcattcgtttataaagtctctgggatgctatagtgtaaaagagtacaacaatgaaagatacactagtacccagagaagaattaacataacaagttgtatatgcgatgacaatgcttatctaagctatgcaagatgctcatgcactaggggtttccaaggcaacccataccgtttaggcggatgcaaagatatcaatgaatgtaaagaagaagagggcatgacttactgtgggaccaacaaatgtgtcaatttgcaaggacactttaaatgtgtgtacaacaatcatcggccacttgctatagggcttggtgctagttttggctcattgatctttgttgttggaatatacttgttatacaaatttattaaaaagcaaaggaagttaaaccaaaagaagaagttcttcaagcgtaatggtggtctattgttgcaacaacaattgatttcaacagtaggcatggtcgaaaagacaatagtgttcagttcgcgagagttggagaaagctactgaaaacttcagttcaaacagaatacttggccagggtggtcaaggtacagtgtacaagggaatgcttgtcgatggaagaatcgttgcagtaaaaaagtccaaagtcgtggacgaagacaagctagaagagttcatcaatgaggttgtcattctttcacagatcaaccacaggaacatcgtgaaactcttgggatgttgccttgagacaaaagtccctgttctcgtctacgagtttattcctaatggtaaccttttcgaacatcttcatgatgagtttgatgaaaacattatggctacttggaatatacgtctccgcattgctatagatattgcaggagctctctcatacttgcactcgtctgcatcgtctccaatctatcacagagacgtcaagtctacaaacataatgttggatgagaaatatcgagccaaggtgtctgattttggaacgtcaagaacggtgacagtggatcatacccacttgacaacggtagtttcaggtacggtgggatatatggatccagagtactttcagtctagccaattcacagacaaaagtgatgtctatagcttcggggtcgtgctagtggagctaataactggagaaaagtcgatttctttcttgaggtctcaagaaaacaggacattggcaacttatttcattcttgcaatgaaagaaaacaaactcttcgatattatcgatgctcgaataagagatggttgcatgttgagtcaagtgactgcaacggcaaaagttgcaaggaagtgtctcaatctgaaagggagaaaacgaccaagcatgagagaagtgtcgatggagcttgatagtattcgtatgccttgtggagatatgcaactgcaagaatgtgttagcgaaaacgaggaaggggaagaacaaaacaaaggacttgtggaagatatcatgagggcagaatcaaggagcaaagagtttgttaccgctccagcttctcactacaataatattgctgctgcctcatcttcttcgtggtcagatgttgaaccattgtttcctcttcaaacacggtaa

SEQ ID NO: 90613 - protein, 792 aa, Arabidopsis thaliana
  peptide (1)..(792): Ceres Seq. ID no. 12724556
  misc_feature (447)..(714): Pfam Name: Protein kinase domain Pfam Description: Protein kinase domain
  misc_feature (1)..(788): Homolog of NCBI NO: 15219447 NR Description: WAK-like kinase (WLK); protein id: At1g79680.1,
  misc_feature (1)..(778): Homolog of NCBI NO: 25405037 NR Description: protein F20B17.10 [imported] - Arabidopsis >gi|7715604|gb|AAF68122.1|AC010793_17 F20B17.10 [Arabidopsis
  misc_feature (5)..(791): Homolog of NCBI NO: 15223546 NR Description: WAK-like kinase (WLK); protein id: At1g19390.1
  misc_feature (5)..(771): Homolog of NCBI NO: 25287654 NR Description: protein F18O14.11 [imported] - Arabidopsis >gi|8778443|gb|AAF79451.1|AC025808_33 F18O14.11 [Arabidopsis
  misc_feature (11)..(791): Homolog of NCBI NO: 22329045 NR Description: WAK-like kinase (WLK); protein id: At4g31100.1
  misc_feature (13)..(746): Homolog of NCBI NO: 15220882 NR Description: WAK-like kinase (WLK); protein id: At1g17910.1
  misc_feature (376)..(791): Homolog of NCBI NO: 7486495 NR Description: hypothetical protein F6E21.30 - Arabidopsis >gi|7270013|emb|CAB79829.1| putative protein [Arabidopsis
  misc_feature (376)..(791): Homolog of NCBI NO: 30688910 NR Description: WAK-like kinase (WLK) [Arabidopsis thaliana]
  misc_feature (12)..(337): Homolog of NCBI NO: 7486495 NR Description: hypothetical protein F6E21.30 - Arabidopsis >gi|7270013|emb|CAB79829.1| putative protein [Arabidopsis
  misc_feature (12)..(337): Homolog of NCBI NO: 30688910 NR Description: WAK-like kinase (WLK) [Arabidopsis thaliana]
MSSYNSFSLWILFSLQLCFILDSADRTVSLCQPDCGGIKIPYPFGMGKGCYLEKWYEITCNTSTSGKLVPYLSVINKEVVGISLPTEGRGSRYNNPYQSVNIKNPIASKECSSNGEELGSLLNLTGTPFYVSQHNELVAVGCNNTASLTNVKPSIVQCTSSCSTKPHTHIKDYLAVLNCQNYNGYEKNCNEDSSMDESIMDETSCNGIGCCNAYMRGGSIQQIVGVTIENTITRGCKVAFLTNKAEYLSNKSDPQKLHARGYSTVELGWFIHTTNHSFIKSLGCYSVKEYNNERYTSTQRRINITSCICDDNAYLSYARCSCTRGFQGNPYRLGGCKDINECKEEEGMTYCGTNKCVNLQGHFKCVYNNHRPLAIGLGASFGSLIFVVGIYLLYKFIKKQRKLNQKKKFFKRNGGLLLQQQLISTVGMVEKTIVFSSRELEKATENFSSNRILGQGGQGTVYKGMLVDGRIVAVKKSKVVDEDKLEEFINEVVILSQINHRNIVKLLGCCLETKVPVLVYEFIPNGNLFEHLHDEFDENIMATWNIRLRIAIDIAGALSYLHSSASSPIYHRDVKSTNIMLDEKYRAKVSDFGTSRTVTVDHTHLTTVVSGTVGYMDPEYFQSSQFTDKSDVYSFGVVLVELITGEKSISFLRSQENRTLATYFILAMKENKLFDIIDARIRDGCMLSQVTATAKVARKCLNLKGRKRPSMREVSMELDSIRMPCGDMQLQECVSENEEGEEQNKGLVEDIMRAESRSKEFVTAPASHYNNIAAASSSSWSDVEPLFPLQTR

SEQ ID NO: 90614 - protein, 747 aa, Arabidopsis thaliana
  peptide (1)..(747): Ceres Seq. ID no. 12724557
  misc_feature (402)..(669): Pfam Name: Protein kinase domain Pfam Description: Protein kinase domain
  misc_feature (1)..(743): Homolog of NCBI NO: 15219447 NR Description: WAK-like kinase (WLK); protein id: At1g79680.1,
  misc_feature (1)..(733): Homolog of NCBI NO: 25405037 NR Description: protein F20B17.10 [imported] - Arabidopsis >gi|7715604|gb|AAF68122.1|AC010793_17 F20B17.10 [Arabidopsis
  misc_feature (1)..(746): Homolog of NCBI NO: 15223546 NR Description: WAK-like kinase (WLK); protein id: At1g19390.1
  misc_feature (1)..(726): Homolog of NCBI NO: 25287654 NR Description: protein F18O14.11 [imported] - Arabidopsis >gi|8778443|gb|AAF79451.1|AC025808_33 F18O14.11 [Arabidopsis
  misc_feature (1)..(746): Homolog of NCBI NO: 22329045 NR Description: WAK-like kinase (WLK); protein id: At4g31100.1
  misc_feature (1)..(701): Homolog of NCBI NO: 15220882 NR Description: WAK-like kinase (WLK); protein id: At1g17910.1
  misc_feature (331)..(746): Homolog of NCBI NO: 7486495 NR Description: hypothetical protein F6E21.30 - Arabidopsis >gi|7270013|emb|CAB79829.1| putative protein [Arabidopsis
  misc_feature (331)..(746): Homolog of NCBI NO: 30688910 NR Description: WAK-like kinase (WLK) [Arabidopsis thaliana]
  misc_feature (1)..(292): Homolog of NCBI NO: 7486495 NR Description: hypothetical protein F6E21.30 - Arabidopsis >gi|7270013|emb|CAB79829.1| putative protein [Arabidopsis
  misc_feature (1)..(292): Homolog of NCBI NO: 30688910 NR Description: WAK-like kinase (WLK) [Arabidopsis thaliana]
MGKGCYLEKWYEITCNTSTSGKLVPYLSVINKEVVGISLPTEGRGSRYNNPYQSVNIKNPIASKECSSNGEELGSLLNLTGTPFYVSQHNELVAVGCNNTASLTNVKPSIVQCTSSCSTKPHTHIKDYLAVLNCQNYNGYEKNCNEDSSMDESIMDETSCNGIGCCNAYMRGGSIQQIVGVTIENTITRGCKVAFLTNKAEYLSNKSDPQKLHARGYSTVELGWFIHTTNHSFIKSLGCYSVKEYNNERYTSTQRRINITSCICDDNAYLSYARCSCTRGFQGNPYRLGGCKDINECKEEEGMTYCGTNKCVNLQGHFKCVYNNHRPLAIGLGASFGSLIFVVGIYLLYKFIKKQRKLNQKKKFFKRNGGLLLQQQLISTVGMVEKTIVFSSRELEKATENFSSNRILGQGGQGTVYKGMLVDGRIVAVKKSKVVDEDKLEEFINEVVILSQINHRNIVKLLGCCLETKVPVLVYEFIPNGNLFEHLHDEFDENIMATWNIRLRIAIDIAGALSYLHSSASSPIYHRDVKSTNIMLDEKYRAKVSDFGTSRTVTVDHTHLTTVVSGTVGYMDPEYFQSSQFTDKSDVYSFGVVLVELITGEKSISFLRSQENRTLATYFILAMKENKLFDIIDARIRDGCMLSQVTATAKVARKCLNLKGRKRPSMREVSMELDSIRMPCGDMQLQECVSENEEGEEQNKGLVEDIMRAESRSKEFVTAPASHYNNIAAASSSSWSDVEPLFPLQTR

SEQ ID NO: 90615 - protein, 598 aa, Arabidopsis thaliana
  peptide (1)..(598): Ceres Seq. ID no. 12724558
  misc_feature (253)..(520): Pfam Name: Protein kinase domain Pfam Description: Protein kinase domain
  misc_feature (1)..(594): Homolog of NCBI NO: 15219447 NR Description: WAK-like kinase (WLK); protein id: At1g79680.1,
  misc_feature (1)..(584): Homolog of NCBI NO: 25405037 NR Description: protein F20B17.10 [imported] - Arabidopsis >gi|7715604|gb|AAF68122.1|AC010793_17 F20B17.10 [Arabidopsis
  misc_feature (1)..(597): Homolog of NCBI NO: 15223546 NR Description: WAK-like kinase (WLK); protein id: At1g19390.1
  misc_feature (1)..(577): Homolog of NCBI NO: 25287654 NR Description: protein F18O14.11 [imported] - Arabidopsis >gi|8778443|gb|AAF79451.1|AC025808_33 F18O14.11 [Arabidopsis
  misc_feature (1)..(597): Homolog of NCBI NO: 22329045 NR Description: WAK-like kinase (WLK); protein id: At4g31100.1
  misc_feature (1)..(552): Homolog of NCBI NO: 15220882 NR Description: WAK-like kinase (WLK); protein id: At1g17910.1
  misc_feature (182)..(597): Homolog of NCBI NO: 7486495 NR Description: hypothetical protein F6E21.30 - Arabidopsis >gi|7270013|emb|CAB79829.1| putative protein [Arabidopsis
  misc_feature (182)..(597): Homolog of NCBI NO: 30688910 NR Description: WAK-like kinase (WLK) [Arabidopsis thaliana]
  misc_feature (1)..(143): Homolog of NCBI NO: 7486495 NR Description: hypothetical protein F6E21.30 - Arabidopsis >gi|7270013|emb|CAB79829.1| putative protein [Arabidopsis
  misc_feature (1)..(143): Homolog of NCBI NO: 30688910 NR Description: WAK-like kinase (WLK) [Arabidopsis thaliana]
MDESIMDETSCNGIGCCNAYMRGGSIQQIVGVTIENTITRGCKVAFLTNKAEYLSNKSDPQKLHARGYSTVELGWFIHTTNHSFIKSLGCYSVKEYNNERYTSTQRRINITSCICDDNAYLSYARCSCTRGFQGNPYRLGGCKDINECKEEEGMTYCGTNKCVNLQGHFKCVYNNHRPLAIGLGASFGSLIFVVGIYLLYKFIKKQRKLNQKKKFFKRNGGLLLQQQLISTVGMVEKTIVFSSRELEKATENFSSNRILGQGGQGTVYKGMLVDGRIVAVKKSKVVDEDKLEEFINEVVILSQINHRNIVKLLGCCLETKVPVLVYEFIPNGNLFEHLHDEFDENIMATWNIRLRIAIDIAGALSYLHSSASSPIYHRDVKSTNIMLDEKYRAKVSDFGTSRTVTVDHTHLTTVVSGTVGYMDPEYFQSSQFTDKSDVYSFGVVLVELITGEKSISFLRSQENRTLATYFILAMKENKLFDIIDARIRDGCMLSQVTATAKVARKCLNLKGRKRPSMREVSMELDSIRMPCGDMQLQECVSENEEGEEQNKGLVEDIMRAESRSKEFVTAPASHYNNIAAASSSSWSDVEPLFPLQTR

SEQ ID NO: 90616 - DNA, 1131 bp, Arabidopsis thaliana
  misc_feature (1)..(1131): Ceres Seq. ID no. 12724563
  misc_feature: MA Experiment ID: 20000166 Result: Up-regulated in Transcription
  misc_feature: MA Experiment 20000166 PARAMETER Experiment Name: At_100uM_ABA_P Parameter: Age (day) Value: 14
  misc_feature: MA Experiment 20000166 PARAMETER Experiment Name: At_100uM_ABA_P Parameter: Organism Value: A. thaliana
  misc_feature: MA Experiment 20000166 PARAMETER Experiment Name: At_100uM_ABA_P Parameter: Plant Line Value: WS
  misc_feature: MA Experiment 20000166 PARAMETER Experiment Name: At_100uM_ABA_P Parameter: Timepoint (hr) Value: 1
  misc_feature: MA Experiment 20000166 PARAMETER Experiment Name: At_100uM_ABA_P Parameter: Tissue Value: Aerial
  misc_feature: MA Experiment 20000166 PARAMETER Experiment Name: At_100uM_ABA_P Parameter: Treatment Value: 100uM ABA vs. No Treatment
  misc_feature: MA Experiment ID: 20000179 Result: Down-regulated in Transcription
  misc_feature: MA Experiment 20000179 PARAMETER Experiment Name: At_Germinating_Seeds_P Parameter: Age (hr) Value: 6 vs. 0
  misc_feature: MA Experiment 20000179 PARAMETER Experiment Name: At_Germinating_Seeds_P Parameter: Tissue Value: Germinating Seeds
  misc_feature: MA Experiment ID: 20000180 Result: Down-regulated in Transcription
  misc_feature: MA Experiment 20000180 PARAMETER Experiment Name: At_Germinating_Seeds_P Parameter: Age (hr) Value: 24 vs. 0
  misc_feature: MA Experiment 20000180 PARAMETER Experiment Name: At_Germinating_Seeds_P Parameter: Tissue Value: Germinating Seeds
  misc_feature: MA Experiment ID: 20000182 Result: Up-regulated in Transcription
  misc_feature: MA Experiment 20000182 PARAMETER Experiment Name: At_2mM_SA_P Parameter: Age (day) Value: 14
  misc_feature: MA Experiment 20000182 PARAMETER Experiment Name: At_2mM_SA_P Parameter: Organism Value: A. thaliana
  misc_feature: MA Experiment 20000182 PARAMETER Experiment Name: At_2mM_SA_P Parameter: Plant Line Value: WS
  misc_feature: MA Experiment 20000182 PARAMETER Experiment Name: At_2mM_SA_P Parameter: Timepoint (hr) Value: 6
  misc_feature: MA Experiment 20000182 PARAMETER Experiment Name: At_2mM_SA_P Parameter: Tissue Value: Aerial
  misc_feature: MA Experiment 20000182 PARAMETER Experiment Name: At_2mM_SA_P Parameter: Treatment Value: 2mM SA vs. No Treatment
  misc_feature: MA Experiment ID: 20000184 Result: Down-regulated in Transcription
  misc_feature: MA Experiment 20000184 PARAMETER Experiment Name: At_Shoots__P Parameter: Age (day) Value: 7
  misc_feature: MA Experiment 20000184 PARAMETER Experiment Name: At_Shoots__P Parameter: Tissue Value: Shoots vs. Whole Plant
  misc_feature: MA Experiment ID: 20000234 Result: Down-regulated in Transcription
  misc_feature: MA Experiment 20000234 PARAMETER Experiment Name: At_Siliques_P Parameter: Age (day) Value: 21
  misc_feature: MA Experiment 20000234 PARAMETER Experiment Name: At_Siliques_P Parameter: Organism Value: A. thaliana
  misc_feature: MA Experiment 20000234 PARAMETER Experiment Name: At_Siliques_P Parameter: Plant Line Value: WS
  misc_feature: MA Experiment 20000234 PARAMETER Experiment Name: At_Siliques_P Parameter: Tissue Value: Less Than 5mm Siliques vs. Whole Plant
  misc_feature: MA Experiment ID: 20000235 Result: Down-regulated in Transcription
  misc_feature: MA Experiment 20000235 PARAMETER Experiment Name: At_Siliques_P Parameter: Age (day) Value: 21
  misc_feature: MA Experiment 20000235 PARAMETER Experiment Name: At_Siliques_P Parameter: Organism Value: A. thaliana
  misc_feature: MA Experiment 20000235 PARAMETER Experiment Name: At_Siliques_P Parameter: Plant Line Value: WS
  misc_feature: MA Experiment 20000235 PARAMETER Experiment Name: At_Siliques_P Parameter: Tissue Value: 5-10mm Siliques vs. Whole Plant
  misc_feature: MA Experiment ID: 20000264 Result: Down-regulated in Transcription
  misc_feature: MA Experiment 20000264 PARAMETER Experiment Name: At_Open_Flower_P Parameter: Age (day) Value: 21
  misc_feature: MA Experiment 20000264 PARAMETER Experiment Name: At_Open_Flower_P Parameter: Plant Line Value: WS
  misc_feature: MA Experiment 20000264 PARAMETER Experiment Name: At_Open_Flower_P Parameter: Tissue Value: Open Flower vs. Whole Plant
  misc_feature: MA Experiment ID: 20000265 Result: Down-regulated in Transcription
  misc_feature: MA Experiment 20000265 PARAMETER Experiment Name: At_Open_Flower_P Parameter: Age (day) Value: 21
  misc_feature: MA Experiment 20000265 PARAMETER Experiment Name: At_Open_Flower_P Parameter: Plant Line Value: WS
  misc_feature: MA Experiment 20000265 PARAMETER Experiment Name: At_Open_Flower_P Parameter: Tissue Value: Closed Flower vs. Whole Plant
  misc_feature: MA Experiment ID: 20000286 Result: Down-regulated in Transcription
  misc_feature: MA Experiment 20000286 PARAMETER Experiment Name: At_Open_Flower_P Parameter: Age (day) Value: 21
  misc_feature: MA Experiment 20000286 PARAMETER Experiment Name: At_Open_Flower_P Parameter: Plant Line Value: WS
  misc_feature: MA Experiment 20000286 PARAMETER Experiment Name: At_Open_Flower_P Parameter: Tissue Value: Half Open vs. Whole Plant
  misc_feature: MA Experiment ID: 20000437 Result: Up-regulated in Transcription
  misc_feature: MA Experiment 20000437 PARAMETER Experiment Name: At_Drought_P Parameter: Age (day) Value: 8
  misc_feature: MA Experiment 20000437 PARAMETER Experiment Name: At_Drought_P Parameter: Organism Value: A. thaliana
  misc_feature: MA Experiment 20000437 PARAMETER Experiment Name: At_Drought_P Parameter: Plant Line Value: WS
  misc_feature: MA Experiment 20000437 PARAMETER Experiment Name: At_Drought_P Parameter: Timepoint (hr) Value: 24
  misc_feature: MA Experiment 20000437 PARAMETER Experiment Name: At_Drought_P Parameter: Tissue Value: Whole Plant
  misc_feature: MA Experiment 20000437 PARAMETER Experiment Name: At_Drought_P Parameter: Treatment Value: Drought vs. No Drought
  misc_feature: MA Experiment ID: 20000438 Result: Down-regulated in Transcription
  misc_feature: MA Experiment 20000438 PARAMETER Experiment Name: At_Shoots__P Parameter: Age (day) Value: 14
  misc_feature: MA Experiment 20000438 PARAMETER Experiment Name: At_Shoots__P Parameter: Tissue Value: Shoots vs. Whole Plant
  misc_feature: MA Experiment ID: 20000453 Result: Up-regulated in Transcription
  misc_feature: MA Experiment 20000453 PARAMETER Experiment Name: At_100uM_ABA_P Parameter: Age (day) Value: 15
  misc_feature: MA Experiment 20000453 PARAMETER Experiment Name: At_100uM_ABA_P Parameter: Organism Value: A. thaliana
  misc_feature: MA Experiment 20000453 PARAMETER Experiment Name: At_100uM_ABA_P Parameter: Plant Line Value: WS
  misc_feature: MA Experiment 20000453 PARAMETER Experiment Name: At_100uM_ABA_P Parameter: Timepoint (hr) Value: 24
  misc_feature: MA Experiment 20000453 PARAMETER Experiment Name: At_100uM_ABA_P Parameter: Tissue Value: Aerial
  misc_feature: MA Experiment 20000453 PARAMETER Experiment Name: At_100uM_ABA_P Parameter: Treatment Value: 100uM ABA vs. No Treatment
  misc_feature: MA Experiment ID: 20000460 Result: Up-regulated in Transcription
  misc_feature: MA Experiment 20000460 PARAMETER Experiment Name: At_10percent_PEG_P Parameter: Age (day) Value: 12
  misc_feature: MA Experiment 20000460 PARAMETER Experiment Name: At_10percent_PEG_P Parameter: Organism Value: A. thaliana
  misc_feature: MA Experiment 20000460 PARAMETER Experiment Name: At_10percent_PEG_P Parameter: Plant Line Value: WS
  misc_feature: MA Experiment 20000460 PARAMETER Experiment Name: At_10percent_PEG_P Parameter: Timepoint (day) Value: 12
  misc_feature: MA Experiment 20000460 PARAMETER Experiment Name: At_10percent_PEG_P Parameter: Tissue Value: Whole Plant
  misc_feature: MA Experiment 20000460 PARAMETER Experiment Name: At_10percent_PEG_P Parameter: Treatment Value: 10percent PEG vs. No Treatment
  misc_feature: MA Experiment ID: 20000495 Result: Down-regulated in Transcription
  misc_feature: MA Experiment 20000495 PARAMETER Experiment Name: At_Guard_Cells_P Parameter: Harvest Date Value: 8/2/2002
  misc_feature: MA Experiment 20000495 PARAMETER Experiment Name: At_Guard_Cells_P Parameter: Organism Value: A. thaliana
  misc_feature: MA Experiment 20000495 PARAMETER Experiment Name: At_Guard_Cells_P Parameter: Tissue Value: Guard Cells vs. Leaves
  misc_feature: MA Experiment ID: 20000794 Result: Down-regulated in Transcription
  misc_feature: MA Experiment 20000794 PARAMETER Experiment Name: At_Petals_P Parameter: Age (day) Value: 23-25 days
  misc_feature: MA Experiment 20000794 PARAMETER Experiment Name: At_Petals_P Parameter: Plant Line Value: WS
  misc_feature: MA Experiment 20000794 PARAMETER Experiment Name: At_Petals_P Parameter: Tissue Value: Petals vs. Whole plant
  misc_feature: MA Experiment ID: 20001554 Result: Up-regulated in Transcription
  misc_feature: MA Experiment 20001554 PARAMETER Experiment Name: At_Drought_Soil_Dry_P Parameter: Age (day) Value: 21
  misc_feature: MA Experiment 20001554 PARAMETER Experiment Name: At_Drought_Soil_Dry_P Parameter: Organism Value: A. thaliana
  misc_feature: MA Experiment 20001554 PARAMETER Experiment Name: At_Drought_Soil_Dry_P Parameter: Plant Line Value: WS
  misc_feature: MA Experiment 20001554 PARAMETER Experiment Name: At_Drought_Soil_Dry_P Parameter: Post Timepoint (hr) Value: None
  misc_feature: MA Experiment 20001554 PARAMETER Experiment Name: At_Drought_Soil_Dry_P Parameter: Post-Treatment Value: None
  misc_feature: MA Experiment 20001554 PARAMETER Experiment Name: At_Drought_Soil_Dry_P Parameter: Timepoint (day) Value: 7
  misc_feature: MA Experiment 20001554 PARAMETER Experiment Name: At_Drought_Soil_Dry_P Parameter: Treatment Value: Drought vs. No Drought
  misc_feature: MA Experiment ID: 20001555 Result: Up-regulated in Transcription
  misc_feature: MA Experiment 20001555 PARAMETER Experiment Name: At_Drought_Soil_Dry_P Parameter: Age (day) Value: 24
  misc_feature: MA Experiment 20001555 PARAMETER Experiment Name: At_Drought_Soil_Dry_P Parameter: Organism Value: A. thaliana
  misc_feature: MA Experiment 20001555 PARAMETER Experiment Name: At_Drought_Soil_Dry_P Parameter: Plant Line Value: WS
  misc_feature: MA Experiment 20001555 PARAMETER Experiment Name: At_Drought_Soil_Dry_P Parameter: Post Timepoint (hr) Value: None
  misc_feature: MA Experiment 20001555 PARAMETER Experiment Name: At_Drought_Soil_Dry_P Parameter: Post-Treatment Value: None
  misc_feature: MA Experiment 20001555 PARAMETER Experiment Name: At_Drought_Soil_Dry_P Parameter: Timepoint (day) Value: 10
  misc_feature: MA Experiment 20001555 PARAMETER Experiment Name: At_Drought_Soil_Dry_P Parameter: Treatment Value: Drought vs. No Drought
  misc_feature: MA Experiment ID: 20001905 Result: Up-regulated in Transcription
  misc_feature: MA Experiment 20001905 PARAMETER Experiment Name: At_Drought_Reproduction_P Parameter: Age (day) Value: 40
  misc_feature: MA Experiment 20001905 PARAMETER Experiment Name: At_Drought_Reproduction_P Parameter: Organism Value: A. thaliana
  misc_feature: MA Experiment 20001905 PARAMETER Experiment Name: At_Drought_Reproduction_P Parameter: Plant Line Value: WS
  misc_feature: MA Experiment 20001905 PARAMETER Experiment Name: At_Drought_Reproduction_P Parameter: Timepoint (day) Value: 10
  misc_feature: MA Experiment 20001905 PARAMETER Experiment Name: At_Drought_Reproduction_P Parameter: Tissue Value: Rosettes
  misc_feature: MA Experiment 20001905 PARAMETER Experiment Name: At_Drought_Reproduction_P Parameter: Treatment Value: Drought vs. No Drought
  misc_feature: MA Experiment ID: 20001911 Result: Up-regulated in Transcription
  misc_feature: MA Experiment 20001911 PARAMETER Experiment Name: At_Drought_Reproduction_P Parameter: Age (day) Value: 40
  misc_feature: MA Experiment 20001911 PARAMETER Experiment Name: At_Drought_Reproduction_P Parameter: Organism Value: A. thaliana
  misc_feature: MA Experiment 20001911 PARAMETER Experiment Name: At_Drought_Reproduction_P Parameter: Plant Line Value: WS
  misc_feature: MA Experiment 20001911 PARAMETER Experiment Name: At_Drought_Reproduction_P Parameter: Timepoint (day) Value: 10
  misc_feature: MA Experiment 20001911 PARAMETER Experiment Name: At_Drought_Reproduction_P Parameter: Tissue Value: Flowers
  misc_feature: MA Experiment 20001911 PARAMETER Experiment Name: At_Drought_Reproduction_P Parameter: Treatment Value: Drought vs. No Drought
atgttggtctcaaatttgacaatagggtcatcaagaatttcccgcaaaccgaatcagtcatctcgactctcaagtctcaccataccttcttatagcaacaatagcttcactacttcatcatggtcaaatttgacacctagaagtgaaggagagctcttaccatctccaacactaaaggcctttacattcaacgagctaaaaaccgctactagaaacttcaagccgaatagtatgattggtgaaggcggttttggttgtgtctataagggttggatcggtgaacgctcgttgtcaccttcgaaaccagggtccggtatggttgttgcagtcaagaaacttaaatcagaagggtttcaaggacacaaagagtggttgactgaggttcattatcttgggagacttcatcatatgaatcttgtgaagctaattggatattgcttagagggagagaaaagacttttggtttacgagtacatgcctaaaggaagcctggagaaccatctatttcgaagaggcgcagagccaattccgtggaagactaggatgaaagtagcttttagcgcagcgagaggactatctttcctccacgaagctaaagtcatataccgagacttcaaggcctctaatattctacttgatgtggatttcaatgcaaagctatctgattttgggttggcaaaagctggaccaacaggagatagaacgcatgtgacaactcaagtgataggcacacaagggtacgcagctccggaatacatagcaaccggccggttaacctccaagagtgatgtctatagctttggagtggtgttgctcgaactactctcgggtcgtcccaccctagacaaatcgaaagtaggagtggaacgtaacctggtggattgggcaataccttatttggtggacagaagaaaagtgtttagaataatggacacaaagcttggaggacagtaccctcacaaaggggcttgtgcagctgccaacatcgcattgcggtgtctcaataccgaacctaagctcagaccggatatggctgatgtcttatccactttacaacagcttgagacttcttcaaaaaagatgggttctactcaaaatatagtcatgtctccttcatctcatatgtcgtag

SEQ ID NO: 90617 - protein, 376 aa, Arabidopsis thaliana
  peptide (1)..(376): Ceres Seq. ID no. 12724564
  misc_feature (1)..(376): Homolog of NCBI NO: 15222454 NR Description: putative protein kinase; protein id: At1g69790.1
  misc_feature (148)..(376): Homolog of NCBI NO: 25287598 NR Description: protein T7N9.2 [imported] - Arabidopsis thaliana
  misc_feature (9)..(171): Homolog of NCBI NO: 25287598 NR Description: protein T7N9.2 [imported] - Arabidopsis thaliana
  misc_feature (10)..(371): Homolog of NCBI NO: 15227042 NR Description: putative protein kinase; protein id: At2g02800.1, by cDNA: gi_16226562, supported by cDNA: gi_2852448 [Arabidopsis
  misc_feature (10)..(371): Homolog of NCBI NO: 26449871 NR Description: putative protein kinase [Arabidopsis thaliana]
  misc_feature (4)..(376): Homolog of NCBI NO: 15223723 NR Description: protein kinase; protein id: At1g14370.1, by cDNA: gi_12248034, supported by cDNA: gi_16649048, supported
  misc_feature (3)..(365): Homolog of NCBI NO: 19071648 NR Description: putative protein tyrosine-serine-threonine kinase
  misc_feature (14)..(365): Homolog of NCBI NO: 37534182 NR Description: putative serine /threonine kinase similar to NAK
  misc_feature (106)..(376): Homolog of NCBI NO: 15223401 NR Description: protein kinase, putative; protein id: At1g26970.1
  misc_feature (45)..(366): Homolog of NCBI NO: 15222437 NR Description: protein kinase APK1A; protein id: At1g07570.1
MLVSNLTIGSSRISRKPNQSSRLSSLTIPSYSNNSFTTSSWSNLTPRSEGELLPSPTLKAFTFNELKTATRNFKPNSMIGEGGFGCVYKGWIGERSLSPSKPGSGMVVAVKKLKSEGFQGHKEWLTEVHYLGRLHHMNLVKLIGYCLEGEKRLLVYEYMPKGSLENHLFRRGAEPIPWKTRMKVAFSAARGLSFLHEAKVIYRDFKASNILLDVDFNAKLSDFGLAKAGPTGDRTHVTTQVIGTQGYAAPEYIATGRLTSKSDVYSFGVVLLELLSGRPTLDKSKVGVERNLVDWAIPYLVDRRKVFRIMDTKLGGQYPHKGACAAANIALRCLNTEPKLRPDMADVLSTLQQLETSSKKMGSTQNIVMSPSSHMS

SEQ ID NO: 90618 - protein, 299 aa, Arabidopsis thaliana; identical to SEQ ID NO: 48262
  peptide (1)..(299): Ceres Seq. ID no. 12724565
  misc_feature (1)..(299): Homolog of NCBI NO: 15222454 NR Description: putative protein kinase; protein id: At1g69790.1
  misc_feature (71)..(299): Homolog of NCBI NO: 25287598 NR Description: protein T7N9.2 [imported] - Arabidopsis thaliana
  misc_feature (1)..(94): Homolog of NCBI NO: 25287598 NR Description: protein T7N9.2 [imported] - Arabidopsis thaliana
  misc_feature (1)..(294): Homolog of NCBI NO: 15227042 NR Description: putative protein kinase; protein id: At2g02800.1, by cDNA: gi_16226562, supported by cDNA: gi_2852448 [Arabidopsis
  misc_feature (1)..(294): Homolog of NCBI NO: 26449871 NR Description: putative protein kinase [Arabidopsis thaliana]
  misc_feature (1)..(299): Homolog of NCBI NO: 15223723 NR Description: protein kinase; protein id: At1g14370.1, by cDNA: gi_12248034, supported by cDNA: gi_16649048, supported
  misc_feature (1)..(288): Homolog of NCBI NO: 19071648 NR Description: putative protein tyrosine-serine-threonine kinase
  misc_feature (1)..(288): Homolog of NCBI NO: 37534182 NR Description: putative serine /threonine kinase similar to NAK
  misc_feature (29)..(299): Homolog of NCBI NO: 15223401 NR Description: protein kinase, putative; protein id: At1g26970.1
  misc_feature (1)..(289): Homolog of NCBI NO: 15222437 NR Description: protein kinase APK1A; protein id: At1g07570.1

SEQ ID NO: 90619 - protein, 271 aa, Arabidopsis thaliana; identical to SEQ ID NO: 48263
  peptide (1)..(271): Ceres Seq. ID no. 12724566
  misc_feature (1)..(271): Homolog of NCBI NO: 15222454 NR Description: putative protein kinase; protein id: At1g69790.1
  misc_feature (43)..(271): Homolog of NCBI NO: 25287598 NR Description: protein T7N9.2 [imported] - Arabidopsis thaliana
  misc_feature (1)..(66): Homolog of NCBI NO: 25287598 NR Description: protein T7N9.2 [imported] - Arabidopsis thaliana
  misc_feature (1)..(266): Homolog of NCBI NO: 15227042 NR Description: putative protein kinase; protein id: At2g02800.1, by cDNA: gi_16226562, supported by cDNA: gi_2852448 [Arabidopsis
  misc_feature (1)..(266): Homolog of NCBI NO: 26449871 NR Description: putative protein kinase [Arabidopsis thaliana]
  misc_feature (1)..(271): Homolog of NCBI NO: 15223723 NR Description: protein kinase; protein id: At1g14370.1, by cDNA: gi_12248034, supported by cDNA: gi_16649048, supported
  misc_feature (1)..(260): Homolog of NCBI NO: 19071648 NR Description: putative protein tyrosine-serine-threonine kinase
  misc_feature (1)..(260): Homolog of NCBI NO: 37534182 NR Description: putative serine /threonine kinase similar to NAK
  misc_feature (1)..(271): Homolog of NCBI NO: 15223401 NR Description: protein kinase, putative; protein id: At1g26970.1
  misc_feature (1)..(261): Homolog of NCBI NO: 15222437 NR Description: protein kinase APK1A; protein id: At1g07570.1

SEQ ID NO: 90620 - DNA, 1164 bp, Arabidopsis thaliana
  misc_feature (1)..(1164): Ceres Seq. ID no. 12724567
  misc_feature: MA Experiment ID: 20000185 Result: Up-regulated in Transcription
  misc_feature: MA Experiment 20000185 PARAMETER Experiment Name: At_Roots__P Parameter: Age (day) Value: 7 vs. 21
  misc_feature: MA Experiment 20000185 PARAMETER Experiment Name: At_Roots__P Parameter: Organism Value: A. thaliana
  misc_feature: MA Experiment 20000185 PARAMETER Experiment Name: At_Roots__P Parameter: Tissue Value: Roots vs. Whole Plant
  misc_feature: MA Experiment ID: 20000439 Result: Up-regulated in Transcription
  misc_feature: MA Experiment 20000439 PARAMETER Experiment Name: At_Roots__P Parameter: Age (day) Value: 14 vs. 21
  misc_feature: MA Experiment 20000439 PARAMETER Experiment Name: At_Roots__P Parameter: Organism Value: A. thaliana
  misc_feature: MA Experiment 20000439 PARAMETER Experiment Name: At_Roots__P Parameter: Tissue Value: Roots vs. Whole Plant
atgatcaaagaggagaccgtttcatacttccaaactttcgatggtgttatggcagaatctgacaaggaagaggagcttgatgcaacaaaagcaaaggtggagaaagttcgggaagaaaatgagaaattaaagctcttactctctacgattcttaataattacaactctcttcaaatgcaagtctctaaagttctcggacaacaacaaggagcttcgtctatggagctagaccacattgatcgtcaagatgaaaataacgactatgatgtggatatatcacttaggcttggaagatcagagcaaaagatctctaaaaaggaggaaaataaggtggacaagatttctactaagaacgtagaggagtcaaaagataaaagatctgcactgggttttggatttcagattcaaagctatgaagcctcgaaactagatgatctttgtaggcaggttaagcttgcaaacgctgaaaataaatgtgtatcttcgaggaaagatgtcaaatcagttagaaatgaaaaccatcaagatgttttggaggagcatgaacaaacaggtttgaagaaaactagggtttgtgttaaagcatcatgtgaagacccatcaataaacgacggttgccagtggaggaaatatggtcaaaagactgcgaaaaccaatcctctcccacgagcctattaccgttgctccatgtcgtcaaattgtcccgttagaaaacaggtgcaaagatgtggagaagaagaaacctccgcttttatgacaacgtacgaaggaaaccatgaccatcctctccccatggaagcaagccacatggcagctggaacttccgcggctgcctccttattacaatctggctcctcctcttcctcctcctccacctcagcgagtctaagctatttcttcccttttcaccacttctctatctccaccactaactcgcacccgactgtaacattggacctcacacgaccaaactatcccaatcagttaccagacgactaccctctatcgtcctcctctttcagtctcaacttttcctctccagatcctccacctccatcatcgcatgaccacaccttgaactttagtggcttgcgaacacaagctccgttgagtacagattcattattggcccgttatcgaacgagactttccggacagcaataa

SEQ ID NO: 90621 - protein, 387 aa, Arabidopsis thaliana
  peptide (1)..(387): Ceres Seq. ID no. 12724568
  misc_feature (202)..(263): Pfam Name: WRKY DNA -binding domain Pfam Description: WRKY DNA -binding domain
  misc_feature (1)..(387): Homolog of NCBI NO: 18409374 NR Description: WRKY family transcription factor; protein id: supported by cDNA: gi_15384220 [Arabidopsis thaliana]
  misc_feature (24)..(376): Homolog of NCBI NO: 15242221 NR Description: WRKY family transcription factor; protein id:
  misc_feature (170)..(333): Homolog of NCBI NO: 15234284 NR Description: WRKY family transcription factor; protein id: supported by cDNA: gi_19172391 [Arabidopsis thaliana]
  misc_feature (21)..(83): Homolog of NCBI NO: 15234284 NR Description: WRKY family transcription factor; protein id: supported by cDNA: gi_19172391 [Arabidopsis thaliana]
  misc_feature (26)..(362): Homolog of NCBI NO: 30686070 NR Description: WRKY family transcription factor [Arabidopsis >gi|20978774|sp|Q8VWV6|WR61_ARATH Probable WRKY transcription
  misc_feature (14)..(339): Homolog of NCBI NO: 15233516 NR Description: WRKY family transcription factor; protein id: supported by cDNA: gi_15990593 [Arabidopsis thaliana]
  misc_feature (33)..(362): Homolog of NCBI NO: 25518561 NR Description: hypothetical protein F6A14.5 - Arabidopsis >gi|6730700|gb|AAF27095.1|AC011809_4 Hypothetical protein
  misc_feature (202)..(333): Homolog of NCBI NO: 7488096 NR Description: probable DNA-binding protein T15B16.12 -
  misc_feature (21)..(87): Homolog of NCBI NO: 7488096 NR Description: probable DNA-binding protein T15B16.12 -
  misc_feature (14)..(327): Homolog of NCBI NO: 18415833 NR Description: WRKY family transcription factor; protein id: supported by cDNA: gi_15990589 [Arabidopsis thaliana]
MIKEETVSYFQTFDGVMAESDKEEELDATKAKVEKVREENEKLKLLLSTILNNYNSLQMQVSKVLGQQQGASSMELDHIDRQDENNDYDVDISLRLGRSEQKISKKEENKVDKISTKNVEESKDKRSALGFGFQIQSYEASKLDDLCRQVKLANAENKCVSSRKDVKSVRNENHQDVLEEHEQTGLKKTRVCVKASCEDPSINDGCQWRKYGQKTAKTNPLPRAYYRCSMSSNCPVRKQVQRCGEEETSAFMTTYEGNHDHPLPMEASHMAAGTSAAASLLQSGSSSSSSSTSASLSYFFPFHHFSISTTNSHPTVTLDLTRPNYPNQLPDDYPLSSSSFSLNFSSPDPPPPSSHDHTLNFSGLRTQAPLSTDSLLARYRTRLSGQQ

SEQ ID NO: 90622 - protein, 371 aa, Arabidopsis thaliana
  peptide (1)..(371): Ceres Seq. ID no. 12724569
  misc_feature (186)..(247): Pfam Name: WRKY DNA -binding domain Pfam Description: WRKY DNA -binding domain
  misc_feature (1)..(371): Homolog of NCBI NO: 18409374 NR Description: WRKY family transcription factor; protein id: supported by cDNA: gi_15384220 [Arabidopsis thaliana]
  misc_feature (8)..(360): Homolog of NCBI NO: 15242221 NR Description: WRKY family transcription factor; protein id:
  misc_feature (154)..(317): Homolog of NCBI NO: 15234284 NR Description: WRKY family transcription factor; protein id: supported by cDNA: gi_19172391 [Arabidopsis thaliana]
  misc_feature (5)..(67): Homolog of NCBI NO: 15234284 NR Description: WRKY family transcription factor; protein id: supported by cDNA: gi_19172391 [Arabidopsis thaliana]
  misc_feature (10)..(346): Homolog of NCBI NO: 30686070 NR Description: WRKY family transcription factor [Arabidopsis >gi|20978774|sp|Q8VWV6|WR61_ARATH Probable WRKY transcription
  misc_feature (1)..(323): Homolog of NCBI NO: 15233516 NR Description: WRKY family transcription factor; protein id: supported by cDNA: gi_15990593 [Arabidopsis thaliana]
  misc_feature (17)..(346): Homolog of NCBI NO: 25518561 NR Description: hypothetical protein F6A14.5 - Arabidopsis >gi|6730700|gb|AAF27095.1|AC011809_4 Hypothetical protein
  misc_feature (186)..(317): Homolog of NCBI NO: 7488096 NR Description: probable DNA-binding protein T15B16.12 -
  misc_feature (5)..(71): Homolog of NCBI NO: 7488096 NR Description: probable DNA-binding protein T15B16.12 -
  misc_feature (1)..(311): Homolog of NCBI NO: 18415833 NR Description: WRKY family transcription factor; protein id: supported by cDNA: gi_15990589 [Arabidopsis thaliana]
MAESDKEEELDATKAKVEKVREENEKLKLLLSTILNNYNSLQMQVSKVLGQQQGASSMELDHIDRQDENNDYDVDISLRLGRSEQKISKKEENKVDKISTKNVEESKDKRSALGFGFQIQSYEASKLDDLCRQVKLANAENKCVSSRKDVKSVRNENHQDVLEEHEQTGLKKTRVCVKASCEDPSINDGCQWRKYGQKTAKTNPLPRAYYRCSMSSNCPVRKQVQRCGEEETSAFMTTYEGNHDHPLPMEASHMAAGTSAAASLLQSGSSSSSSSTSASLSYFFPFHHFSISTTNSHPTVTLDLTRPNYPNQLPDDYPLSSSSFSLNFSSPDPPPPSSHDHTLNFSGLRTQAPLSTDSLLARYRTRLSGQQ

SEQ ID NO: 90623 - protein, 329 aa, Arabidopsis thaliana
  peptide (1)..(329): Ceres Seq. ID no. 12724570
  misc_feature (144)..(205): Pfam Name: WRKY DNA -binding domain Pfam Description: WRKY DNA -binding domain
  misc_feature (1)..(329): Homolog of NCBI NO: 18409374 NR Description: WRKY family transcription factor; protein id: supported by cDNA: gi_15384220 [Arabidopsis thaliana]
  misc_feature (1)..(318): Homolog of NCBI NO: 15242221 NR Description: WRKY family transcription factor; protein id:
  misc_feature (112)..(275): Homolog of NCBI NO: 15234284 NR Description: WRKY family transcription factor; protein id: supported by cDNA: gi_19172391 [Arabidopsis thaliana]
  misc_feature (1)..(25): Homolog of NCBI NO: 15234284 NR Description: WRKY family transcription factor; protein id: supported by cDNA: gi_19172391 [Arabidopsis thaliana]
  misc_feature (1)..(304): Homolog of NCBI NO: 30686070 NR Description: WRKY family transcription factor [Arabidopsis >gi|20978774|sp|Q8VWV6|WR61_ARATH Probable WRKY transcription
  misc_feature (1)..(281): Homolog of NCBI NO: 15233516 NR Description: WRKY family transcription factor; protein id: supported by cDNA: gi_15990593 [Arabidopsis thaliana]
  misc_feature (1)..(304): Homolog of NCBI NO: 25518561 NR Description: hypothetical protein F6A14.5 - Arabidopsis >gi|6730700|gb|AAF27095.1|AC011809_4 Hypothetical protein
  misc_feature (144)..(275): Homolog of NCBI NO: 7488096 NR Description: probable DNA-binding protein T15B16.12 -
  misc_feature (1)..(29): Homolog of NCBI NO: 7488096 NR Description: probable DNA-binding protein T15B16.12 -
  misc_feature (1)..(269): Homolog of NCBI NO: 18415833 NR Description: WRKY family transcription factor; protein id: supported by cDNA: gi_15990589 [Arabidopsis thaliana]
MQVSKVLGQQQGASSMELDHIDRQDENNDYDVDISLRLGRSEQKISKKEENKVDKISTKNVEESKDKRSALGFGFQIQSYEASKLDDLCRQVKLANAENKCVSSRKDVKSVRNENHQDVLEEHEQTGLKKTRVCVKASCEDPSINDGCQWRKYGQKTAKTNPLPRAYYRCSMSSNCPVRKQVQRCGEEETSAFMTTYEGNHDHPLPMEASHMAAGTSAAASLLQSGSSSSSSSTSASLSYFFPFHHFSISTTNSHPTVTLDLTRPNYPNQLPDDYPLSSSSFSLNFSSPDPPPPSSHDHTLNFSGLRTQAPLSTDSLLARYRTRLSGQQ

SEQ ID NO: 90624 - DNA, 2939 bp, Arabidopsis thaliana
  misc_feature (1)..(2939): Ceres Seq. ID no. 12724571
  misc_feature: MA Experiment ID: 20000173 Result: Down-regulated in Transcription
  misc_feature: MA Experiment 20000173 PARAMETER Experiment Name: At_42deg_Heat_P Parameter: Age (day) Value: 14
  misc_feature: MA Experiment 20000173 PARAMETER Experiment Name: At_42deg_Heat_P Parameter: Organism Value: A. thaliana
  misc_feature: MA Experiment 20000173 PARAMETER Experiment Name: At_42deg_Heat_P Parameter: Plant Line Value: WS
  misc_feature: MA Experiment 20000173 PARAMETER Experiment Name: At_42deg_Heat_P Parameter: Temperature (deg C) Value: 42 vs. 22
  misc_feature: MA Experiment 20000173 PARAMETER Experiment Name: At_42deg_Heat_P Parameter: Timepoint (hr) Value: 6
  misc_feature: MA Experiment 20000173 PARAMETER Experiment Name: At_42deg_Heat_P Parameter: Tissue Value: Aerial
  misc_feature: MA Experiment ID: 20000179 Result: Up-regulated in Transcription
  misc_feature: MA Experiment 20000179 PARAMETER Experiment Name: At_Germinating_Seeds_P Parameter: Age (hr) Value: 6 vs. 0
  misc_feature: MA Experiment 20000179 PARAMETER Experiment Name: At_Germinating_Seeds_P Parameter: Tissue Value: Germinating Seeds
  misc_feature: MA Experiment ID: 20000180 Result: Up-regulated in Transcription
  misc_feature: MA Experiment 20000180 PARAMETER Experiment Name: At_Germinating_Seeds_P Parameter: Age (hr) Value: 24 vs. 0
  misc_feature: MA Experiment 20000180 PARAMETER Experiment Name: At_Germinating_Seeds_P Parameter: Tissue Value: Germinating Seeds
  misc_feature: MA Experiment ID: 20000184 Result: Down-regulated in Transcription
  misc_feature: MA Experiment 20000184 PARAMETER Experiment Name: At_Shoots__P Parameter: Age (day) Value: 7
  misc_feature: MA Experiment 20000184 PARAMETER Experiment Name: At_Shoots__P Parameter: Tissue Value: Shoots vs. Whole Plant
  misc_feature: MA Experiment ID: 20000185 Result: Down-regulated in Transcription
  misc_feature: MA Experiment 20000185 PARAMETER Experiment Name: At_Roots__P Parameter: Age (day) Value: 7 vs. 21
  misc_feature: MA Experiment 20000185 PARAMETER Experiment Name: At_Roots__P Parameter: Organism Value: A. thaliana
  misc_feature: MA Experiment 20000185 PARAMETER Experiment Name: At_Roots__P Parameter: Tissue Value: Roots vs. Whole Plant
  misc_feature: MA Experiment ID: 20000439 Result: Down-regulated in Transcription
  misc_feature: MA Experiment 20000439 PARAMETER Experiment Name: At_Roots__P Parameter: Age (day) Value: 14 vs. 21
  misc_feature: MA Experiment 20000439 PARAMETER Experiment Name: At_Roots__P Parameter: Organism Value: A. thaliana
  misc_feature: MA Experiment 20000439 PARAMETER Experiment Name: At_Roots__P Parameter: Tissue Value: Roots vs. Whole Plant
  misc_feature: MA Experiment ID: 20001247 Result: Down-regulated in Transcription
  misc_feature: MA Experiment 20001247 PARAMETER Experiment Name: At_Far-red-induction_P Parameter: Age (day) Value: 7
  misc_feature: MA Experiment 20001247 PARAMETER Experiment Name: At_Far-red-induction_P Parameter: Light Value: Far-red vs. White
  misc_feature: MA Experiment 20001247 PARAMETER Experiment Name: At_Far-red-induction_P Parameter: Organism Value: A. thaliana
  misc_feature: MA Experiment 20001247 PARAMETER Experiment Name: At_Far-red-induction_P Parameter: Plant Line Value: Columbia
  misc_feature: MA Experiment 20001247 PARAMETER Experiment Name: At_Far-red-induction_P Parameter: Timepoint (hr) Value: 1
  misc_feature: MA Experiment 20001247 PARAMETER Experiment Name: At_Far-red-induction_P Parameter: Tissue Value: Whole Plant
  misc_feature: MA Experiment ID: 20001451 Result: Down-regulated in Transcription
  misc_feature: MA Experiment 20001451 PARAMETER Experiment Name: At_Far-red-induction_P Parameter: Age (day) Value: 7
  misc_feature: MA Experiment 20001451 PARAMETER Experiment Name: At_Far-red-induction_P Parameter: Light Value: Far-red vs. White
  misc_feature: MA Experiment 20001451 PARAMETER Experiment Name: At_Far-red-induction_P Parameter: Organism Value: A. thaliana
  misc_feature: MA Experiment 20001451 PARAMETER Experiment Name: At_Far-red-induction_P Parameter: Plant Line Value: Columbia
  misc_feature: MA Experiment 20001451 PARAMETER Experiment Name: At_Far-red-induction_P Parameter: Timepoint (hr) Value: 24
  misc_feature: MA Experiment 20001451 PARAMETER Experiment Name: At_Far-red-induction_P Parameter: Tissue Value: Whole Plant
  misc_feature: MA Experiment ID: 20001557 Result: Down-regulated in Transcription
  misc_feature: MA Experiment 20001557 PARAMETER Experiment Name: At_Drought_Soil_Dry_P Parameter: Age (day) Value: 27
  misc_feature: MA Experiment 20001557 PARAMETER Experiment Name: At_Drought_Soil_Dry_P Parameter: Organism Value: A. thaliana
  misc_feature: MA Experiment 20001557 PARAMETER Experiment Name: At_Drought_Soil_Dry_P Parameter: Plant Line Value: WS
  misc_feature: MA Experiment 20001557 PARAMETER Experiment Name: At_Drought_Soil_Dry_P Parameter: Post Timepoint (hr) Value: 3
  misc_feature: MA Experiment 20001557 PARAMETER Experiment Name: At_Drought_Soil_Dry_P Parameter: Post-Treatment Value: Re-Water vs. No Drought
  misc_feature: MA Experiment 20001557 PARAMETER Experiment Name: At_Drought_Soil_Dry_P Parameter: Timepoint (day) Value: 13
  misc_feature: MA Experiment 20001557 PARAMETER Experiment Name: At_Drought_Soil_Dry_P Parameter: Treatment Value: Drought vs. No Drought
  misc_feature: MA Experiment ID: 20001905 Result: Down-regulated in Transcription
  misc_feature: MA Experiment 20001905 PARAMETER Experiment Name: At_Drought_Reproduction_P Parameter: Age (day) Value: 40
  misc_feature: MA Experiment 20001905 PARAMETER Experiment Name: At_Drought_Reproduction_P Parameter: Organism Value: A. thaliana
  misc_feature: MA Experiment 20001905 PARAMETER Experiment Name: At_Drought_Reproduction_P Parameter: Plant Line Value: WS
  misc_feature: MA Experiment 20001905 PARAMETER Experiment Name: At_Drought_Reproduction_P Parameter: Timepoint (day) Value: 10
  misc_feature: MA Experiment 20001905 PARAMETER Experiment Name: At_Drought_Reproduction_P Parameter: Tissue Value: Rosettes
  misc_feature: MA Experiment 20001905 PARAMETER Experiment Name: At_Drought_Reproduction_P Parameter: Treatment Value: Drought vs. No Drought
  misc_feature: MA Experiment ID: 20001906 Result: Down-regulated in Transcription
  misc_feature: MA Experiment 20001906 PARAMETER Experiment Name: At_Drought_Reproduction_P Parameter: Age (day) Value: 35
  misc_feature: MA Experiment 20001906 PARAMETER Experiment Name: At_Drought_Reproduction_P Parameter: Organism Value: A. thaliana
  misc_feature: MA Experiment 20001906 PARAMETER Experiment Name: At_Drought_Reproduction_P Parameter: Plant Line Value: WS
  misc_feature: MA Experiment 20001906 PARAMETER Experiment Name: At_Drought_Reproduction_P Parameter: Timepoint (day) Value: 5
  misc_feature: MA Experiment 20001906 PARAMETER Experiment Name: At_Drought_Reproduction_P Parameter: Tissue Value: Siliques
  misc_feature: MA Experiment 20001906 PARAMETER Experiment Name: At_Drought_Reproduction_P Parameter: Treatment Value: Drought vs. No Drought
aaaatatcttcttcttctttcttctgctctctctctctctctcgccatgtccactgttcccattgagtctcttctccaccattcttatcttcgtcacaactcaaaagtcaatcgcggaaatagaagcttcatacctatctcgttgaatctccgttctcatttcacttctaacaaactactacactcaattggaaaaagtgtcggtgttagctcgatgaacaaaagtcccgtcgccattcgtgctacctcatcggatactgccgtcgtggaaaccgctcaatcggatgatgtcatcttcaaggaaattttccctgttcagcgaatcgaaaaggcagaaggaaagatttatgttcgattaaaggaagtgaaggagaagaattgggagctgagtgttggatgtagtatacctggaaaatggattttgcattggggagtttcatatgtgggtgatactggcagtgaatgggatcaacctccggaagatatgagacctcctggctcaattgccattaaggactatgccatagagacacctttgaagaagttatctgaaggagattctttttttgaagttgctattaatctaaatctggagagttctgtagcagctctcaattttgttttgaaggacgaagaaactggggcgtggtatcagcacaaagggagagactttaaggttcctcttgtagacgatgttcctgataatggaaatttgatcggagctaagaaaggatttggtgcccttgggcagctttcaaacatccctctcaaacaagataagtccagtgcagagactgattctattgaagaaagaaaaggtcttcaagagttttacgaggagatgccaataagtaaacgtgttgccgatgataactcagtcagtgtcactgcaaggaaatgccctgaaacatctaagaacattgtatcaattgaaaccgatttaccgggtgacgttactgtccactggggagtttgcaaaaacggcactaagaaatgggaaattccatctgaaccttaccctgaagagacatctttgtttaagaacaaggcattacgcactcgtttacagcgaaaagacgatggaaatggatcgtttggattattctctctggatggaaagcttgaagggttatgctttgttcttaagttaaatgaaaatacttggctaaattataggggggaagacttctatgtccctttccttacttcaagtagctcgcccgttgaaactgaagctgcccaagtgagtaaacccaaacgaaaaacagataaagaagtgtctgctagtggatttactaaagaaatcatcacggagataaggaacttggcaattgacatttcctctcataagaatcagaagacaaacgtcaaagaagtgcaggaaaacattctacaagaaattgagaaactggctgcggaggcatatagcatatttagaagcacaactccagctttttccgaggaaggtgttttagaagcagaagctgacaagcctgacattaaaatctcctcaggaaccggctcgggatttgagatattatgccaaggtttcaactgggagtccaataaatctgggagatggtacttggaacttcaagaaaaagccgatgagttagcttcacttggattcactgttctgtggttacctccaccgacagaatctgtgtcacctgaagggtacatgcctaaagacctgtataacttgaattccagatatggaacaattgatgagctaaaagatacagtgaagaaatttcacaaggtcgggatcaaagttttaggcgatgctgttctgaatcaccgctgtgcacacttcaaaaatcaaaatggtgtatggaatctatttggaggacgtctaaactgggacgatagggcagtagttgcagatgaccctcatttccagggtagaggaaacaagagcagtggagataatttccatgctgctccaaacatagatcactcgcaagactttgttaggaaggatatcaaggaatggctatgctggatgatggaagaagttgggtatgatggatggaggcttgactttgtaagagggttctggggaggttatgtgaaagactatatggatgctagcaaaccgtactttgcggttggtgaatattgggattcgttaagttacacgtacggagaaatggactacaatcaagacgcacatcgtcaaagaatagttgactggattaatgcaactagtggagctgctggtgcatttgatgtcactaccaaaggaattcttcatacggcgcttcaaaaatgtgaatattggagactctcagacccaaaagggaagcctccaggtgtagttggttggtggccttctcgtgctgtaacattcatcgagaatcatgacactggctctacacagggtcattggagatttccggaggggaaggaaatgcaaggatatgcttacatcctaactcatccaggaacaccagcggtcttcttcgaccatatcttctcggattatcattccgagattgctgcacttctctctctcaggaacagacagaaactccactgtcggagtgaggtgaatatagacaagagtgagagagatgtgtatgcggctataatagatgaaaaggttgcaatgaagatcggaccagggcattatgaaccaccaaacggatcgcaaaactggtctgtagccgttgaaggcagagactacaaggtgtgggaaacatcttaagaagaaggttcccaatttttatgtgtatctagtagtaaataaaattgttcctggaggatatattatttcagggaataagattacctggaaatgttatatttagagtggaattaaaaccagatctaagatttgtcccacttttttcaatgctgagagaatattcatattgttgtattggatgcttgtaaagtgtatgcatatatatatgaataataatatatctatttcc

SEQ ID NO: 90625 - protein, 902 aa, Arabidopsis thaliana
  peptide (1)..(902): Ceres Seq. ID no. 12724572
  misc_feature (207)..(902): Homolog of NCBI NO: 34910588 NR Description: putative alpha-amylase [Oryza sativa (japonica
  misc_feature (77)..(209): Homolog of NCBI NO: 34910588 NR Description: putative alpha-amylase [Oryza sativa (japonica
  misc_feature (509)..(899): Homolog of NCBI NO: 38346145 NR Description: OSJNBb0118P14.5 [Oryza sativa (japonica
  misc_feature (509)..(899): Homolog of NCBI NO: 15222959 NR Description: alpha-amylase, putative; protein id: At1g76130.1,
  misc_feature (496)..(899): Homolog of NCBI NO: 25289325 NR Description: protein T23E18.6 [imported] - Arabidopsis >gi|6573706|gb|AAF17626.1|AC009978_2 T23E18.6 [Arabidopsis
  misc_feature (508)..(900): Homolog of NCBI NO: 1220453 NR Description: alpha-amylase
  misc_feature (502)..(899): Homolog of NCBI NO: 7532799 NR Description: alpha-amylase [Malus x domestica]
  misc_feature (508)..(900): Homolog of NCBI NO: 3769330 NR Description: alpha-amylase [Phaseolus vulgaris]
  misc_feature (512)..(900): Homolog of NCBI NO: 228404 NR Description: alpha amylase
  misc_feature (508)..(899): Homolog of NCBI NO: 23027235 NR Description: hypothetical protein [Microbulbifer degradans
KYLLLLSSALSLSLAMSTVPIESLLHHSYLRHNSKVNRGNRSFIPISLNLRSHFTSNKLLHSIGKSVGVSSMNKSPVAIRATSSDTAVVETAQSDDVIFKEIFPVQRIEKAEGKIYVRLKEVKEKNWELSVGCSIPGKWILHWGVSYVGDTGSEWDQPPEDMRPPGSIAIKDYAIETPLKKLSEGDSFFEVAINLNLESSVAALNFVLKDEETGAWYQHKGRDFKVPLVDDVPDNGNLIGAKKGFGALGQLSNIPLKQDKSSAETDSIEERKGLQEFYEEMPISKRVADDNSVSVTARKCPETSKNIVSIETDLPGDVTVHWGVCKNGTKKWEIPSEPYPEETSLFKNKALRTRLQRKDDGNGSFGLFSLDGKLEGLCFVLKLNENTWLNYRGEDFYVPFLTSSSSPVETEAAQVSKPKRKTDKEVSASGFTKEIITEIRNLAIDISSHKNQKTNVKEVQENILQEIEKLAAEAYSIFRSTTPAFSEEGVLEAEADKPDIKISSGTGSGFEILCQGFNWESNKSGRWYLELQEKADELASLGFTVLWLPPPTESVSPEGYMPKDLYNLNSRYGTIDELKDTVKKFHKVGIKVLGDAVLNHRCAHFKNQNGVWNLFGGRLNWDDRAVVADDPHFQGRGNKSSGDNFHAAPNIDHSQDFVRKDIKEWLCWMMEEVGYDGWRLDFVRGFWGGYVKDYMDASKPYFAVGEYWDSLSYTYGEMDYNQDAHRQRIVDWINATSGAAGAFDVTTKGILHTALQKCEYWRLSDPKGKPPGVVGWWPSRAVTFIENHDTGSTQGHWRFPEGKEMQGYAYILTHPGTPAVFFDHIFSDYHSEIAALLSLRNRQKLHCRSEVNIDKSERDVYAAIIDEKVAMKIGPGHYEPPNGSQNWSVAVEGRDYKVWETS

SEQ ID NO: 90626 - protein, 887 aa, Arabidopsis thaliana
  peptide (1)..(887): Ceres Seq. ID no. 12724573
  misc_feature (192)..(887): Homolog of NCBI NO: 34910588 NR Description: putative alpha-amylase [Oryza sativa (japonica
  misc_feature (62)..(194): Homolog of NCBI NO: 34910588 NR Description: putative alpha-amylase [Oryza sativa (japonica
  misc_feature (494)..(884): Homolog of NCBI NO: 38346145 NR Description: OSJNBb0118P14.5 [Oryza sativa (japonica
  misc_feature (494)..(884): Homolog of NCBI NO: 15222959 NR Description: alpha-amylase, putative; protein id: At1g76130.1,
  misc_feature (481)..(884): Homolog of NCBI NO: 25289325 NR Description: protein T23E18.6 [imported] - Arabidopsis >gi|6573706|gb|AAF17626.1|AC009978_2 T23E18.6 [Arabidopsis
  misc_feature (493)..(885): Homolog of NCBI NO: 1220453 NR Description: alpha-amylase
  misc_feature (487)..(884): Homolog of NCBI NO: 7532799 NR Description: alpha-amylase [Malus x domestica]
  misc_feature (493)..(885): Homolog of NCBI NO: 3769330 NR Description: alpha-amylase [Phaseolus vulgaris]
  misc_feature (497)..(885): Homolog of NCBI NO: 228404 NR Description: alpha amylase
  misc_feature (493)..(884): Homolog of NCBI NO: 23027235 NR Description: hypothetical protein [Microbulbifer degradans
MSTVPIESLLHHSYLRHNSKVNRGNRSFIPISLNLRSHFTSNKLLHSIGKSVGVSSMNKSPVAIRATSSDTAVVETAQSDDVIFKEIFPVQRIEKAEGKIYVRLKEVKEKNWELSVGCSIPGKWILHWGVSYVGDTGSEWDQPPEDMRPPGSIAIKDYAIETPLKKLSEGDSFFEVAINLNLESSVAALNFVLKDEETGAWYQHKGRDFKVPLVDDVPDNGNLIGAKKGFGALGQLSNIPLKQDKSSAETDSIEERKGLQEFYEEMPISKRVADDNSVSVTARKCPETSKNIVSIETDLPGDVTVHWGVCKNGTKKWEIPSEPYPEETSLFKNKALRTRLQRKDDGNGSFGLFSLDGKLEGLCFVLKLNENTWLNYRGEDFYVPFLTSSSSPVETEAAQVSKPKRKTDKEVSASGFTKEIITEIRNLAIDISSHKNQKTNVKEVQENILQEIEKLAAEAYSIFRSTTPAFSEEGVLEAEADKPDIKISSGTGSGFEILCQGFNWESNKSGRWYLELQEKADELASLGFTVLWLPPPTESVSPEGYMPKDLYNLNSRYGTIDELKDTVKKFHKVGIKVLGDAVLNHRCAHFKNQNGVWNLFGGRLNWDDRAVVADDPHFQGRGNKSSGDNFHAAPNIDHSQDFVRKDIKEWLCWMMEEVGYDGWRLDFVRGFWGGYVKDYMDASKPYFAVGEYWDSLSYTYGEMDYNQDAHRQRIVDWINATSGAAGAFDVTTKGILHTALQKCEYWRLSDPKGKPPGVVGWWPSRAVTFIENHDTGSTQGHWRFPEGKEMQGYAYILTHPGTPAVFFDHIFSDYHSEIAALLSLRNRQKLHCRSEVNIDKSERDVYAAIIDEKVAMKIGPGHYEPPNGSQNWSVAVEGRDYKVWETS

SEQ ID NO: 90627 - protein, 831 aa, Arabidopsis thaliana
  peptide (1)..(831): Ceres Seq. ID no. 12724574
  misc_feature (136)..(831): Homolog of NCBI NO: 34910588 NR Description: putative alpha-amylase [Oryza sativa (japonica
  misc_feature (6)..(138): Homolog of NCBI NO: 34910588 NR Description: putative alpha-amylase [Oryza sativa (japonica
  misc_feature (438)..(828): Homolog of NCBI NO: 38346145 NR Description: OSJNBb0118P14.5 [Oryza sativa (japonica
  misc_feature (438)..(828): Homolog of NCBI NO: 15222959 NR Description: alpha-amylase, putative; protein id: At1g76130.1,
  misc_feature (425)..(828): Homolog of NCBI NO: 25289325 NR Description: protein T23E18.6 [imported] - Arabidopsis >gi|6573706|gb|AAF17626.1|AC009978_2 T23E18.6 [Arabidopsis
  misc_feature (437)..(829): Homolog of NCBI NO: 1220453 NR Description: alpha-amylase
  misc_feature (431)..(828): Homolog of NCBI NO: 7532799 NR Description: alpha-amylase [Malus x domestica]
  misc_feature (437)..(829): Homolog of NCBI NO: 3769330 NR Description: alpha-amylase [Phaseolus vulgaris]
  misc_feature (441)..(829): Homolog of NCBI NO: 228404 NR Description: alpha amylase
  misc_feature (437)..(828): Homolog of NCBI NO: 23027235 NR Description: hypothetical protein [Microbulbifer degradans
MNKSPVAIRATSSDTAVVETAQSDDVIFKEIFPVQRIEKAEGKIYVRLKEVKEKNWELSVGCSIPGKWILHWGVSYVGDTGSEWDQPPEDMRPPGSIAIKDYAIETPLKKLSEGDSFFEVAINLNLESSVAALNFVLKDEETGAWYQHKGRDFKVPLVDDVPDNGNLIGAKKGFGALGQLSNIPLKQDKSSAETDSIEERKGLQEFYEEMPISKRVADDNSVSVTARKCPETSKNIVSIETDLPGDVTVHWGVCKNGTKKWEIPSEPYPEETSLFKNKALRTRLQRKDDGNGSFGLFSLDGKLEGLCFVLKLNENTWLNYRGEDFYVPFLTSSSSPVETEAAQVSKPKRKTDKEVSASGFTKEIITEIRNLAIDISSHKNQKTNVKEVQENILQEIEKLAAEAYSIFRSTTPAFSEEGVLEAEADKPDIKISSGTGSGFEILCQGFNWESNKSGRWYLELQEKADELASLGFTVLWLPPPTESVSPEGYMPKDLYNLNSRYGTIDELKDTVKKFHKVGIKVLGDAVLNHRCAHFKNQNGVWNLFGGRLNWDDRAVVADDPHFQGRGNKSSGDNFHAAPNIDHSQDFVRKDIKEWLCWMMEEVGYDGWRLDFVRGFWGGYVKDYMDASKPYFAVGEYWDSLSYTYGEMDYNQDAHRQRIVDWINATSGAAGAFDVTTKGILHTALQKCEYWRLSDPKGKPPGVVGWWPSRAVTFIENHDTGSTQGHWRFPEGKEMQGYAYILTHPGTPAVFFDHIFSDYHSEIAALLSLRNRQKLHCRSEVNIDKSERDVYAAIIDEKVAMKIGPGHYEPPNGSQNWSVAVEGRDYKVWETS

SEQ ID NO: 90628 - DNA, 1995 bp, Arabidopsis thaliana
  misc_feature (1)..(1995): Ceres Seq. ID no. 12724575
  misc_feature: MA Experiment ID: 20000227 Result: Down-regulated in Transcription
  misc_feature: MA Experiment 20000227 PARAMETER Experiment Name: At_Root-Tips-vs-Tops_P Parameter: Tissue Value: Root Tips vs. Root Tops
  misc_feature: MA Experiment ID: 20000234 Result: Down-regulated in Transcription
  misc_feature: MA Experiment 20000234 PARAMETER Experiment Name: At_Siliques_P Parameter: Age (day) Value: 21
  misc_feature: MA Experiment 20000234 PARAMETER Experiment Name: At_Siliques_P Parameter: Organism Value: A. thaliana
  misc_feature: MA Experiment 20000234 PARAMETER Experiment Name: At_Siliques_P Parameter: Plant Line Value: WS
  misc_feature: MA Experiment 20000234 PARAMETER Experiment Name: At_Siliques_P Parameter: Tissue Value: Less Than 5mm Siliques vs. Whole Plant
  misc_feature: MA Experiment ID: 20000264 Result: Down-regulated in Transcription
  misc_feature: MA Experiment 20000264 PARAMETER Experiment Name: At_Open_Flower_P Parameter: Age (day) Value: 21
  misc_feature: MA Experiment 20000264 PARAMETER Experiment Name: At_Open_Flower_P Parameter: Plant Line Value: WS
  misc_feature: MA Experiment 20000264 PARAMETER Experiment Name: At_Open_Flower_P Parameter: Tissue Value: Open Flower vs. Whole Plant
  misc_feature: MA Experiment ID: 20000265 Result: Down-regulated in Transcription
  misc_feature: MA Experiment 20000265 PARAMETER Experiment Name: At_Open_Flower_P Parameter: Age (day) Value: 21
  misc_feature: MA Experiment 20000265 PARAMETER Experiment Name: At_Open_Flower_P Parameter: Plant Line Value: WS
  misc_feature: MA Experiment 20000265 PARAMETER Experiment Name: At_Open_Flower_P Parameter: Tissue Value: Closed Flower vs. Whole Plant
  misc_feature: MA Experiment ID: 20000286 Result: Down-regulated in Transcription
  misc_feature: MA Experiment 20000286 PARAMETER Experiment Name: At_Open_Flower_P Parameter: Age (day) Value: 21
  misc_feature: MA Experiment 20000286 PARAMETER Experiment Name: At_Open_Flower_P Parameter: Plant Line Value: WS
  misc_feature: MA Experiment 20000286 PARAMETER Experiment Name: At_Open_Flower_P Parameter: Tissue Value: Half Open vs. Whole Plant
  misc_feature: MA Experiment ID: 20000443 Result: Up-regulated in Transcription
  misc_feature: MA Experiment 20000443 PARAMETER Experiment Name: At_1uM_BR-BRZ__P Parameter: Tissue Value: Shoot Apices
  misc_feature: MA Experiment 20000443 PARAMETER Experiment Name: At_1uM_BR-BRZ__P Parameter: Treatment Value: 1uM BRZ vs. No Treatment
  misc_feature: MA Experiment ID: 20000451 Result: Up-regulated in Transcription
  misc_feature: MA Experiment 20000451 PARAMETER Experiment Name: At_CS6879_Shoots-Roots_P Parameter: Age (day) Value: 14
  misc_feature: MA Experiment 20000451 PARAMETER Experiment Name: At_CS6879_Shoots-Roots_P Parameter: Organism Value: A. thaliana
  misc_feature: MA Experiment 20000451 PARAMETER Experiment Name: At_CS6879_Shoots-Roots_P Parameter: Plant Line Value: CS6879 vs. WS
  misc_feature: MA Experiment 20000451 PARAMETER Experiment Name: At_CS6879_Shoots-Roots_P Parameter: Tissue Value: Roots
  misc_feature: MA Experiment ID: 20000794 Result: Down-regulated in Transcription
  misc_feature: MA Experiment 20000794 PARAMETER Experiment Name: At_Petals_P Parameter: Age (day) Value: 23-25 days
  misc_feature: MA Experiment 20000794 PARAMETER Experiment Name: At_Petals_P Parameter: Plant Line Value: WS
  misc_feature: MA Experiment 20000794 PARAMETER Experiment Name: At_Petals_P Parameter: Tissue Value: Petals vs. Whole plant
acctcaaagtttgagagaaagaaagagagagaatggaagtggaagaagaggtctcaagatgggaaggctacgccgattggagaaacagagcagccgtgaaaggccgtcacggtggcatgctcgccgcctctttcgtcttagtggtggagatattagagaatctagcgtatttggcgaatgcgagtaatcttgtgctatacctaagagaatacatgcacatgtctccatcaaaatcggcaaatgacgtcaccaatttcatgggcacagcttttctcctagctctcctcggtggtttcctctccgacgctttcttctccacttttcaaatcttcctcatctcagcttccatcgagtttttgggattgatcatactcacaattcaagctcggacaccatccttaatgcctccatcgtgcgatagtcccacatgtgaagaagtgagtggttcgaaggcagcgatgctattcgtggggttgtaccttgtagctttgggtgtgggagggatcaaaggttcattagcatctcacggagcagaacagtttgatgagagtacacctaaaggtcggaaacaaaggtcaacgttctttaactacttcgtgttttgtcttgcttgtggagcactagttgctgtcacgtttgtagtttggttagaagacaacaaaggatgggaatggggattcggtgtttctaccattgctatcttcgtctctattctcatctttctctctggatcaagattttataggaacaagattccatgtggaagtcctctcaccacaatcttgaaggttcttcttgcggcttcggttaagtgctgctcgagtggaagttcaagcaatgcggttgcgagtatgtccgtgagtccctcaaatcattgcgtatcaaaggggaaaaaagaagttgaatcacaaggagaattggaaaagccacgtcaagaagaagctttgcctcctcgggcacaactaactaacagtttgaaagtattaaatggagctgcggatgaaaaacctgtccatagattgttagaatgcacagtccaacaagtggaagatgtgaagattgtcttgaaaatgcttccgatatttgcttgcactatcatgcttaactgttgcttagctcagctctctacattctccgtccaacaagctgcttccatgaacacaaagataggaagcctaaagatacctccagcttccttaccgatcttccccgtcgttttcataatgatcctcgcacctatctacgaccatctcattatcccattcgctagaaaagctaccaagaccgaaacaggagtcactcatctacaaagaatcggagtaggtttagttctttcgatattagcaatggcggttgcagctctagttgagattaaacgaaagggagtggctaaagactccggcttgcttgactcgaaagaaaccttacccgtgactttcctatggatcgcacttcagtatcttttcctagggtcagccgatctattcacactagctggactactagagtatttcttcacggaagcaccttcctcaatgagatctctcgcaacatcgctctcgtgggcttctttggctatggggtattacctaagctcagtgatcgtgtccatagtaaacagcatcacaggaagctcagggaacacaccttggctcagaggaaaaagcataaaccgttacaaactagactacttctattggctaatgtgtgttcttagtgcagctaacttcttgcactacctcttttgggcaatgcgttacaagtatagatcaactggttcaagaagctaaaattggatgggcaacttttgagttttttttttgtttttaattagagcagaaaatgtttttacttgagcggctgttatataagagatgataaatgggggtaagtagtaatgttgtgatcaggtatatattggggtttgaagtttttatcgttggacaagtaatgtacagcgaatgatattaacttgctttaagtctttcttttgtt

SEQ ID NO: 90629 - protein, 585 aa, Arabidopsis thaliana
  peptide (1)..(585): Ceres Seq. ID no. 12724576
  misc_feature (97)..(514): Pfam Name: POT family Pfam Description: POT family
  misc_feature (1)..(585): Homolog of NCBI NO: 18409382 NR Description: nitrate transporter (NTL1); protein id: supported by cDNA: gi_17064753, supported by cDNA: gi_3377516 thaliana] >gi|23397158|gb|AAN31862.1| putative nitrate
  misc_feature (1)..(585): Homolog of NCBI NO: 17064754 NR Description: nitrate transporter (NTL1) [Arabidopsis thaliana]
  misc_feature (2)..(585): Homolog of NCBI NO: 25404844 NR Description: nitrate transporter (NTL1), 53025-56402 - Arabidopsis thaliana >gi|12325224|gb|AAG52554.1|AC010675_2
  misc_feature (1)..(585): Homolog of NCBI NO: 11358579 NR Description: nitrate transporter NTL1 [validated] - thaliana >gi|3377517|gb|AAC28086.1| nitrate transporter NTL1
  misc_feature (267)..(585): Homolog of NCBI NO: 22329803 NR Description: nitrate transporter, putative; protein id: supported by cDNA: gi_18175947, supported by cDNA: gi_20465362 thaliana] >gi|18175948|gb|AAL59956.1| putative nitrate
  misc_feature (1)..(281): Homolog of NCBI NO: 22329803 NR Description: nitrate transporter, putative; protein id: supported by cDNA: gi_18175947, supported by cDNA: gi_20465362 thaliana] >gi|18175948|gb|AAL59956.1| putative nitrate
  misc_feature (267)..(585): Homolog of NCBI NO: 25403281 NR Description: protein T7N9.10 [imported] - Arabidopsis thaliana
  misc_feature (6)..(281): Homolog of NCBI NO: 25403281 NR Description: protein T7N9.10 [imported] - Arabidopsis thaliana
  misc_feature (1)..(580): Homolog of NCBI NO: 15241938 NR Description: nitrate transporter NTL1 - like protein; protein
  misc_feature (1)..(580): Homolog of NCBI NO: 10177451 NR Description: nitrate transporter NTL1 [Arabidopsis thaliana]
MEVEEEVSRWEGYADWRNRAAVKGRHGGMLAASFVLVVEILENLAYLANASNLVLYLREYMHMSPSKSANDVTNFMGTAFLLALLGGFLSDAFFSTFQIFLISASIEFLGLIILTIQARTPSLMPPSCDSPTCEEVSGSKAAMLFVGLYLVALGVGGIKGSLASHGAEQFDESTPKGRKQRSTFFNYFVFCLACGALVAVTFVVWLEDNKGWEWGFGVSTIAIFVSILIFLSGSRFYRNKIPCGSPLTTILKVLLAASVKCCSSGSSSNAVASMSVSPSNHCVSKGKKEVESQGELEKPRQEEALPPRAQLTNSLKVLNGAADEKPVHRLLECTVQQVEDVKIVLKMLPIFACTIMLNCCLAQLSTFSVQQAASMNTKIGSLKIPPASLPIFPVVFIMILAPIYDHLIIPFARKATKTETGVTHLQRIGVGLVLSILAMAVAALVEIKRKGVAKDSGLLDSKETLPVTFLWIALQYLFLGSADLFTLAGLLEYFFTEAPSSMRSLATSLSWASLAMGYYLSSVIVSIVNSITGSSGNTPWLRGKSINRYKLDYFYWLMCVLSAANFLHYLFWAMRYKYRSTGSRS

SEQ ID NO: 90630 - protein, 557 aa, Arabidopsis thaliana; identical to SEQ ID NO: 88606
  peptide (1)..(557): Ceres Seq. ID no. 12724577
  misc_feature (69)..(486): Pfam Name: POT family Pfam Description: POT family
  misc_feature (1)..(557): Homolog of NCBI NO: 18409382 NR Description: nitrate transporter (NTL1); protein id: supported by cDNA: gi_17064753, supported by cDNA: gi_3377516 thaliana] >gi|23397158|gb|AAN31862.1| putative nitrate
  misc_feature (1)..(557): Homolog of NCBI NO: 17064754 NR Description: nitrate transporter (NTL1) [Arabidopsis thaliana]
  misc_feature (1)..(557): Homolog of NCBI NO: 25404844 NR Description: nitrate transporter (NTL1), 53025-56402 - Arabidopsis thaliana >gi|12325224|gb|AAG52554.1|AC010675_2
  misc_feature (1)..(557): Homolog of NCBI NO: 11358579 NR Description: nitrate transporter NTL1 [validated] - thaliana >gi|3377517|gb|AAC28086.1| nitrate transporter NTL1
  misc_feature (239)..(557): Homolog of NCBI NO: 22329803 NR Description: nitrate transporter, putative; protein id: supported by cDNA: gi_18175947, supported by cDNA: gi_20465362 thaliana] >gi|18175948|gb|AAL59956.1| putative nitrate
  misc_feature (1)..(253): Homolog of NCBI NO: 22329803 NR Description: nitrate transporter, putative; protein id: supported by cDNA: gi_18175947, supported by cDNA: gi_20465362 thaliana] >gi|18175948|gb|AAL59956.1| putative nitrate
  misc_feature (239)..(557): Homolog of NCBI NO: 25403281 NR Description: protein T7N9.10 [imported] - Arabidopsis thaliana
  misc_feature (1)..(253): Homolog of NCBI NO: 25403281 NR Description: protein T7N9.10 [imported] - Arabidopsis thaliana
  misc_feature (1)..(552): Homolog of NCBI NO: 15241938 NR Description: nitrate transporter NTL1 - like protein; protein
  misc_feature (1)..(552): Homolog of NCBI NO: 10177451 NR Description: nitrate transporter NTL1 [Arabidopsis thaliana]

SEQ ID NO: 90631 - protein, 525 aa, Arabidopsis thaliana
  peptide (1)..(525): Ceres Seq. ID no. 12724578
  misc_feature (37)..(454): Pfam Name: POT family Pfam Description: POT family
  misc_feature (1)..(525): Homolog of NCBI NO: 18409382 NR Description: nitrate transporter (NTL1); protein id: supported by cDNA: gi_17064753, supported by cDNA: gi_3377516 thaliana] >gi|23397158|gb|AAN31862.1| putative nitrate
  misc_feature (1)..(525): Homolog of NCBI NO: 17064754 NR Description: nitrate transporter (NTL1) [Arabidopsis thaliana]
  misc_feature (1)..(525): Homolog of NCBI NO: 25404844 NR Description: nitrate transporter (NTL1), 53025-56402 - Arabidopsis thaliana >gi|12325224|gb|AAG52554.1|AC010675_2
  misc_feature (1)..(525): Homolog of NCBI NO: 11358579 NR Description: nitrate transporter NTL1 [validated] - thaliana >gi|3377517|gb|AAC28086.1| nitrate transporter NTL1
  misc_feature (207)..(525): Homolog of NCBI NO: 22329803 NR Description: nitrate transporter, putative; protein id: supported by cDNA: gi_18175947, supported by cDNA: gi_20465362 thaliana] >gi|18175948|gb|AAL59956.1| putative nitrate
  misc_feature (1)..(221): Homolog of NCBI NO: 22329803 NR Description: nitrate transporter, putative; protein id: supported by cDNA: gi_18175947, supported by cDNA: gi_20465362 thaliana] >gi|18175948|gb|AAL59956.1| putative nitrate
  misc_feature (207)..(525): Homolog of NCBI NO: 25403281 NR Description: protein T7N9.10 [imported] - Arabidopsis thaliana
  misc_feature (1)..(221): Homolog of NCBI NO: 25403281 NR Description: protein T7N9.10 [imported] - Arabidopsis thaliana
  misc_feature (1)..(520): Homolog of NCBI NO: 15241938 NR Description: nitrate transporter NTL1 - like protein; protein
  misc_feature (1)..(520): Homolog of NCBI NO: 10177451 NR Description: nitrate transporter NTL1 [Arabidopsis thaliana]
MHMSPSKSANDVTNFMGTAFLLALLGGFLSDAFFSTFQIFLISASIEFLGLIILTIQARTPSLMPPSCDSPTCEEVSGSKAAMLFVGLYLVALGVGGIKGSLASHGAEQFDESTPKGRKQRSTFFNYFVFCLACGALVAVTFVVWLEDNKGWEWGFGVSTIAIFVSILIFLSGSRFYRNKIPCGSPLTTILKVLLAASVKCCSSGSSSNAVASMSVSPSNHCVSKGKKEVESQGELEKPRQEEALPPRAQLTNSLKVLNGAADEKPVHRLLECTVQQVEDVKIVLKMLPIFACTIMLNCCLAQLSTFSVQQAASMNTKIGSLKIPPASLPIFPVVFIMILAPIYDHLIIPFARKATKTETGVTHLQRIGVGLVLSILAMAVAALVEIKRKGVAKDSGLLDSKETLPVTFLWIALQYLFLGSADLFTLAGLLEYFFTEAPSSMRSLATSLSWASLAMGYYLSSVIVSIVNSITGSSGNTPWLRGKSINRYKLDYFYWLMCVLSAANFLHYLFWAMRYKYRSTGSRS

SEQ ID NO: 90632 - DNA, 1267 bp, Arabidopsis thaliana
  misc_feature (1)..(1267): Ceres Seq. ID no. 12724617
  misc_feature: MA Experiment ID: 20001905 Result: Down-regulated in Transcription
  misc_feature: MA Experiment 20001905 PARAMETER Experiment Name: At_Drought_Reproduction_P Parameter: Age (day) Value: 40
  misc_feature: MA Experiment 20001905 PARAMETER Experiment Name: At_Drought_Reproduction_P Parameter: Organism Value: A. thaliana
  misc_feature: MA Experiment 20001905 PARAMETER Experiment Name: At_Drought_Reproduction_P Parameter: Plant Line Value: WS
  misc_feature: MA Experiment 20001905 PARAMETER Experiment Name: At_Drought_Reproduction_P Parameter: Timepoint (day) Value: 10
  misc_feature: MA Experiment 20001905 PARAMETER Experiment Name: At_Drought_Reproduction_P Parameter: Tissue Value: Rosettes
  misc_feature: MA Experiment 20001905 PARAMETER Experiment Name: At_Drought_Reproduction_P Parameter: Treatment Value: Drought vs. No Drought
acagagagagagagacactaaaaccctaatctcttactcactgtctctcttcttcaatccatgtcttcaacacaagaagcgtctgttactgatttgcccgtgaagagacctagagaagcagaggaggacaataacggcggcgccatggaaacagagaacggtggaggagagataaaggagccttcttgtatgtcctctattattcctggatggttctctgagattagtcctatgtggccaggagaagcacattctctcaaggtagagaagattctattccaagggaaatcagattaccaggatgttattgttttccagtctgcaacatatggaaaggttttggttttggatggagtgattcaactcactgagagagatgaatgtgcgtatcaagaaatgatcactcatcttcctttgtgctctatctccaaccccaaaaaggtactggtgattggaggaggagatggaggagtcctgagggaagtggcacgtcatagttctgttgagcagattgacatttgtgaaatagataaaatggtggttgatgtggctaagcagtatttccctaatgtagcagttggatacgaggatcctcgtgtcaacctcatcattggcgatggtgttgctttcttgaagaacgctgctgaaggaacctatgatgcagttattgttgattcatctgatccaatcggtccagcaaaagagctatttgagaaacctttctttgagtcagtgaatagagctcttcgtcctggtggagttgtgtgcacacaagctgaaagcttgtggcttcacatggatatcattgaagacattgtttctaattgccgtgacatctttaaaggatctgttaactacgcttggaccagtgttccaacttacccgagtggagtcattggattcatgctttgttcatctgaaggaccacaagtcgatttcaagaagccagtgagtctaatcgatactgatgaaagctctatcaaatcacactgtcccttgaagtattacaacgctgagattcactcagctgctttctgcttgccctcttttgctaagaaggtgattgattcgaaagccaactagaaaagagaagagaaatcatttgctttagagaaacttcatgtggaagtgataatatgatgatacaatgatcctttggaaaaaaataaagaagttttaatttttagaatgtaatgttctttcacctgcaatgttatgtgactgcactgagctatcaatctctttttataagcattacacatatttc

SEQ ID NO: 90633 - protein, 340 aa, Arabidopsis thaliana
  peptide (1)..(340): Ceres Seq. ID no. 12724618
  misc_feature (50)..(295): Pfam Name: Spermine/spermidine synthase Pfam Description: Spermine/spermidine synthase
  misc_feature (1)..(340): Homolog of NCBI NO: 15223115 NR Description: spermidine synthase, putative; protein id: supported by cDNA: gi_14030636 [Arabidopsis thaliana] Spermidine synthase 2 (Putrescine aminopropyltransferase 2)
  misc_feature (51)..(340): Homolog of NCBI NO: 2821961 NR Description: spermidine synthase [Arabidopsis thaliana]
  misc_feature (5)..(340): Homolog of NCBI NO: 15220885 NR Description: putative spermidine synthase; protein id: supported by cDNA: gi_17065033, supported by cDNA: gi_20260023 thaliana] >gi|12230014|sp|Q9ZUB3|SPD1_ARATH Spermidine gb|F14442
  misc_feature (10)..(338): Homolog of NCBI NO: 12230013 NR Description: Spermidine synthase (Putrescine (SPDSY) >gi|4138109|emb|CAA07020.1| spermidine synthase
  misc_feature (10)..(338): Homolog of NCBI NO: 15150055 NR Description: spermidine synthase [Solanum tuberosum]
  misc_feature (11)..(339): Homolog of NCBI NO: 23495354 NR Description: spermidine synthase [Malus x domestica]
  misc_feature (39)..(338): Homolog of NCBI NO: 6094327 NR Description: Spermidine synthase 1 (Putrescine
  misc_feature (40)..(339): Homolog of NCBI NO: 6094330 NR Description: Spermidine synthase 2 (Putrescine
  misc_feature (1)..(339): Homolog of NCBI NO: 23495352 NR Description: spermidine synthase [Malus x domestica]
  misc_feature (10)..(340): Homolog of NCBI NO: 12229958 NR Description: Spermidine synthase 1 (Putrescine
MSSTQEASVTDLPVKRPREAEEDNNGGAMETENGGGEIKEPSCMSSIIPGWFSEISPMWPGEAHSLKVEKILFQGKSDYQDVIVFQSATYGKVLVLDGVIQLTERDECAYQEMITHLPLCSISNPKKVLVIGGGDGGVLREVARHSSVEQIDICEIDKMVVDVAKQYFPNVAVGYEDPRVNLIIGDGVAFLKNAAEGTYDAVIVDSSDPIGPAKELFEKPFFESVNRALRPGGVVCTQAESLWLHMDIIEDIVSNCRDIFKGSVNYAWTSVPTYPSGVIGFMLCSSEGPQVDFKKPVSLIDTDESSIKSHCPLKYYNAEIHSAAFCLPSFAKKVIDSKAN

SEQ ID NO: 90634 - protein, 312 aa, Arabidopsis thaliana
  peptide (1)..(312): Ceres Seq. ID no. 12724619
  misc_feature (22)..(267): Pfam Name: Spermine/spermidine synthase Pfam Description: Spermine/spermidine synthase
  misc_feature (1)..(312): Homolog of NCBI NO: 15223115 NR Description: spermidine synthase, putative; protein id: supported by cDNA: gi_14030636 [Arabidopsis thaliana] Spermidine synthase 2 (Putrescine aminopropyltransferase 2)
  misc_feature (23)..(312): Homolog of NCBI NO: 2821961 NR Description: spermidine synthase [Arabidopsis thaliana]
  misc_feature (1)..(312): Homolog of NCBI NO: 15220885 NR Description: putative spermidine synthase; protein id: supported by cDNA: gi_17065033, supported by cDNA: gi_20260023 thaliana] >gi|12230014|sp|Q9ZUB3|SPD1_ARATH Spermidine gb|F14442
  misc_feature (1)..(310): Homolog of NCBI NO: 12230013 NR Description: Spermidine synthase (Putrescine (SPDSY) >gi|4138109|emb|CAA07020.1| spermidine synthase
  misc_feature (1)..(310): Homolog of NCBI NO: 15150055 NR Description: spermidine synthase [Solanum tuberosum]
  misc_feature (1)..(311): Homolog of NCBI NO: 23495354 NR Description: spermidine synthase [Malus x domestica]
  misc_feature (11)..(310): Homolog of NCBI NO: 6094327 NR Description: Spermidine synthase 1 (Putrescine
  misc_feature (12)..(311): Homolog of NCBI NO: 6094330 NR Description: Spermidine synthase 2 (Putrescine
  misc_feature (1)..(311): Homolog of NCBI NO: 23495352 NR Description: spermidine synthase [Malus x domestica]
  misc_feature (1)..(312): Homolog of NCBI NO: 12229958 NR Description: Spermidine synthase 1 (Putrescine
METENGGGEIKEPSCMSSIIPGWFSEISPMWPGEAHSLKVEKILFQGKSDYQDVIVFQSATYGKVLVLDGVIQLTERDECAYQEMITHLPLCSISNPKKVLVIGGGDGGVLREVARHSSVEQIDICEIDKMVVDVAKQYFPNVAVGYEDPRVNLIIGDGVAFLKNAAEGTYDAVIVDSSDPIGPAKELFEKPFFESVNRALRPGGVVCTQAESLWLHMDIIEDIVSNCRDIFKGSVNYAWTSVPTYPSGVIGFMLCSSEGPQVDFKKPVSLIDTDESSIKSHCPLKYYNAEIHSAAFCLPSFAKKVIDSKAN

SEQ ID NO: 90635 - protein, 297 aa, Arabidopsis thaliana
  peptide (1)..(297): Ceres Seq. ID no. 12724620
  misc_feature (7)..(252): Pfam Name: Spermine/spermidine synthase Pfam Description: Spermine/spermidine synthase
  misc_feature (1)..(297): Homolog of NCBI NO: 15223115 NR Description: spermidine synthase, putative; protein id: supported by cDNA: gi_14030636 [Arabidopsis thaliana] Spermidine synthase 2 (Putrescine aminopropyltransferase 2)
  misc_feature (8)..(297): Homolog of NCBI NO: 2821961 NR Description: spermidine synthase [Arabidopsis thaliana]
  misc_feature (1)..(297): Homolog of NCBI NO: 15220885 NR Description: putative spermidine synthase; protein id: supported by cDNA: gi_17065033, supported by cDNA: gi_20260023 thaliana] >gi|12230014|sp|Q9ZUB3|SPD1_ARATH Spermidine gb|F14442
  misc_feature (1)..(295): Homolog of NCBI NO: 12230013 NR Description: Spermidine synthase (Putrescine (SPDSY) >gi|4138109|emb|CAA07020.1| spermidine synthase
  misc_feature (1)..(295): Homolog of NCBI NO: 15150055 NR Description: spermidine synthase [Solanum tuberosum]
  misc_feature (1)..(296): Homolog of NCBI NO: 23495354 NR Description: spermidine synthase [Malus x domestica]
  misc_feature (1)..(295): Homolog of NCBI NO: 6094327 NR Description: Spermidine synthase 1 (Putrescine
  misc_feature (1)..(296): Homolog of NCBI NO: 6094330 NR Description: Spermidine synthase 2 (Putrescine
  misc_feature (1)..(296): Homolog of NCBI NO: 23495352 NR Description: spermidine synthase [Malus x domestica]
  misc_feature (1)..(297): Homolog of NCBI NO: 12229958 NR Description: Spermidine synthase 1 (Putrescine
MSSIIPGWFSEISPMWPGEAHSLKVEKILFQGKSDYQDVIVFQSATYGKVLVLDGVIQLTERDECAYQEMITHLPLCSISNPKKVLVIGGGDGGVLREVARHSSVEQIDICEIDKMVVDVAKQYFPNVAVGYEDPRVNLIIGDGVAFLKNAAEGTYDAVIVDSSDPIGPAKELFEKPFFESVNRALRPGGVVCTQAESLWLHMDIIEDIVSNCRDIFKGSVNYAWTSVPTYPSGVIGFMLCSSEGPQVDFKKPVSLIDTDESSIKSHCPLKYYNAEIHSAAFCLPSFAKKVIDSKAN

SEQ ID NO: 90636 - DNA, 918 bp, Arabidopsis thaliana
  misc_feature (1)..(918): Ceres Seq. ID no. 12724628
  misc_feature: MA Experiment ID: 20000173 Result: Up-regulated in Transcription
  misc_feature: MA Experiment 20000173 PARAMETER Experiment Name: At_42deg_Heat_P Parameter: Age (day) Value: 14
  misc_feature: MA Experiment 20000173 PARAMETER Experiment Name: At_42deg_Heat_P Parameter: Organism Value: A. thaliana
  misc_feature: MA Experiment 20000173 PARAMETER Experiment Name: At_42deg_Heat_P Parameter: Plant Line Value: WS
  misc_feature: MA Experiment 20000173 PARAMETER Experiment Name: At_42deg_Heat_P Parameter: Temperature (deg C) Value: 42 vs. 22
  misc_feature: MA Experiment 20000173 PARAMETER Experiment Name: At_42deg_Heat_P Parameter: Timepoint (hr) Value: 6
  misc_feature: MA Experiment 20000173 PARAMETER Experiment Name: At_42deg_Heat_P Parameter: Tissue Value: Aerial
  misc_feature: MA Experiment ID: 20000180 Result: Down-regulated in Transcription
  misc_feature: MA Experiment 20000180 PARAMETER Experiment Name: At_Germinating_Seeds_P Parameter: Age (hr) Value: 24 vs. 0
  misc_feature: MA Experiment 20000180 PARAMETER Experiment Name: At_Germinating_Seeds_P Parameter: Tissue Value: Germinating Seeds
atggcggcacaagtcgagatcgaagatcaagaatccgtcacgaatttagacaacggcgaaatcatcaaccccatctccgacaacgcacctaacttctccggcgatgcaacgattcttctccgtgaagccaccttcgaacacaacctcatcaaaaactgtttcctctccggaatgggctcattcgccaccgaaacaacaatcgtcaccgtacgaaaaatcttaacgcagagattaatcacaacgaaagctaaattcgctgtgttcaagcttttcacagaagctatgaagaggaagaacaacggttacgcgaatattaggtacggttggtactctggttctaaagaagagatcgatcgtgttattacgtatgggtttagtaatagagagatcaagaaagtcgaaaacgacgtcggatctcacggtgttggaattcatcttgttcatcatcgttactctctcgctgcggctttagttggtgaaggtgatgaagaagggatcaagaatattctcttatgccgtgtgattcttggtaaaccggaacaaattgtgaccggttctaaacaatcttacccaagttcaaaccaatttgattctggtgttgataatcttgagaatccgagaaaatatgtgatttggagttgtaacatgaattcttacattcttccaacttatatcgtcagtttcaaatctcatcttctcagaggtctaattggaagagcaaggtcaccatgtgttagcttctctgttcttatgtcaattctttcaaagtcacttgacgctgcaagaatgaacttgattttgactagttatgatgattttaggaaacggaaactgaggagagagcagctagttaggaagattagggaagtggttggagacaatcttcttttcaagatactcaagaatcagaggcgttaa

SEQ ID NO: 90637 - protein, 305 aa, Arabidopsis thaliana
  peptide (1)..(305): Ceres Seq. ID no. 12724629
  misc_feature (1)..(305): Homolog of NCBI NO: 15223159 NR Description: hypothetical protein; protein id: At1g70440.1
  misc_feature (1)..(290): Homolog of NCBI NO: 7485680 NR Description: hypothetical protein F17O7.2 - Arabidopsis
  misc_feature (1)..(304): Homolog of NCBI NO: 15220787 NR Description: hypothetical protein; protein id: At1g23550.1
  misc_feature (1)..(304): Homolog of NCBI NO: 8778582 NR Description: F28C11.18 [Arabidopsis thaliana]
  misc_feature (1)..(144): Homolog of NCBI NO: 12325040 NR Description: hypothetical protein, 3' partial; 433-1
  misc_feature (9)..(301): Homolog of NCBI NO: 21592445 NR Description: unknown [Arabidopsis thaliana]
  misc_feature (9)..(301): Homolog of NCBI NO: 15241862 NR Description: putative protein; protein id: At5g62520.1, by cDNA: 23920., supported by cDNA: gi_15450638, supported by gi_17386159 [Arabidopsis thaliana] >gi|10178083|dbj|BAB11502.1|
  misc_feature (51)..(238): Homolog of NCBI NO: 38345627 NR Description: OSJNBb0004A17.7 [Oryza sativa (japonica
  misc_feature (242)..(301): Homolog of NCBI NO: 38345627 NR Description: OSJNBb0004A17.7 [Oryza sativa (japonica
  misc_feature (50)..(229): Homolog of NCBI NO: 37537150 NR Description: putative CEO protein [Oryza sativa (japonica group)] >gi|18057156|gb|AAL58179.1| putative CEO protein [Oryza
MAAQVEIEDQESVTNLDNGEIINPISDNAPNFSGDATILLREATFEHNLIKNCFLSGMGSFATETTIVTVRKILTQRLITTKAKFAVFKLFTEAMKRKNNGYANIRYGWYSGSKEEIDRVITYGFSNREIKKVENDVGSHGVGIHLVHHRYSLAAALVGEGDEEGIKNILLCRVILGKPEQIVTGSKQSYPSSNQFDSGVDNLENPRKYVIWSCNMNSYILPTYIVSFKSHLLRGLIGRARSPCVSFSVLMSILSKSLDAARMNLILTSYDDFRKRKLRREQLVRKIREVVGDNLLFKILKNQRR

SEQ ID NO: 90638 - protein, 248 aa, Arabidopsis thaliana
  peptide (1)..(248): Ceres Seq. ID no. 12724630
  misc_feature (1)..(248): Homolog of NCBI NO: 15223159 NR Description: hypothetical protein; protein id: At1g70440.1
  misc_feature (1)..(233): Homolog of NCBI NO: 7485680 NR Description: hypothetical protein F17O7.2 - Arabidopsis
  misc_feature (1)..(247): Homolog of NCBI NO: 15220787 NR Description: hypothetical protein; protein id: At1g23550.1
  misc_feature (1)..(247): Homolog of NCBI NO: 8778582 NR Description: F28C11.18 [Arabidopsis thaliana]
  misc_feature (1)..(87): Homolog of NCBI NO: 12325040 NR Description: hypothetical protein, 3' partial; 433-1
  misc_feature (1)..(244): Homolog of NCBI NO: 21592445 NR Description: unknown [Arabidopsis thaliana]
  misc_feature (1)..(244): Homolog of NCBI NO: 15241862 NR Description: putative protein; protein id: At5g62520.1, by cDNA: 23920., supported by cDNA: gi_15450638, supported by gi_17386159 [Arabidopsis thaliana] >gi|10178083|dbj|BAB11502.1|
  misc_feature (1)..(181): Homolog of NCBI NO: 38345627 NR Description: OSJNBb0004A17.7 [Oryza sativa (japonica
  misc_feature (185)..(244): Homolog of NCBI NO: 38345627 NR Description: OSJNBb0004A17.7 [Oryza sativa (japonica
  misc_feature (1)..(172): Homolog of NCBI NO: 37537150 NR Description: putative CEO protein [Oryza sativa (japonica group)] >gi|18057156|gb|AAL58179.1| putative CEO protein [Oryza
MGSFATETTIVTVRKILTQRLITTKAKFAVFKLFTEAMKRKNNGYANIRYGWYSGSKEEIDRVITYGFSNREIKKVENDVGSHGVGIHLVHHRYSLAAALVGEGDEEGIKNILLCRVILGKPEQIVTGSKQSYPSSNQFDSGVDNLENPRKYVIWSCNMNSYILPTYIVSFKSHLLRGLIGRARSPCVSFSVLMSILSKSLDAARMNLILTSYDDFRKRKLRREQLVRKIREVVGDNLLFKILKNQRR

SEQ ID NO: 90639 - protein, 211 aa, Arabidopsis thaliana
  peptide (1)..(211): Ceres Seq. ID no. 12724631
  misc_feature (1)..(211): Homolog of NCBI NO: 15223159 NR Description: hypothetical protein; protein id: At1g70440.1
  misc_feature (1)..(196): Homolog of NCBI NO: 7485680 NR Description: hypothetical protein F17O7.2 - Arabidopsis
  misc_feature (1)..(210): Homolog of NCBI NO: 15220787 NR Description: hypothetical protein; protein id: At1g23550.1
  misc_feature (1)..(210): Homolog of NCBI NO: 8778582 NR Description: F28C11.18 [Arabidopsis thaliana]
  misc_feature (1)..(50): Homolog of NCBI NO: 12325040 NR Description: hypothetical protein, 3' partial; 433-1
  misc_feature (1)..(207): Homolog of NCBI NO: 21592445 NR Description: unknown [Arabidopsis thaliana]
  misc_feature (1)..(207): Homolog of NCBI NO: 15241862 NR Description: putative protein; protein id: At5g62520.1, by cDNA: 23920., supported by cDNA: gi_15450638, supported by gi_17386159 [Arabidopsis thaliana] >gi|10178083|dbj|BAB11502.1|
  misc_feature (1)..(144): Homolog of NCBI NO: 38345627 NR Description: OSJNBb0004A17.7 [Oryza sativa (japonica
  misc_feature (148)..(207): Homolog of NCBI NO: 38345627 NR Description: OSJNBb0004A17.7 [Oryza sativa (japonica
  misc_feature (1)..(135): Homolog of NCBI NO: 37537150 NR Description: putative CEO protein [Oryza sativa (japonica group)] >gi|18057156|gb|AAL58179.1| putative CEO protein [Oryza
MKRKNNGYANIRYGWYSGSKEEIDRVITYGFSNREIKKVENDVGSHGVGIHLVHHRYSLAAALVGEGDEEGIKNILLCRVILGKPEQIVTGSKQSYPSSNQFDSGVDNLENPRKYVIWSCNMNSYILPTYIVSFKSHLLRGLIGRARSPCVSFSVLMSILSKSLDAARMNLILTSYDDFRKRKLRREQLVRKIREVVGDNLLFKILKNQRR

SEQ ID NO: 90640 - DNA, 1185 bp, Arabidopsis thaliana
  misc_feature (1)..(1185): Ceres Seq. ID no. 12724632
  misc_feature: MA Experiment ID: 20000180 Result: Up-regulated in Transcription
  misc_feature: MA Experiment 20000180 PARAMETER Experiment Name: At_Germinating_Seeds_P Parameter: Age (hr) Value: 24 vs. 0
  misc_feature: MA Experiment 20000180 PARAMETER Experiment Name: At_Germinating_Seeds_P Parameter: Tissue Value: Germinating Seeds
  misc_feature: MA Experiment ID: 20000227 Result: Up-regulated in Transcription
  misc_feature: MA Experiment 20000227 PARAMETER Experiment Name: At_Root-Tips-vs-Tops_P Parameter: Tissue Value: Root Tips vs. Root Tops
atgtggagattaaagaatcagaagaagaaagaaacggcagattcgccgagttcttctccaacagcaccgtcagtcgattcagcggtgatgggaagtggtcagactcattttacctatgaagagctagaggacataacagaagggttttctaagcaaaacatacttggagaaggaggttttggttgtgtctacaaaggtaaactaaaagatggaaaacttgttgctgttaagcagcttaaggttggtagcggacaaggagaccgtgagtttaaggcggaggttgagattattagccgtgttcatcatcgccatttggtatcgcttgttggatactgcattgcggattcagagagattgcttatctatgagtatgttcctaaccaaacattggagcatcatttgcatgggaagggtaggccagtgcttgaatgggctaggagagtcagaatcgctatagttctgccaaaggtttggcgtatttgcacgaagactgtaagtcacccaaaaatcattcacagggacataaagtccgctaacatcttgctggacgatgagtttgaagttcaggttgctgactttggacttgccaaagtcaatgatacaacacaaactcatgtctcaactcgcgttatgggaaccttcgggtacttggcaccagaatatgcacaaagtggacaacttactgatagatcagatgttttctcgtttggagttgttctcttagagcttataactggacgcaaacctgttgaccggaaccagcctttgggagaagagagtttggttggatgggctcgtccactacttaaaaaagccattgagaccggtgatttcagtgaactagttgatagacggctcgaaaagcattacgtgaagaatgaagttttcagaatgattgaaacggctgctgcttgtgttaggtattcaggtccaaaacgtccacgcatggttcaggttttgagagcactagatagtgaaggagacatgggagatatctgcaatggaatcaaagtgggacaaagcagtacttgtgacgactctggtcagaatcatagtgtgataaaggacgtcgggtctataggaagaggaggaatggtggtatcaggggtgagggtggtcacacgtttgatggttgatgcttatcataatcggcacgagggaaagaaagcagagagaagaatctga

SEQ ID NO: 90641 - protein, 394 aa, Arabidopsis thaliana
  peptide (1)..(394): Ceres Seq. ID no. 12724633
  misc_feature (1)..(394): Homolog of NCBI NO: 15223160 NR Description: putative protein kinase; protein id: At1g70450.1
  misc_feature (1)..(319): Homolog of NCBI NO: 7434323 NR Description: protein kinase homolog F17O7.1 - Arabidopsis >gi|3176673|gb|AAC18796.1| Similar to serine/threonine kinase
  misc_feature (19)..(355): Homolog of NCBI NO: 15223161 NR Description: putative protein kinase; protein id: At1g70460.1
  misc_feature (26)..(189): Homolog of NCBI NO: 15220786 NR Description: Pto kinase interactor, putative; protein id:
  misc_feature (216)..(355): Homolog of NCBI NO: 15220786 NR Description: Pto kinase interactor, putative; protein id:
  misc_feature (26)..(355): Homolog of NCBI NO: 15218591 NR Description: protein kinase, putative; protein id: At1g10620.1
  misc_feature (216)..(355): Homolog of NCBI NO: 8778584 NR Description: F28C11.17 [Arabidopsis thaliana]
  misc_feature (26)..(124): Homolog of NCBI NO: 8778584 NR Description: F28C11.17 [Arabidopsis thaliana]
  misc_feature (136)..(189): Homolog of NCBI NO: 8778584 NR Description: F28C11.17 [Arabidopsis thaliana]
  misc_feature (26)..(355): Homolog of NCBI NO: 25518375 NR Description: hypothetical protein F5O8.10 - Arabidopsis
MWRLKNQKKKETADSPSSSPTAPSVDSAVMGSGQTHFTYEELEDITEGFSKQNILGEGGFGCVYKGKLKDGKLVAVKQLKVGSGQGDREFKAEVEIISRVHHRHLVSLVGYCIADSERLLIYEYVPNQTLEHHLHGKGRPVLEWARRVRIAIVLPKVWRICTKTVSHPKIIHRDIKSANILLDDEFEVQVADFGLAKVNDTTQTHVSTRVMGTFGYLAPEYAQSGQLTDRSDVFSFGVVLLELITGRKPVDRNQPLGEESLVGWARPLLKKAIETGDFSELVDRRLEKHYVKNEVFRMIETAAACVRYSGPKRPRMVQVLRALDSEGDMGDICNGIKVGQSSTCDDSGQNHSVIKDVGSIGRGGMVVSGVRVVTRLMVDAYHNRHEGKKAERRI

SEQ ID NO: 90642 - protein, 365 aa, Arabidopsis thaliana
  peptide (1)..(365): Ceres Seq. ID no. 12724634
  misc_feature (1)..(365): Homolog of NCBI NO: 15223160 NR Description: putative protein kinase; protein id: At1g70450.1
  misc_feature (1)..(290): Homolog of NCBI NO: 7434323 NR Description: protein kinase homolog F17O7.1 - Arabidopsis >gi|3176673|gb|AAC18796.1| Similar to serine/threonine kinase
  misc_feature (1)..(326): Homolog of NCBI NO: 15223161 NR Description: putative protein kinase; protein id: At1g70460.1
  misc_feature (1)..(160): Homolog of NCBI NO: 15220786 NR Description: Pto kinase interactor, putative; protein id:
  misc_feature (187)..(326): Homolog of NCBI NO: 15220786 NR Description: Pto kinase interactor, putative; protein id:
  misc_feature (1)..(326): Homolog of NCBI NO: 15218591 NR Description: protein kinase, putative; protein id: At1g10620.1
  misc_feature (187)..(326): Homolog of NCBI NO: 8778584 NR Description: F28C11.17 [Arabidopsis thaliana]
  misc_feature (1)..(95): Homolog of NCBI NO: 8778584 NR Description: F28C11.17 [Arabidopsis thaliana]
  misc_feature (107)..(160): Homolog of NCBI NO: 8778584 NR Description: F28C11.17 [Arabidopsis thaliana]
  misc_feature (1)..(326): Homolog of NCBI NO: 25518375 NR Description: hypothetical protein F5O8.10 - Arabidopsis
MGSGQTHFTYEELEDITEGFSKQNILGEGGFGCVYKGKLKDGKLVAVKQLKVGSGQGDREFKAEVEIISRVHHRHLVSLVGYCIADSERLLIYEYVPNQTLEHHLHGKGRPVLEWARRVRIAIVLPKVWRICTKTVSHPKIIHRDIKSANILLDDEFEVQVADFGLAKVNDTTQTHVSTRVMGTFGYLAPEYAQSGQLTDRSDVFSFGVVLLELITGRKPVDRNQPLGEESLVGWARPLLKKAIETGDFSELVDRRLEKHYVKNEVFRMIETAAACVRYSGPKRPRMVQVLRALDSEGDMGDICNGIKVGQSSTCDDSGQNHSVIKDVGSIGRGGMVVSGVRVVTRLMVDAYHNRHEGKKAERRI

SEQ ID NO: 90643 - DNA, 2133 bp, Arabidopsis thaliana
  misc_feature (1)..(2133): Ceres Seq. ID no. 12724635
  misc_feature: MA Experiment ID: 20000180 Result: Up-regulated in Transcription
  misc_feature: MA Experiment 20000180 PARAMETER Experiment Name: At_Germinating_Seeds_P Parameter: Age (hr) Value: 24 vs. 0
  misc_feature: MA Experiment 20000180 PARAMETER Experiment Name: At_Germinating_Seeds_P Parameter: Tissue Value: Germinating Seeds
  misc_feature: MA Experiment ID: 20000227 Result: Up-regulated in Transcription
  misc_feature: MA Experiment 20000227 PARAMETER Experiment Name: At_Root-Tips-vs-Tops_P Parameter: Tissue Value: Root Tips vs. Root Tops
  misc_feature: MA Experiment ID: 20000439 Result: Up-regulated in Transcription
  misc_feature: MA Experiment 20000439 PARAMETER Experiment Name: At_Roots__P Parameter: Age (day) Value: 14 vs. 21
  misc_feature: MA Experiment 20000439 PARAMETER Experiment Name: At_Roots__P Parameter: Organism Value: A. thaliana
  misc_feature: MA Experiment 20000439 PARAMETER Experiment Name: At_Roots__P Parameter: Tissue Value: Roots vs. Whole Plant
atgtcggactcgccaacttcttctccaccagcaccatccgctgattccgctccgccgccggatacctcatccgacggatctgctgctcctccacctacggattcagcaccacctcctagtccaccggctgattcatctccgcctccagctcttccatctcttccgccagctgtcttttctcctccgccaactgtctcatcccctcctcctccgccgcttgattcatctcctcctccgccgcctgatttaaccccgccgccaagttctccccctcccccagatgctccgccgccgattcccatcgtgttccctccaccgatagactcaccgccgcccgagtccaccaactcccctccacctccagaggtgtttgaaccaccaccgcctccggccgatgaagacgaaagccctcctgctcctccacctccggaacaattacctcctccagcgtcttcaccgcaaggaggacccaaaaaaccaaaaaaacaccatccaggaccagccacatctcctcctgctccttcagcaccagccacatctcctcctgctcctccaaacgcgccgccacgtaacagttcccacgcactaccacctaagtctaccgctgcaggtggacctctcacctcgccatctcgcggagtccccagcagcggaaactctgtcccgccacctgcaaatagcggtggcggctatcaagggaagactatggccggttttgcaatagccggtttcgcagtcatcgccttgatggccgttgtgttcttagtcagaagaaagaagaagagaaacattgatgcctacagtgactcacaatacttgcctccttcaaacttctccatcaaatcagatggattcttatacggtcaaaatcctacaaagggatactctggtcctggtggttacaattcacaacaacaatcaaattccggaaacagcttcggcagccaacgaggaggaggaggttatacacggtcagggagcgcacctgattcagcagtgatgggaagtggtcaaacacatttcacatatgaagagctaacggacataacagaaggattttctaagcataacatacttggagaaggaggttttggttgtgtgtataaaggtaaattaaatgatggaaaacttgttgctgttaagcagcttaaggttggtagcggacaaggtgaccgtgagtttaaggcggaggttgagattattagccgtgttcatcatcgccatttggtttctcttgttggatactgcattgcggattcagagagattgcttatctatgaatatgttcctaaccaaacattggaacatcatttgcatgggaagggaaggccagtacttgaatgggctaggagagtcagaattgctataggttctgccaaaggtttggcgtatttacacgaagactgtcacccaaaaatcattcacagggacataaagtccgctaacatcttgctggacgatgagtttgaagctcaggttgctgactttggacttgccaaactcaatgattcaacacaaactcatgtatcaactcgcgttatgggaaccttcgggtacttggcaccagaatatgcacaaagtggaaagctgactgatagatcagatgttttctcgtttggggttgttctcttagagcttataacaggacgcaaacctgttgaccaataccagcctttgggagaagagagtttggttgaatgggctcgtcctctgcttcacaaagccattgagaccggtgatttcagtgaactagttgatagacggctcgaaaagcattatgtggagaatgaagttttcagaatgattgaaacagctgctgcttgtgttaggcattcaggtccaaaacgtccacgtatggttcaggttgtgagagcattggatagtgaaggggacatgggagatatcagcaatggtaacaaagtgggacaaagcagtgcttatgactctggtcagtataataatgacaccatgaagttcaggaaaatggcatttggttttgacgatagctcggattccgggatgtacagtggagactactctgtccaagactcccggaaaggatccaacggagcttcctctgagttcacaaggaatgaaaccgagaaccgaaacttcaataaccggcgctactga

SEQ ID NO: 90644 - protein, 710 aa, Arabidopsis thaliana
  peptide (1)..(710): Ceres Seq. ID no. 12724636
  misc_feature (1)..(492): Homolog of NCBI NO: 15220786 NR Description: Pto kinase interactor, putative; protein id:
  misc_feature (519)..(710): Homolog of NCBI NO: 15220786 NR Description: Pto kinase interactor, putative; protein id:
  misc_feature (1)..(428): Homolog of NCBI NO: 8778584 NR Description: F28C11.17 [Arabidopsis thaliana]
  misc_feature (519)..(710): Homolog of NCBI NO: 8778584 NR Description: F28C11.17 [Arabidopsis thaliana]
  misc_feature (30)..(704): Homolog of NCBI NO: 15218591 NR Description: protein kinase, putative; protein id: At1g10620.1
  misc_feature (4)..(698): Homolog of NCBI NO: 15218591 NR Description: protein kinase, putative; protein id: At1g10620.1
  misc_feature (3)..(710): Homolog of NCBI NO: 25518375 NR Description: hypothetical protein F5O8.10 - Arabidopsis
  misc_feature (4)..(492): Homolog of NCBI NO: 25402610 NR Description: protein F20B24.6 [imported] - Arabidopsis >gi|6573752|gb|AAF17672.1|AC009398_21 F20B24.6 [Arabidopsis
  misc_feature (519)..(704): Homolog of NCBI NO: 25402610 NR Description: protein F20B24.6 [imported] - Arabidopsis >gi|6573752|gb|AAF17672.1|AC009398_21 F20B24.6 [Arabidopsis
  misc_feature (298)..(684): Homolog of NCBI NO: 15221470 NR Description: protein kinase, putative; protein id: supported by cDNA: gi_21280864 [Arabidopsis thaliana]
MSDSPTSSPPAPSADSAPPPDTSSDGSAAPPPTDSAPPPSPPADSSPPPALPSLPPAVFSPPPTVSSPPPPPLDSSPPPPPDLTPPPSSPPPPDAPPPIPIVFPPPIDSPPPESTNSPPPPEVFEPPPPPADEDESPPAPPPPEQLPPPASSPQGGPKKPKKHHPGPATSPPAPSAPATSPPAPPNAPPRNSSHALPPKSTAAGGPLTSPSRGVPSSGNSVPPPANSGGGYQGKTMAGFAIAGFAVIALMAVVFLVRRKKKRNIDAYSDSQYLPPSNFSIKSDGFLYGQNPTKGYSGPGGYNSQQQSNSGNSFGSQRGGGGYTRSGSAPDSAVMGSGQTHFTYEELTDITEGFSKHNILGEGGFGCVYKGKLNDGKLVAVKQLKVGSGQGDREFKAEVEIISRVHHRHLVSLVGYCIADSERLLIYEYVPNQTLEHHLHGKGRPVLEWARRVRIAIGSAKGLAYLHEDCHPKIIHRDIKSANILLDDEFEAQVADFGLAKLNDSTQTHVSTRVMGTFGYLAPEYAQSGKLTDRSDVFSFGVVLLELITGRKPVDQYQPLGEESLVEWARPLLHKAIETGDFSELVDRRLEKHYVENEVFRMIETAAACVRHSGPKRPRMVQVVRALDSEGDMGDISNGNKVGQSSAYDSGQYNNDTMKFRKMAFGFDDSSDSGMYSGDYSVQDSRKGSNGASSEFTRNETENRNFNNRRY

SEQ ID NO: 90645 - protein, 475 aa, Arabidopsis thaliana
  peptide (1)..(475): Ceres Seq. ID no. 12724637
  misc_feature (1)..(257): Homolog of NCBI NO: 15220786 NR Description: Pto kinase interactor, putative; protein id:
  misc_feature (284)..(475): Homolog of NCBI NO: 15220786 NR Description: Pto kinase interactor, putative; protein id:
  misc_feature (1)..(193): Homolog of NCBI NO: 8778584 NR Description: F28C11.17 [Arabidopsis thaliana]
  misc_feature (284)..(475): Homolog of NCBI NO: 8778584 NR Description: F28C11.17 [Arabidopsis thaliana]
  misc_feature (1)..(469): Homolog of NCBI NO: 15218591 NR Description: protein kinase, putative; protein id: At1g10620.1
  misc_feature (1)..(463): Homolog of NCBI NO: 15218591 NR Description: protein kinase, putative; protein id: At1g10620.1
  misc_feature (1)..(475): Homolog of NCBI NO: 25518375 NR Description: hypothetical protein F5O8.10 - Arabidopsis
  misc_feature (1)..(257): Homolog of NCBI NO: 25402610 NR Description: protein F20B24.6 [imported] - Arabidopsis >gi|6573752|gb|AAF17672.1|AC009398_21 F20B24.6 [Arabidopsis
  misc_feature (284)..(469): Homolog of NCBI NO: 25402610 NR Description: protein F20B24.6 [imported] - Arabidopsis >gi|6573752|gb|AAF17672.1|AC009398_21 F20B24.6 [Arabidopsis
  misc_feature (63)..(449): Homolog of NCBI NO: 15221470 NR Description: protein kinase, putative; protein id: supported by cDNA: gi_21280864 [Arabidopsis thaliana]
MAGFAIAGFAVIALMAVVFLVRRKKKRNIDAYSDSQYLPPSNFSIKSDGFLYGQNPTKGYSGPGGYNSQQQSNSGNSFGSQRGGGGYTRSGSAPDSAVMGSGQTHFTYEELTDITEGFSKHNILGEGGFGCVYKGKLNDGKLVAVKQLKVGSGQGDREFKAEVEIISRVHHRHLVSLVGYCIADSERLLIYEYVPNQTLEHHLHGKGRPVLEWARRVRIAIGSAKGLAYLHEDCHPKIIHRDIKSANILLDDEFEAQVADFGLAKLNDSTQTHVSTRVMGTFGYLAPEYAQSGKLTDRSDVFSFGVVLLELITGRKPVDQYQPLGEESLVEWARPLLHKAIETGDFSELVDRRLEKHYVENEVFRMIETAAACVRHSGPKRPRMVQVVRALDSEGDMGDISNGNKVGQSSAYDSGQYNNDTMKFRKMAFGFDDSSDSGMYSGDYSVQDSRKGSNGASSEFTRNETENRNFNNRRY

SEQ ID NO: 90646 - protein, 461 aa, Arabidopsis thaliana
  peptide (1)..(461): Ceres Seq. ID no. 12724638
  misc_feature (1)..(243): Homolog of NCBI NO: 15220786 NR Description: Pto kinase interactor, putative; protein id:
  misc_feature (270)..(461): Homolog of NCBI NO: 15220786 NR Description: Pto kinase interactor, putative; protein id:
  misc_feature (1)..(179): Homolog of NCBI NO: 8778584 NR Description: F28C11.17 [Arabidopsis thaliana]
  misc_feature (270)..(461): Homolog of NCBI NO: 8778584 NR Description: F28C11.17 [Arabidopsis thaliana]
  misc_feature (1)..(455): Homolog of NCBI NO: 15218591 NR Description: protein kinase, putative; protein id: At1g10620.1
  misc_feature (1)..(449): Homolog of NCBI NO: 15218591 NR Description: protein kinase, putative; protein id: At1g10620.1
  misc_feature (1)..(461): Homolog of NCBI NO: 25518375 NR Description: hypothetical protein F5O8.10 - Arabidopsis
  misc_feature (1)..(243): Homolog of NCBI NO: 25402610 NR Description: protein F20B24.6 [imported] - Arabidopsis >gi|6573752|gb|AAF17672.1|AC009398_21 F20B24.6 [Arabidopsis
  misc_feature (270)..(455): Homolog of NCBI NO: 25402610 NR Description: protein F20B24.6 [imported] - Arabidopsis >gi|6573752|gb|AAF17672.1|AC009398_21 F20B24.6 [Arabidopsis
  misc_feature (49)..(435): Homolog of NCBI NO: 15221470 NR Description: protein kinase, putative; protein id: supported by cDNA: gi_21280864 [Arabidopsis thaliana]
MAVVFLVRRKKKRNIDAYSDSQYLPPSNFSIKSDGFLYGQNPTKGYSGPGGYNSQQQSNSGNSFGSQRGGGGYTRSGSAPDSAVMGSGQTHFTYEELTDITEGFSKHNILGEGGFGCVYKGKLNDGKLVAVKQLKVGSGQGDREFKAEVEIISRVHHRHLVSLVGYCIADSERLLIYEYVPNQTLEHHLHGKGRPVLEWARRVRIAIGSAKGLAYLHEDCHPKIIHRDIKSANILLDDEFEAQVADFGLAKLNDSTQTHVSTRVMGTFGYLAPEYAQSGKLTDRSDVFSFGVVLLELITGRKPVDQYQPLGEESLVEWARPLLHKAIETGDFSELVDRRLEKHYVENEVFRMIETAAACVRHSGPKRPRMVQVVRALDSEGDMGDISNGNKVGQSSAYDSGQYNNDTMKFRKMAFGFDDSSDSGMYSGDYSVQDSRKGSNGASSEFTRNETENRNFNNRRY

SEQ ID NO: 90647 - DNA, 933 bp, Arabidopsis thaliana
  misc_feature (1)..(933): Ceres Seq. ID no. 12724646
  misc_feature: MA Experiment ID: 20000171 Result: Up-regulated in Transcription
  misc_feature: MA Experiment 20000171 PARAMETER Experiment Name: At_42deg_Heat_P Parameter: Age (day) Value: 14
  misc_feature: MA Experiment 20000171 PARAMETER Experiment Name: At_42deg_Heat_P Parameter: Organism Value: A. thaliana
  misc_feature: MA Experiment 20000171 PARAMETER Experiment Name: At_42deg_Heat_P Parameter: Plant Line Value: WS
  misc_feature: MA Experiment 20000171 PARAMETER Experiment Name: At_42deg_Heat_P Parameter: Temperature (deg C) Value: 42 vs. 22
  misc_feature: MA Experiment 20000171 PARAMETER Experiment Name: At_42deg_Heat_P Parameter: Timepoint (hr) Value: 1
  misc_feature: MA Experiment 20000171 PARAMETER Experiment Name: At_42deg_Heat_P Parameter: Tissue Value: Aerial
  misc_feature: MA Experiment ID: 20000173 Result: Up-regulated in Transcription
  misc_feature: MA Experiment 20000173 PARAMETER Experiment Name: At_42deg_Heat_P Parameter: Age (day) Value: 14
  misc_feature: MA Experiment 20000173 PARAMETER Experiment Name: At_42deg_Heat_P Parameter: Organism Value: A. thaliana
  misc_feature: MA Experiment 20000173 PARAMETER Experiment Name: At_42deg_Heat_P Parameter: Plant Line Value: WS
  misc_feature: MA Experiment 20000173 PARAMETER Experiment Name: At_42deg_Heat_P Parameter: Temperature (deg C) Value: 42 vs. 22
  misc_feature: MA Experiment 20000173 PARAMETER Experiment Name: At_42deg_Heat_P Parameter: Timepoint (hr) Value: 6
  misc_feature: MA Experiment 20000173 PARAMETER Experiment Name: At_42deg_Heat_P Parameter: Tissue Value: Aerial
  misc_feature: MA Experiment ID: 20000182 Result: Up-regulated in Transcription
  misc_feature: MA Experiment 20000182 PARAMETER Experiment Name: At_2mM_SA_P Parameter: Age (day) Value: 14
  misc_feature: MA Experiment 20000182 PARAMETER Experiment Name: At_2mM_SA_P Parameter: Organism Value: A. thaliana
  misc_feature: MA Experiment 20000182 PARAMETER Experiment Name: At_2mM_SA_P Parameter: Plant Line Value: WS
  misc_feature: MA Experiment 20000182 PARAMETER Experiment Name: At_2mM_SA_P Parameter: Timepoint (hr) Value: 6
  misc_feature: MA Experiment 20000182 PARAMETER Experiment Name: At_2mM_SA_P Parameter: Tissue Value: Aerial
  misc_feature: MA Experiment 20000182 PARAMETER Experiment Name: At_2mM_SA_P Parameter: Treatment Value: 2mM SA vs. No Treatment
  misc_feature: MA Experiment ID: 20000184 Result: Up-regulated in Transcription
  misc_feature: MA Experiment 20000184 PARAMETER Experiment Name: At_Shoots__P Parameter: Age (day) Value: 7
  misc_feature: MA Experiment 20000184 PARAMETER Experiment Name: At_Shoots__P Parameter: Tissue Value: Shoots vs. Whole Plant
  misc_feature: MA Experiment ID: 20000185 Result: Up-regulated in Transcription
  misc_feature: MA Experiment 20000185 PARAMETER Experiment Name: At_Roots__P Parameter: Age (day) Value: 7 vs. 21
  misc_feature: MA Experiment 20000185 PARAMETER Experiment Name: At_Roots__P Parameter: Organism Value: A. thaliana
  misc_feature: MA Experiment 20000185 PARAMETER Experiment Name: At_Roots__P Parameter: Tissue Value: Roots vs. Whole Plant
  misc_feature: MA Experiment ID: 20000213 Result: Up-regulated in Transcription
  misc_feature: MA Experiment 20000213 PARAMETER Experiment Name: At_4deg_Cold_P Parameter: Timepoint (hr) Value: 2
  misc_feature: MA Experiment ID: 20000234 Result: Down-regulated in Transcription
  misc_feature: MA Experiment 20000234 PARAMETER Experiment Name: At_Siliques_P Parameter: Age (day) Value: 21
  misc_feature: MA Experiment 20000234 PARAMETER Experiment Name: At_Siliques_P Parameter: Organism Value: A. thaliana
  misc_feature: MA Experiment 20000234 PARAMETER Experiment Name: At_Siliques_P Parameter: Plant Line Value: WS
  misc_feature: MA Experiment 20000234 PARAMETER Experiment Name: At_Siliques_P Parameter: Tissue Value: Less Than 5mm Siliques vs. Whole Plant
  misc_feature: MA Experiment ID: 20000235 Result: Down-regulated in Transcription
  misc_feature: MA Experiment 20000235 PARAMETER Experiment Name: At_Siliques_P Parameter: Age (day) Value: 21
  misc_feature: MA Experiment 20000235 PARAMETER Experiment Name: At_Siliques_P Parameter: Organism Value: A. thaliana
  misc_feature: MA Experiment 20000235 PARAMETER Experiment Name: At_Siliques_P Parameter: Plant Line Value: WS
  misc_feature: MA Experiment 20000235 PARAMETER Experiment Name: At_Siliques_P Parameter: Tissue Value: 5-10mm Siliques vs. Whole Plant
  misc_feature: MA Experiment ID: 20000438 Result: Up-regulated in Transcription
  misc_feature: MA Experiment 20000438 PARAMETER Experiment Name: At_Shoots__P Parameter: Age (day) Value: 14
  misc_feature: MA Experiment 20000438 PARAMETER Experiment Name: At_Shoots__P Parameter: Tissue Value: Shoots vs. Whole Plant
  misc_feature: MA Experiment ID: 20000439 Result: Up-regulated in Transcription
  misc_feature: MA Experiment 20000439 PARAMETER Experiment Name: At_Roots__P Parameter: Age (day) Value: 14 vs. 21
  misc_feature: MA Experiment 20000439 PARAMETER Experiment Name: At_Roots__P Parameter: Organism Value: A. thaliana
  misc_feature: MA Experiment 20000439 PARAMETER Experiment Name: At_Roots__P Parameter: Tissue Value: Roots vs. Whole Plant
  misc_feature: MA Experiment ID: 20000443 Result: Up-regulated in Transcription
  misc_feature: MA Experiment 20000443 PARAMETER Experiment Name: At_1uM_BR-BRZ__P Parameter: Tissue Value: Shoot Apices
  misc_feature: MA Experiment 20000443 PARAMETER Experiment Name: At_1uM_BR-BRZ__P Parameter: Treatment Value: 1uM BRZ vs. No Treatment
  misc_feature: MA Experiment ID: 20000451 Result: Up-regulated in Transcription
  misc_feature: MA Experiment 20000451 PARAMETER Experiment Name: At_CS6879_Shoots-Roots_P Parameter: Age (day) Value: 14
  misc_feature: MA Experiment 20000451 PARAMETER Experiment Name: At_CS6879_Shoots-Roots_P Parameter: Organism Value: A. thaliana
  misc_feature: MA Experiment 20000451 PARAMETER Experiment Name: At_CS6879_Shoots-Roots_P Parameter: Plant Line Value: CS6879 vs. WS
  misc_feature: MA Experiment 20000451 PARAMETER Experiment Name: At_CS6879_Shoots-Roots_P Parameter: Tissue Value: Roots
  misc_feature: MA Experiment ID: 20000495 Result: Down-regulated in Transcription
  misc_feature: MA Experiment 20000495 PARAMETER Experiment Name: At_Guard_Cells_P Parameter: Harvest Date Value: 8/2/2002
  misc_feature: MA Experiment 20000495 PARAMETER Experiment Name: At_Guard_Cells_P Parameter: Organism Value: A. thaliana
  misc_feature: MA Experiment 20000495 PARAMETER Experiment Name: At_Guard_Cells_P Parameter: Tissue Value: Guard Cells vs. Leaves
  misc_feature: MA Experiment ID: 20000573 Result: Down-regulated in Transcription
  misc_feature: MA Experiment 20000573 PARAMETER Experiment Name: At_100uM_ABA_Mutants__P Parameter: Organism Value: A. thaliana
  misc_feature: MA Experiment 20000573 PARAMETER Experiment Name: At_100uM_ABA_Mutants__P Parameter: Plant Line Value: CS22 vs. Ler wt
  misc_feature: MA Experiment 20000573 PARAMETER Experiment Name: At_100uM_ABA_Mutants__P Parameter: Timepoint (hr) Value: N/A
  misc_feature: MA Experiment 20000573 PARAMETER Experiment Name: At_100uM_ABA_Mutants__P Parameter: Tissue Value: Whole Plant
  misc_feature: MA Experiment 20000573 PARAMETER Experiment Name: At_100uM_ABA_Mutants__P Parameter: Treatment Value: None
  misc_feature: MA Experiment ID: 20000574 Result: Down-regulated in Transcription
  misc_feature: MA Experiment 20000574 PARAMETER Experiment Name: At_100uM_ABA_Mutants__P Parameter: Organism Value: A. thaliana
  misc_feature: MA Experiment 20000574 PARAMETER Experiment Name: At_100uM_ABA_Mutants__P Parameter: Plant Line Value: CS23 vs. Ler wt
  misc_feature: MA Experiment 20000574 PARAMETER Experiment Name: At_100uM_ABA_Mutants__P Parameter: Timepoint (hr) Value: N/A
  misc_feature: MA Experiment 20000574 PARAMETER Experiment Name: At_100uM_ABA_Mutants__P Parameter: Tissue Value: Whole Plant
  misc_feature: MA Experiment 20000574 PARAMETER Experiment Name: At_100uM_ABA_Mutants__P Parameter: Treatment Value: None
  misc_feature: MA Experiment ID: 20000709 Result: Up-regulated in Transcription
  misc_feature: MA Experiment 20000709 PARAMETER Experiment Name: At_15mM_NH4NO3_L-to-H_P Parameter: Age (hr) Value: 14
  misc_feature: MA Experiment 20000709 PARAMETER Experiment Name: At_15mM_NH4NO3_L-to-H_P Parameter: Organism Value: A. thaliana
  misc_feature: MA Experiment 20000709 PARAMETER Experiment Name: At_15mM_NH4NO3_L-to-H_P Parameter: Plant Line Value: WS
  misc_feature: MA Experiment 20000709 PARAMETER Experiment Name: At_15mM_NH4NO3_L-to-H_P Parameter: Timepoint (hr) Value: 4
  misc_feature: MA Experiment 20000709 PARAMETER Experiment Name: At_15mM_NH4NO3_L-to-H_P Parameter: Tissue Value: Aerial
  misc_feature: MA Experiment 20000709 PARAMETER Experiment Name: At_15mM_NH4NO3_L-to-H_P Parameter: Treatment Value: 15mM NH4NO3 vs. 30mM Mannitol
  misc_feature: MA Experiment ID: 20001247 Result: Up-regulated in Transcription
  misc_feature: MA Experiment 20001247 PARAMETER Experiment Name: At_Far-red-induction_P Parameter: Age (day) Value: 7
  misc_feature: MA Experiment 20001247 PARAMETER Experiment Name: At_Far-red-induction_P Parameter: Light Value: Far-red vs. White
  misc_feature: MA Experiment 20001247 PARAMETER Experiment Name: At_Far-red-induction_P Parameter: Organism Value: A. thaliana
  misc_feature: MA Experiment 20001247 PARAMETER Experiment Name: At_Far-red-induction_P Parameter: Plant Line Value: Columbia
  misc_feature: MA Experiment 20001247 PARAMETER Experiment Name: At_Far-red-induction_P Parameter: Timepoint (hr) Value: 1
  misc_feature: MA Experiment 20001247 PARAMETER Experiment Name: At_Far-red-induction_P Parameter: Tissue Value: Whole Plant
  misc_feature: MA Experiment ID: 20001248 Result: Down-regulated in Transcription
  misc_feature: MA Experiment 20001248 PARAMETER Experiment Name: At_Far-red-induction_P Parameter: Age (day) Value: 7
  misc_feature: MA Experiment 20001248 PARAMETER Experiment Name: At_Far-red-induction_P Parameter: Light Value: Far-red vs. White
  misc_feature: MA Experiment 20001248 PARAMETER Experiment Name: At_Far-red-induction_P Parameter: Organism Value: A. thaliana
  misc_feature: MA Experiment 20001248 PARAMETER Experiment Name: At_Far-red-induction_P Parameter: Plant Line Value: Columbia
  misc_feature: MA Experiment 20001248 PARAMETER Experiment Name: At_Far-red-induction_P Parameter: Timepoint (hr) Value: 4
  misc_feature: MA Experiment 20001248 PARAMETER Experiment Name: At_Far-red-induction_P Parameter: Tissue Value: Whole Plant
  misc_feature: MA Experiment ID: 20001450 Result: Down-regulated in Transcription
  misc_feature: MA Experiment 20001450 PARAMETER Experiment Name: At_Far-red-induction_P Parameter: Age (day) Value: 7
  misc_feature: MA Experiment 20001450 PARAMETER Experiment Name: At_Far-red-induction_P Parameter: Light Value: Far-red vs. White
  misc_feature: MA Experiment 20001450 PARAMETER Experiment Name: At_Far-red-induction_P Parameter: Organism Value: A. thaliana
  misc_feature: MA Experiment 20001450 PARAMETER Experiment Name: At_Far-red-induction_P Parameter: Plant Line Value: Columbia
  misc_feature: MA Experiment 20001450 PARAMETER Experiment Name: At_Far-red-induction_P Parameter: Timepoint (hr) Value: 8
  misc_feature: MA Experiment 20001450 PARAMETER Experiment Name: At_Far-red-induction_P Parameter: Tissue Value: Whole Plant
  misc_feature: MA Experiment ID: 20001459 Result: Up-regulated in Transcription
  misc_feature: MA Experiment 20001459 PARAMETER Experiment Name: At_50mM_NH4NO3_L-to-H_P Parameter: Age (day) Value: Undefined
  misc_feature: MA Experiment 20001459 PARAMETER Experiment Name: At_50mM_NH4NO3_L-to-H_P Parameter: Organism Value: Undefined
  misc_feature: MA Experiment 20001459 PARAMETER Experiment Name: At_50mM_NH4NO3_L-to-H_P Parameter: Plant Line Value: Undefined
  misc_feature: MA Experiment 20001459 PARAMETER Experiment Name: At_50mM_NH4NO3_L-to-H_P Parameter: Timepoint (hr) Value: 4
  misc_feature: MA Experiment 20001459 PARAMETER Experiment Name: At_50mM_NH4NO3_L-to-H_P Parameter: Tissue Value: Siliques
  misc_feature: MA Experiment 20001459 PARAMETER Experiment Name: At_50mM_NH4NO3_L-to-H_P Parameter: Treatment Value: 50mM NH4NO3 vs. 100mM Manitol
  misc_feature: MA Experiment ID: 20001554 Result: Up-regulated in Transcription
  misc_feature: MA Experiment 20001554 PARAMETER Experiment Name: At_Drought_Soil_Dry_P Parameter: Age (day) Value: 21
  misc_feature: MA Experiment 20001554 PARAMETER Experiment Name: At_Drought_Soil_Dry_P Parameter: Organism Value: A. thaliana
  misc_feature: MA Experiment 20001554 PARAMETER Experiment Name: At_Drought_Soil_Dry_P Parameter: Plant Line Value: WS
  misc_feature: MA Experiment 20001554 PARAMETER Experiment Name: At_Drought_Soil_Dry_P Parameter: Post Timepoint (hr) Value: None
  misc_feature: MA Experiment 20001554 PARAMETER Experiment Name: At_Drought_Soil_Dry_P Parameter: Post-Treatment Value: None
  misc_feature: MA Experiment 20001554 PARAMETER Experiment Name: At_Drought_Soil_Dry_P Parameter: Timepoint (day) Value: 7
  misc_feature: MA Experiment 20001554 PARAMETER Experiment Name: At_Drought_Soil_Dry_P Parameter: Treatment Value: Drought vs. No Drought
  misc_feature: MA Experiment ID: 20001556 Result: Down-regulated in Transcription
  misc_feature: MA Experiment 20001556 PARAMETER Experiment Name: At_Drought_Soil_Dry_P Parameter: Age (day) Value: 26
  misc_feature: MA Experiment 20001556 PARAMETER Experiment Name: At_Drought_Soil_Dry_P Parameter: Organism Value: A. thaliana
  misc_feature: MA Experiment 20001556 PARAMETER Experiment Name: At_Drought_Soil_Dry_P Parameter: Plant Line Value: WS
  misc_feature: MA Experiment 20001556 PARAMETER Experiment Name: At_Drought_Soil_Dry_P Parameter: Post Timepoint (hr) Value: None
  misc_feature: MA Experiment 20001556 PARAMETER Experiment Name: At_Drought_Soil_Dry_P Parameter: Post-Treatment Value: None
  misc_feature: MA Experiment 20001556 PARAMETER Experiment Name: At_Drought_Soil_Dry_P Parameter: Timepoint (day) Value: 12
  misc_feature: MA Experiment 20001556 PARAMETER Experiment Name: At_Drought_Soil_Dry_P Parameter: Treatment Value: Drought vs. No Drought
  misc_feature: MA Experiment ID: 20001557 Result: Down-regulated in Transcription
  misc_feature: MA Experiment 20001557 PARAMETER Experiment Name: At_Drought_Soil_Dry_P Parameter: Age (day) Value: 27
  misc_feature: MA Experiment 20001557 PARAMETER Experiment Name: At_Drought_Soil_Dry_P Parameter: Organism Value: A. thaliana
  misc_feature: MA Experiment 20001557 PARAMETER Experiment Name: At_Drought_Soil_Dry_P Parameter: Plant Line Value: WS
  misc_feature: MA Experiment 20001557 PARAMETER Experiment Name: At_Drought_Soil_Dry_P Parameter: Post Timepoint (hr) Value: 3
  misc_feature: MA Experiment 20001557 PARAMETER Experiment Name: At_Drought_Soil_Dry_P Parameter: Post-Treatment Value: Re-Water vs. No Drought
  misc_feature: MA Experiment 20001557 PARAMETER Experiment Name: At_Drought_Soil_Dry_P Parameter: Timepoint (day) Value: 13
  misc_feature: MA Experiment 20001557 PARAMETER Experiment Name: At_Drought_Soil_Dry_P Parameter: Treatment Value: Drought vs. No Drought
  misc_feature: MA Experiment ID: 20001558 Result: Down-regulated in Transcription
  misc_feature: MA Experiment 20001558 PARAMETER Experiment Name: At_Drought_Soil_Dry_P Parameter: Age (day) Value: 27
  misc_feature: MA Experiment 20001558 PARAMETER Experiment Name: At_Drought_Soil_Dry_P Parameter: Organism Value: A. thaliana
  misc_feature: MA Experiment 20001558 PARAMETER Experiment Name: At_Drought_Soil_Dry_P Parameter: Plant Line Value: WS
  misc_feature: MA Experiment 20001558 PARAMETER Experiment Name: At_Drought_Soil_Dry_P Parameter: Post Timepoint (hr) Value: 6
  misc_feature: MA Experiment 20001558 PARAMETER Experiment Name: At_Drought_Soil_Dry_P Parameter: Post-Treatment Value: Re-Water vs. No Drought
  misc_feature: MA Experiment 20001558 PARAMETER Experiment Name: At_Drought_Soil_Dry_P Parameter: Timepoint (day) Value: 13
  misc_feature: MA Experiment 20001558 PARAMETER Experiment Name: At_Drought_Soil_Dry_P Parameter: Treatment Value: Drought vs. No Drought
  misc_feature: MA Experiment ID: 20001559 Result: Down-regulated in Transcription
  misc_feature: MA Experiment 20001559 PARAMETER Experiment Name: At_Drought_Soil_Dry_P Parameter: Age (day) Value: 28
  misc_feature: MA Experiment 20001559 PARAMETER Experiment Name: At_Drought_Soil_Dry_P Parameter: Organism Value: A. thaliana
  misc_feature: MA Experiment 20001559 PARAMETER Experiment Name: At_Drought_Soil_Dry_P Parameter: Plant Line Value: WS
  misc_feature: MA Experiment 20001559 PARAMETER Experiment Name: At_Drought_Soil_Dry_P Parameter: Post Timepoint (hr) Value: 29
  misc_feature: MA Experiment 20001559 PARAMETER Experiment Name: At_Drought_Soil_Dry_P Parameter: Post-Treatment Value: Re-Water vs. No Drought
  misc_feature: MA Experiment 20001559 PARAMETER Experiment Name: At_Drought_Soil_Dry_P Parameter: Timepoint (day) Value: 14
  misc_feature: MA Experiment 20001559 PARAMETER Experiment Name: At_Drought_Soil_Dry_P Parameter: Treatment Value: Drought vs. No Drought
  misc_feature: MA Experiment ID: 20001762 Result: Up-regulated in Transcription
  misc_feature: MA Experiment 20001762 PARAMETER Experiment Name: At_50mM_NH4NO3_L-to-H_P Parameter: Timepoint (hr) Value: 6
  misc_feature: MA Experiment 20001762 PARAMETER Experiment Name: At_50mM_NH4NO3_L-to-H_P Parameter: Tissue Value: Siliques
  misc_feature: MA Experiment 20001762 PARAMETER Experiment Name: At_50mM_NH4NO3_L-to-H_P Parameter: Treatment Value: 50mM NH4NO3 vs 100mM Mannitol
  misc_feature: MA Experiment ID: 20001904 Result: Down-regulated in Transcription
  misc_feature: MA Experiment 20001904 PARAMETER Experiment Name: At_Drought_Reproduction_P Parameter: Age (day) Value: 37
  misc_feature: MA Experiment 20001904 PARAMETER Experiment Name: At_Drought_Reproduction_P Parameter: Organism Value: A. thaliana
  misc_feature: MA Experiment 20001904 PARAMETER Experiment Name: At_Drought_Reproduction_P Parameter: Plant Line Value: WS
  misc_feature: MA Experiment 20001904 PARAMETER Experiment Name: At_Drought_Reproduction_P Parameter: Timepoint (day) Value: 7
  misc_feature: MA Experiment 20001904 PARAMETER Experiment Name: At_Drought_Reproduction_P Parameter: Tissue Value: Rosettes
  misc_feature: MA Experiment 20001904 PARAMETER Experiment Name: At_Drought_Reproduction_P Parameter: Treatment Value: Drought vs. No Drought
  misc_feature: MA Experiment ID: 20001905 Result: Down-regulated in Transcription
  misc_feature: MA Experiment 20001905 PARAMETER Experiment Name: At_Drought_Reproduction_P Parameter: Age (day) Value: 40
  misc_feature: MA Experiment 20001905 PARAMETER Experiment Name: At_Drought_Reproduction_P Parameter: Organism Value: A. thaliana
  misc_feature: MA Experiment 20001905 PARAMETER Experiment Name: At_Drought_Reproduction_P Parameter: Plant Line Value: WS
  misc_feature: MA Experiment 20001905 PARAMETER Experiment Name: At_Drought_Reproduction_P Parameter: Timepoint (day) Value: 10
  misc_feature: MA Experiment 20001905 PARAMETER Experiment Name: At_Drought_Reproduction_P Parameter: Tissue Value: Rosettes
  misc_feature: MA Experiment 20001905 PARAMETER Experiment Name: At_Drought_Reproduction_P Parameter: Treatment Value: Drought vs. No Drought
atgttatctctacgagttcctactcccacttccttcgatttccggcgatatcaagccggagatttagagcggcgatggcggttaagtagagatagctttctctctttctcgccaaaattcgaggaaaacagaggattccgattcggagtcaaatcttccaaatcggatgtttcgtttacggcggcggaggaagaagaaactctgccggaagagctacatgcagagctgatgccgaaacatgtggcgattataatggacggaaacggaagatgggcgaagaatcgtggtcttcaaccttgggatggtcacagagctggcgttgaagctttgaaagagatcgttgagctttgtggtaaatggggaattcaagtccttacagttttcgctttctctactgataattggattagaccaagaattgagattgatttcttgtttagtttatttgagagatcactcaaaacagaatttcagaacttagccaagaacaatgttcggatatcgatcattggagattcctcgaaacttccgaaatctcttttaagagtgattaacgaagttgaggaagttacaaagaacaacacgaggcttcagctaatcgtagcggttggttacagtgggaaatacgatgttttacaagcgtgtagaggtatcgcgaggagagtgaaagatggcgaaatcgaagttgaggagatagacgagagactgattgaggaagaattggagacgaattgtactgagtttccttacccggatttacttataagaacgagtggtgagcttagagtgagtaacttcttgttgtggcaattggcttatacagagcttttctttgctcaagaactttggcctgattttgggagaagcggttttatcgaagctttgatgtcgtttcagcagagacaacgacgctttggtggtcgtaaatcttga

SEQ ID NO: 90648 - protein, 310 aa, Arabidopsis thaliana
  peptide (1)..(310): Ceres Seq. ID no. 12724647
  misc_feature (84)..(307): Pfam Name: Putative undecaprenyl diphosphate synthase Pfam Description: Putative undecaprenyl diphosphate synthase
  misc_feature (1)..(310): Homolog of NCBI NO: 15237748 NR Description: dehydrodolichyl diphosphate synthase (DEDOL-PP putative; protein id: At5g58770.1 [Arabidopsis thaliana] contains similarity to unknown
  misc_feature (61)..(309): Homolog of NCBI NO: 34908428 NR Description: putative undecaprenyl pyrophosphate synthetase
  misc_feature (54)..(308): Homolog of NCBI NO: 18424146 NR Description: dehydrodolichyl diphosphate synthase (DEDOL-PP putative; protein id: At5g58782.1, supported by cDNA: 11295.
  misc_feature (54)..(308): Homolog of NCBI NO: 21618322 NR Description: undecaprenyl pyrophosphate synthetase-like
  misc_feature (45)..(308): Homolog of NCBI NO: 18424144 NR Description: dehydrodolichyl diphosphate synthase (DEDOL-PP putative; protein id: At5g58780.1, supported by cDNA: gi_19699276 thaliana] >gi|19699277|gb|AAL91250.1| AT5g58780/mzn1_230
  misc_feature (52)..(308): Homolog of NCBI NO: 8843800 NR Description: cis-prenyltransferase homolog-like; undecaprenyl
  misc_feature (76)..(308): Homolog of NCBI NO: 18424148 NR Description: dehydrodolichyl diphosphate synthase (DEDOL-PP
  misc_feature (72)..(308): Homolog of NCBI NO: 7447521 NR Description: hypothetical protein At2g23410 [imported] -
  misc_feature (72)..(308): Homolog of NCBI NO: 18400264 NR Description: dehydrodolichyl diphosphate synthase (DEDOL-PP protein id: At2g23410.1, supported by cDNA: gi_6651293
  misc_feature (64)..(306): Homolog of NCBI NO: 17230487 NR Description: undecaprenyl pyrophosphate synthetase [Nostoc sp.
MLSLRVPTPTSFDFRRYQAGDLERRWRLSRDSFLSFSPKFEENRGFRFGVKSSKSDVSFTAAEEEETLPEELHAELMPKHVAIIMDGNGRWAKNRGLQPWDGHRAGVEALKEIVELCGKWGIQVLTVFAFSTDNWIRPRIEIDFLFSLFERSLKTEFQNLAKNNVRISIIGDSSKLPKSLLRVINEVEEVTKNNTRLQLIVAVGYSGKYDVLQACRGIARRVKDGEIEVEEIDERLIEEELETNCTEFPYPDLLIRTSGELRVSNFLLWQLAYTELFFAQELWPDFGRSGFIEALMSFQQRQRRFGGRKS

SEQ ID NO: 90649 - protein, 234 aa, Arabidopsis thaliana
  peptide (1)..(234): Ceres Seq. ID no. 12724648
  misc_feature (8)..(231): Pfam Name: Putative undecaprenyl diphosphate synthase Pfam Description: Putative undecaprenyl diphosphate synthase
  misc_feature (1)..(234): Homolog of NCBI NO: 15237748 NR Description: dehydrodolichyl diphosphate synthase (DEDOL-PP putative; protein id: At5g58770.1 [Arabidopsis thaliana] contains similarity to unknown
  misc_feature (1)..(233): Homolog of NCBI NO: 34908428 NR Description: putative undecaprenyl pyrophosphate synthetase
  misc_feature (1)..(232): Homolog of NCBI NO: 18424146 NR Description: dehydrodolichyl diphosphate synthase (DEDOL-PP putative; protein id: At5g58782.1, supported by cDNA: 11295.
  misc_feature (1)..(232): Homolog of NCBI NO: 21618322 NR Description: undecaprenyl pyrophosphate synthetase-like
  misc_feature (1)..(232): Homolog of NCBI NO: 18424144 NR Description: dehydrodolichyl diphosphate synthase (DEDOL-PP putative; protein id: At5g58780.1, supported by cDNA: gi_19699276 thaliana] >gi|19699277|gb|AAL91250.1| AT5g58780/mzn1_230
  misc_feature (1)..(232): Homolog of NCBI NO: 8843800 NR Description: cis-prenyltransferase homolog-like; undecaprenyl
  misc_feature (1)..(232): Homolog of NCBI NO: 18424148 NR Description: dehydrodolichyl diphosphate synthase (DEDOL-PP
  misc_feature (1)..(232): Homolog of NCBI NO: 7447521 NR Description: hypothetical protein At2g23410 [imported] -
  misc_feature (1)..(232): Homolog of NCBI NO: 18400264 NR Description: dehydrodolichyl diphosphate synthase (DEDOL-PP protein id: At2g23410.1, supported by cDNA: gi_6651293
  misc_feature (1)..(230): Homolog of NCBI NO: 17230487 NR Description: undecaprenyl pyrophosphate synthetase [Nostoc sp.
MPKHVAIIMDGNGRWAKNRGLQPWDGHRAGVEALKEIVELCGKWGIQVLTVFAFSTDNWIRPRIEIDFLFSLFERSLKTEFQNLAKNNVRISIIGDSSKLPKSLLRVINEVEEVTKNNTRLQLIVAVGYSGKYDVLQACRGIARRVKDGEIEVEEIDERLIEEELETNCTEFPYPDLLIRTSGELRVSNFLLWQLAYTELFFAQELWPDFGRSGFIEALMSFQQRQRRFGGRKS

SEQ ID NO: 90650 - protein, 226 aa, Arabidopsis thaliana
  peptide (1)..(226): Ceres Seq. ID no. 12724649
  misc_feature (1)..(223): Pfam Name: Putative undecaprenyl diphosphate synthase Pfam Description: Putative undecaprenyl diphosphate synthase
  misc_feature (1)..(226): Homolog of NCBI NO: 15237748 NR Description: dehydrodolichyl diphosphate synthase (DEDOL-PP putative; protein id: At5g58770.1 [Arabidopsis thaliana] contains similarity to unknown
  misc_feature (1)..(225): Homolog of NCBI NO: 34908428 NR Description: putative undecaprenyl pyrophosphate synthetase
  misc_feature (1)..(224): Homolog of NCBI NO: 18424146 NR Description: dehydrodolichyl diphosphate synthase (DEDOL-PP putative; protein id: At5g58782.1, supported by cDNA: 11295.
  misc_feature (1)..(224): Homolog of NCBI NO: 21618322 NR Description: undecaprenyl pyrophosphate synthetase-like
  misc_feature (1)..(224): Homolog of NCBI NO: 18424144 NR Description: dehydrodolichyl diphosphate synthase (DEDOL-PP putative; protein id: At5g58780.1, supported by cDNA: gi_19699276 thaliana] >gi|19699277|gb|AAL91250.1| AT5g58780/mzn1_230
  misc_feature (1)..(224): Homolog of NCBI NO: 8843800 NR Description: cis-prenyltransferase homolog-like; undecaprenyl
  misc_feature (1)..(224): Homolog of NCBI NO: 18424148 NR Description: dehydrodolichyl diphosphate synthase (DEDOL-PP
  misc_feature (1)..(224): Homolog of NCBI NO: 7447521 NR Description: hypothetical protein At2g23410 [imported] -
  misc_feature (1)..(224): Homolog of NCBI NO: 18400264 NR Description: dehydrodolichyl diphosphate synthase (DEDOL-PP protein id: At2g23410.1, supported by cDNA: gi_6651293
  misc_feature (1)..(222): Homolog of NCBI NO: 17230487 NR Description: undecaprenyl pyrophosphate synthetase [Nostoc sp.
MDGNGRWAKNRGLQPWDGHRAGVEALKEIVELCGKWGIQVLTVFAFSTDNWIRPRIEIDFLFSLFERSLKTEFQNLAKNNVRISIIGDSSKLPKSLLRVINEVEEVTKNNTRLQLIVAVGYSGKYDVLQACRGIARRVKDGEIEVEEIDERLIEEELETNCTEFPYPDLLIRTSGELRVSNFLLWQLAYTELFFAQELWPDFGRSGFIEALMSFQQRQRRFGGRKS

SEQ ID NO: 90651 - DNA, 735 bp, Arabidopsis thaliana
  misc_feature (1)..(735): Ceres Seq. ID no. 12724654
  misc_feature: MA Experiment ID: 20000171 Result: Up-regulated in Transcription
  misc_feature: MA Experiment 20000171 PARAMETER Experiment Name: At_42deg_Heat_P Parameter: Age (day) Value: 14
  misc_feature: MA Experiment 20000171 PARAMETER Experiment Name: At_42deg_Heat_P Parameter: Organism Value: A. thaliana
  misc_feature: MA Experiment 20000171 PARAMETER Experiment Name: At_42deg_Heat_P Parameter: Plant Line Value: WS
  misc_feature: MA Experiment 20000171 PARAMETER Experiment Name: At_42deg_Heat_P Parameter: Temperature (deg C) Value: 42 vs. 22
  misc_feature: MA Experiment 20000171 PARAMETER Experiment Name: At_42deg_Heat_P Parameter: Timepoint (hr) Value: 1
  misc_feature: MA Experiment 20000171 PARAMETER Experiment Name: At_42deg_Heat_P Parameter: Tissue Value: Aerial
  misc_feature: MA Experiment ID: 20000185 Result: Up-regulated in Transcription
  misc_feature: MA Experiment 20000185 PARAMETER Experiment Name: At_Roots__P Parameter: Age (day) Value: 7 vs. 21
  misc_feature: MA Experiment 20000185 PARAMETER Experiment Name: At_Roots__P Parameter: Organism Value: A. thaliana
  misc_feature: MA Experiment 20000185 PARAMETER Experiment Name: At_Roots__P Parameter: Tissue Value: Roots vs. Whole Plant
  misc_feature: MA Experiment ID: 20000227 Result: Up-regulated in Transcription
  misc_feature: MA Experiment 20000227 PARAMETER Experiment Name: At_Root-Tips-vs-Tops_P Parameter: Tissue Value: Root Tips vs. Root Tops
atgggagagaaacagaaacgagggagaaatataatgccaaagcatgtggcggttatattggacggaaacagacgttgggctgaaaaacgaggactcgggacatcggaaggccacgaggccggagcgagaaggctcatggagaatgctaaggattgtttcgctatggggacaaacactatctcactctttgctttctccaccgaaaattgggaaagaccagaggatgaagttaagtgcttgatggccttgtttgagaaatacttagcgtctgatatgccttacctccgaagtgataagatcaagatctcggttatcgggaaccgtacaaaactccccgagtcgcttctaggtttgatagaagaggtagaggaagctacaaagagttacgaagggaagaatctcattatagcaatagactatagtggaagatatgatatcttacaagcatgcaaaagtcttgcaaataaagtgaaagacgggctgattcaagtggaggacattaacgagaaggcgatggagaaagagttgttgacaaagtgtagcgaattcccaaaccctgacctgttgatcagaacaagcggagagcaaaggatcagtaacttctttttatggcaatctgcttacactgagctttactttccaactgttttgtggcctgattttggcgaagctgagtatcttgaggccttgacttggtatcagcaaaggcagaggcgattcggtcgacgagtttaa

SEQ ID NO: 90652 - protein, 244 aa, Arabidopsis thaliana; identical to SEQ ID NO: 69923
  peptide (1)..(244): Ceres Seq. ID no. 12724655
  misc_feature (19)..(242): Pfam Name: Putative undecaprenyl diphosphate synthase Pfam Description: Putative undecaprenyl diphosphate synthase
  misc_feature (1)..(244): Homolog of NCBI NO: 8843800 NR Description: cis-prenyltransferase homolog-like; undecaprenyl
  misc_feature (1)..(244): Homolog of NCBI NO: 18424148 NR Description: dehydrodolichyl diphosphate synthase (DEDOL-PP
  misc_feature (9)..(244): Homolog of NCBI NO: 18424144 NR Description: dehydrodolichyl diphosphate synthase (DEDOL-PP putative; protein id: At5g58780.1, supported by cDNA: gi_19699276 thaliana] >gi|19699277|gb|AAL91250.1| AT5g58780/mzn1_230
  misc_feature (9)..(244): Homolog of NCBI NO: 18424146 NR Description: dehydrodolichyl diphosphate synthase (DEDOL-PP putative; protein id: At5g58782.1, supported by cDNA: 11295.
  misc_feature (9)..(244): Homolog of NCBI NO: 21618322 NR Description: undecaprenyl pyrophosphate synthetase-like
  misc_feature (9)..(244): Homolog of NCBI NO: 7447521 NR Description: hypothetical protein At2g23410 [imported] -
  misc_feature (9)..(244): Homolog of NCBI NO: 18400264 NR Description: dehydrodolichyl diphosphate synthase (DEDOL-PP protein id: At2g23410.1, supported by cDNA: gi_6651293
  misc_feature (20)..(244): Homolog of NCBI NO: 8843798 NR Description: undecaprenyl pyrophosphate synthetase-like
  misc_feature (12)..(244): Homolog of NCBI NO: 8843799 NR Description: undecaprenyl pyrophosphate synthetase-like
  misc_feature (11)..(243): Homolog of NCBI NO: 15237748 NR Description: dehydrodolichyl diphosphate synthase (DEDOL-PP putative; protein id: At5g58770.1 [Arabidopsis thaliana] contains similarity to unknown

SEQ ID NO: 90653 - protein, 233 aa, Arabidopsis thaliana; identical to SEQ ID NO: 69924
  peptide (1)..(233): Ceres Seq. ID no. 12724656
  misc_feature (8)..(231): Pfam Name: Putative undecaprenyl diphosphate synthase Pfam Description: Putative undecaprenyl diphosphate synthase
  misc_feature (1)..(233): Homolog of NCBI NO: 8843800 NR Description: cis-prenyltransferase homolog-like; undecaprenyl
  misc_feature (1)..(233): Homolog of NCBI NO: 18424148 NR Description: dehydrodolichyl diphosphate synthase (DEDOL-PP
  misc_feature (1)..(233): Homolog of NCBI NO: 18424144 NR Description: dehydrodolichyl diphosphate synthase (DEDOL-PP putative; protein id: At5g58780.1, supported by cDNA: gi_19699276 thaliana] >gi|19699277|gb|AAL91250.1| AT5g58780/mzn1_230
  misc_feature (1)..(233): Homolog of NCBI NO: 18424146 NR Description: dehydrodolichyl diphosphate synthase (DEDOL-PP putative; protein id: At5g58782.1, supported by cDNA: 11295.
  misc_feature (1)..(233): Homolog of NCBI NO: 21618322 NR Description: undecaprenyl pyrophosphate synthetase-like
  misc_feature (1)..(233): Homolog of NCBI NO: 7447521 NR Description: hypothetical protein At2g23410 [imported] -
  misc_feature (1)..(233): Homolog of NCBI NO: 18400264 NR Description: dehydrodolichyl diphosphate synthase (DEDOL-PP protein id: At2g23410.1, supported by cDNA: gi_6651293
  misc_feature (9)..(233): Homolog of NCBI NO: 8843798 NR Description: undecaprenyl pyrophosphate synthetase-like
  misc_feature (1)..(233): Homolog of NCBI NO: 8843799 NR Description: undecaprenyl pyrophosphate synthetase-like
  misc_feature (1)..(232): Homolog of NCBI NO: 15237748 NR Description: dehydrodolichyl diphosphate synthase (DEDOL-PP putative; protein id: At5g58770.1 [Arabidopsis thaliana] contains similarity to unknown

SEQ ID NO: 90654 - protein, 199 aa, Arabidopsis thaliana
  peptide (1)..(199): Ceres Seq. ID no. 12724657
  misc_feature (1)..(197): Pfam Name: Putative undecaprenyl diphosphate synthase Pfam Description: Putative undecaprenyl diphosphate synthase
  misc_feature (1)..(199): Homolog of NCBI NO: 8843800 NR Description: cis-prenyltransferase homolog-like; undecaprenyl
  misc_feature (1)..(199): Homolog of NCBI NO: 18424148 NR Description: dehydrodolichyl diphosphate synthase (DEDOL-PP
  misc_feature (1)..(199): Homolog of NCBI NO: 18424144 NR Description: dehydrodolichyl diphosphate synthase (DEDOL-PP putative; protein id: At5g58780.1, supported by cDNA: gi_19699276 thaliana] >gi|19699277|gb|AAL91250.1| AT5g58780/mzn1_230
  misc_feature (1)..(199): Homolog of NCBI NO: 18424146 NR Description: dehydrodolichyl diphosphate synthase (DEDOL-PP putative; protein id: At5g58782.1, supported by cDNA: 11295.
  misc_feature (1)..(199): Homolog of NCBI NO: 21618322 NR Description: undecaprenyl pyrophosphate synthetase-like
  misc_feature (1)..(199): Homolog of NCBI NO: 7447521 NR Description: hypothetical protein At2g23410 [imported] -
  misc_feature (1)..(199): Homolog of NCBI NO: 18400264 NR Description: dehydrodolichyl diphosphate synthase (DEDOL-PP protein id: At2g23410.1, supported by cDNA: gi_6651293
  misc_feature (1)..(199): Homolog of NCBI NO: 8843798 NR Description: undecaprenyl pyrophosphate synthetase-like
  misc_feature (1)..(199): Homolog of NCBI NO: 8843799 NR Description: undecaprenyl pyrophosphate synthetase-like
  misc_feature (1)..(198): Homolog of NCBI NO: 15237748 NR Description: dehydrodolichyl diphosphate synthase (DEDOL-PP putative; protein id: At5g58770.1 [Arabidopsis thaliana] contains similarity to unknown
MENAKDCFAMGTNTISLFAFSTENWERPEDEVKCLMALFEKYLASDMPYLRSDKIKISVIGNRTKLPESLLGLIEEVEEATKSYEGKNLIIAIDYSGRYDILQACKSLANKVKDGLIQVEDINEKAMEKELLTKCSEFPNPDLLIRTSGEQRISNFFLWQSAYTELYFPTVLWPDFGEAEYLEALTWYQQRQRRFGRRV

SEQ ID NO: 90655 - DNA, 561 bp, Arabidopsis thaliana
  misc_feature (1)..(561): Ceres Seq. ID no. 12724705
  misc_feature: MA Experiment ID: 20001904 Result: Up-regulated in Transcription
  misc_feature: MA Experiment 20001904 PARAMETER Experiment Name: At_Drought_Reproduction_P Parameter: Age (day) Value: 37
  misc_feature: MA Experiment 20001904 PARAMETER Experiment Name: At_Drought_Reproduction_P Parameter: Organism Value: A. thaliana
  misc_feature: MA Experiment 20001904 PARAMETER Experiment Name: At_Drought_Reproduction_P Parameter: Plant Line Value: WS
  misc_feature: MA Experiment 20001904 PARAMETER Experiment Name: At_Drought_Reproduction_P Parameter: Timepoint (day) Value: 7
  misc_feature: MA Experiment 20001904 PARAMETER Experiment Name: At_Drought_Reproduction_P Parameter: Tissue Value: Rosettes
  misc_feature: MA Experiment 20001904 PARAMETER Experiment Name: At_Drought_Reproduction_P Parameter: Treatment Value: Drought vs. No Drought
  misc_feature: MA Experiment ID: 20001905 Result: Up-regulated in Transcription
  misc_feature: MA Experiment 20001905 PARAMETER Experiment Name: At_Drought_Reproduction_P Parameter: Age (day) Value: 40
  misc_feature: MA Experiment 20001905 PARAMETER Experiment Name: At_Drought_Reproduction_P Parameter: Organism Value: A. thaliana
  misc_feature: MA Experiment 20001905 PARAMETER Experiment Name: At_Drought_Reproduction_P Parameter: Plant Line Value: WS
  misc_feature: MA Experiment 20001905 PARAMETER Experiment Name: At_Drought_Reproduction_P Parameter: Timepoint (day) Value: 10
  misc_feature: MA Experiment 20001905 PARAMETER Experiment Name: At_Drought_Reproduction_P Parameter: Tissue Value: Rosettes
  misc_feature: MA Experiment 20001905 PARAMETER Experiment Name: At_Drought_Reproduction_P Parameter: Treatment Value: Drought vs. No Drought
atggtgttatcaacgagcgatacgagtagctcttacaactatgttatcgatgacgttatcaacaagtctcgatgcgatcttgtctacaatggagaacttgatgagagtgttcttagccaaattcaatcgatgtggaaaacgaagatgatacaagcaggagccatgagcggaacaatcgaaacatcttctgcttcgattcccaccacacctgtgatagtgcagacgactcttcagactccggatgcaattcctttacctgagaagaagatgtctccaaagaaagagagtgatggattttattatattcctcagcaagatggagcgagagatgaagctattgtcgatgtagatgagaatgaagagcctttgaacgaggatgatgatgatgaggaagatgatatcgatgatgatgatatgaacattcaacatttggtcatgtgtcaatttgataaggtgaagcgttccaagaacaagtgggagtgcaaattcaatgcgggtgttatgcaaataaacggcaaaaatgttcttttctcacaggcaacaggagatttcaacttctag

SEQ ID NO: 90656 - protein, 186 aa, Arabidopsis thaliana
  peptide (1)..(186): Ceres Seq. ID no. 12724706
  misc_feature (113)..(186): Pfam Name: Transcription factor IIA, alpha/beta subunit Pfam Description: Transcription factor IIA, alpha/beta subunit
  misc_feature (1)..(186): Homolog of NCBI NO: 15237841 NR Description: putative protein; protein id: At5g59230.1 thaliana] >gi|9759244|dbj|BAB09768.1| gene_id:MNC17.14~unknown
  misc_feature (116)..(186): Homolog of NCBI NO: 18390773 NR Description: transcription factor IIA large subunit; protein At1g07470.1, supported by cDNA: 19512., supported by cDNA: supported by cDNA: gi_15146225, supported by cDNA: gi_15983369
  misc_feature (4)..(68): Homolog of NCBI NO: 18390773 NR Description: transcription factor IIA large subunit; protein At1g07470.1, supported by cDNA: 19512., supported by cDNA: supported by cDNA: gi_15146225, supported by cDNA: gi_15983369
  misc_feature (116)..(186): Homolog of NCBI NO: 1429226 NR Description: TFIIA [Arabidopsis thaliana]
  misc_feature (4)..(68): Homolog of NCBI NO: 1429226 NR Description: TFIIA [Arabidopsis thaliana]
  misc_feature (116)..(186): Homolog of NCBI NO: 30680148 NR Description: transcription factor IIA large subunit thaliana] >gi|30680153|ref|NP_172228.3| transcription factor IIA subunit [Arabidopsis thaliana] >gi|11358887|pir||T51333
  misc_feature (4)..(68): Homolog of NCBI NO: 30680148 NR Description: transcription factor IIA large subunit thaliana] >gi|30680153|ref|NP_172228.3| transcription factor IIA subunit [Arabidopsis thaliana] >gi|11358887|pir||T51333
  misc_feature (116)..(181): Homolog of NCBI NO: 25406976 NR Description: protein F22G5.18 [imported] - Arabidopsis >gi|8778565|gb|AAF79573.1|AC022464_31 F22G5.18 [Arabidopsis
  misc_feature (4)..(68): Homolog of NCBI NO: 25406976 NR Description: protein F22G5.18 [imported] - Arabidopsis >gi|8778565|gb|AAF79573.1|AC022464_31 F22G5.18 [Arabidopsis
  misc_feature (116)..(179): Homolog of NCBI NO: 25406978 NR Description: protein F22G5.14 [imported] - Arabidopsis >gi|8778543|gb|AAF79551.1|AC022464_9 F22G5.14 [Arabidopsis
MVLSTSDTSSSYNYVIDDVINKSRCDLVYNGELDESVLSQIQSMWKTKMIQAGAMSGTIETSSASIPTTPVIVQTTLQTPDAIPLPEKKMSPKKESDGFYYIPQQDGARDEAIVDVDENEEPLNEDDDDEEDDIDDDDMNIQHLVMCQFDKVKRSKNKWECKFNAGVMQINGKNVLFSQATGDFNF

SEQ ID NO: 90657 - protein, 143 aa, Arabidopsis thaliana
  peptide (1)..(143): Ceres Seq. ID no. 12724707
  misc_feature (70)..(143): Pfam Name: Transcription factor IIA, alpha/beta subunit Pfam Description: Transcription factor IIA, alpha/beta subunit
  misc_feature (1)..(143): Homolog of NCBI NO: 15237841 NR Description: putative protein; protein id: At5g59230.1 thaliana] >gi|9759244|dbj|BAB09768.1| gene_id:MNC17.14~unknown
  misc_feature (73)..(143): Homolog of NCBI NO: 18390773 NR Description: transcription factor IIA large subunit; protein At1g07470.1, supported by cDNA: 19512., supported by cDNA: supported by cDNA: gi_15146225, supported by cDNA: gi_15983369
  misc_feature (1)..(25): Homolog of NCBI NO: 18390773 NR Description: transcription factor IIA large subunit; protein At1g07470.1, supported by cDNA: 19512., supported by cDNA: supported by cDNA: gi_15146225, supported by cDNA: gi_15983369
  misc_feature (73)..(143): Homolog of NCBI NO: 1429226 NR Description: TFIIA [Arabidopsis thaliana]
  misc_feature (1)..(25): Homolog of NCBI NO: 1429226 NR Description: TFIIA [Arabidopsis thaliana]
  misc_feature (73)..(143): Homolog of NCBI NO: 30680148 NR Description: transcription factor IIA large subunit thaliana] >gi|30680153|ref|NP_172228.3| transcription factor IIA subunit [Arabidopsis thaliana] >gi|11358887|pir||T51333
  misc_feature (1)..(25): Homolog of NCBI NO: 30680148 NR Description: transcription factor IIA large subunit thaliana] >gi|30680153|ref|NP_172228.3| transcription factor IIA subunit [Arabidopsis thaliana] >gi|11358887|pir||T51333
  misc_feature (73)..(138): Homolog of NCBI NO: 25406976 NR Description: protein F22G5.18 [imported] - Arabidopsis >gi|8778565|gb|AAF79573.1|AC022464_31 F22G5.18 [Arabidopsis
  misc_feature (1)..(25): Homolog of NCBI NO: 25406976 NR Description: protein F22G5.18 [imported] - Arabidopsis >gi|8778565|gb|AAF79573.1|AC022464_31 F22G5.18 [Arabidopsis
  misc_feature (73)..(136): Homolog of NCBI NO: 25406978 NR Description: protein F22G5.14 [imported] - Arabidopsis >gi|8778543|gb|AAF79551.1|AC022464_9 F22G5.14 [Arabidopsis
MWKTKMIQAGAMSGTIETSSASIPTTPVIVQTTLQTPDAIPLPEKKMSPKKESDGFYYIPQQDGARDEAIVDVDENEEPLNEDDDDEEDDIDDDDMNIQHLVMCQFDKVKRSKNKWECKFNAGVMQINGKNVLFSQATGDFNF

SEQ ID NO: 90658 - protein, 138 aa, Arabidopsis thaliana
  peptide (1)..(138): Ceres Seq. ID no. 12724708
  misc_feature (65)..(138): Pfam Name: Transcription factor IIA, alpha/beta subunit Pfam Description: Transcription factor IIA, alpha/beta subunit
  misc_feature (1)..(138): Homolog of NCBI NO: 15237841 NR Description: putative protein; protein id: At5g59230.1 thaliana] >gi|9759244|dbj|BAB09768.1| gene_id:MNC17.14~unknown
  misc_feature (68)..(138): Homolog of NCBI NO: 18390773 NR Description: transcription factor IIA large subunit; protein At1g07470.1, supported by cDNA: 19512., supported by cDNA: supported by cDNA: gi_15146225, supported by cDNA: gi_15983369
  misc_feature (1)..(20): Homolog of NCBI NO: 18390773 NR Description: transcription factor IIA large subunit; protein At1g07470.1, supported by cDNA: 19512., supported by cDNA: supported by cDNA: gi_15146225, supported by cDNA: gi_15983369
  misc_feature (68)..(138): Homolog of NCBI NO: 1429226 NR Description: TFIIA [Arabidopsis thaliana]
  misc_feature (1)..(20): Homolog of NCBI NO: 1429226 NR Description: TFIIA [Arabidopsis thaliana]
  misc_feature (68)..(138): Homolog of NCBI NO: 30680148 NR Description: transcription factor IIA large subunit thaliana] >gi|30680153|ref|NP_172228.3| transcription factor IIA subunit [Arabidopsis thaliana] >gi|11358887|pir||T51333
  misc_feature (1)..(20): Homolog of NCBI NO: 30680148 NR Description: transcription factor IIA large subunit thaliana] >gi|30680153|ref|NP_172228.3| transcription factor IIA subunit [Arabidopsis thaliana] >gi|11358887|pir||T51333
  misc_feature (68)..(133): Homolog of NCBI NO: 25406976 NR Description: protein F22G5.18 [imported] - Arabidopsis >gi|8778565|gb|AAF79573.1|AC022464_31 F22G5.18 [Arabidopsis
  misc_feature (1)..(20): Homolog of NCBI NO: 25406976 NR Description: protein F22G5.18 [imported] - Arabidopsis >gi|8778565|gb|AAF79573.1|AC022464_31 F22G5.18 [Arabidopsis
  misc_feature (68)..(131): Homolog of NCBI NO: 25406978 NR Description: protein F22G5.14 [imported] - Arabidopsis >gi|8778543|gb|AAF79551.1|AC022464_9 F22G5.14 [Arabidopsis
MIQAGAMSGTIETSSASIPTTPVIVQTTLQTPDAIPLPEKKMSPKKESDGFYYIPQQDGARDEAIVDVDENEEPLNEDDDDEEDDIDDDDMNIQHLVMCQFDKVKRSKNKWECKFNAGVMQINGKNVLFSQATGDFNF

SEQ ID NO: 90659 - DNA, 2025 bp, Arabidopsis thaliana
  misc_feature (1)..(2025): Ceres Seq. ID no. 12724712
  misc_feature: MA Experiment ID: 20000227 Result: Down-regulated in Transcription
  misc_feature: MA Experiment 20000227 PARAMETER Experiment Name: At_Root-Tips-vs-Tops_P Parameter: Tissue Value: Root Tips vs. Root Tops
  misc_feature: MA Experiment ID: 20000439 Result: Up-regulated in Transcription
  misc_feature: MA Experiment 20000439 PARAMETER Experiment Name: At_Roots__P Parameter: Age (day) Value: 14 vs. 21
  misc_feature: MA Experiment 20000439 PARAMETER Experiment Name: At_Roots__P Parameter: Organism Value: A. thaliana
  misc_feature: MA Experiment 20000439 PARAMETER Experiment Name: At_Roots__P Parameter: Tissue Value: Roots vs. Whole Plant
atggctggagttctaggatcagtggttttctggttgataattggtatccatgtaacctttttggtgttcgctcaagagggagatcattttgtgtattatgactttaggaatgcagatctggaactcgatggaatggcaaatacaaaccatggtccattgcatctaacaaataatacaaacacgggcaccggtcacgctttctacaacattcccatcaagttcacagcgtcttcactcagttcattttccttctcaacagaatttgtctttgcaatcttcccgctgcaaaaatctacctacggtcacggaatggcatttgtggtatctccaaccaaagatctcaggtctaacggcagtgcaaattcaaatttaggtattttcaatagagcaaatgataacaagactgcaacccatatctttgctgtagaacttgacactaatcaaaactcggagtcatttgacaaaggtggtaacgatgtgggtattgatattaacagtatagtttcagttgaatctgcggacgctagttactttaatgctagaaaaggaaagaatataagtctgccgcttgctagtggtaaaagtattctggtctggatagattatgatggaatagagaaagtactcaacgtaacgttagctccagtacaaactccaaagcccgattcgccttacttttcaagcttcattaaaccaaaagtgccactcttgtcaagatccatcaacctttcagaaattttcactgagacgatgtatgtaggtttttctggttctacaggctcaatcaaaagtaaccagtatatccttggatggagtttcaagcaaggcggaaaagcggaaagccttgacatttcaagactttcgaatccaccaccatcgcctaaaaggtttccattaaaagaggttctaggcgctaccatatcaacaattgcttttctaactctgggaggaattgtgtatctttacaagaaaaagaagtatgcagaggtgcttgaacaatgggaaaaggaatatagccctcaaaggtactcctttaggatcctttacaaagcaaccaaaggtttcagggagaatcagttacttggagcaggaggttttggaaaagtctataaaggaatacttccttctggtacacaaatcgcggttaagagagtctaccatgatgcagagcaaggaatgaaacagtatgtggcagagattgctagtatgggaaggctaaggcacaagaacttagttcatctccttggttactgcagaaggaaaggtgaattgcttttggtctatgattacatgccaaatggaagccttgatgactatttgttccataaaaacaagctaaaagacctcacttggtctcagagagtcaatataatcaagggagttgcctctgcccttctgtatcttcatgaagaatgggaacaagttgtactacatcgagatataaaagctagcaacattcttttagatgcggatctaaatggaaagttgggagactttgggttagccaggttccatgatcgtggtgtgaatctcgaagccacacgggtagtaggtaccattggctacatggcaccagagcttactgcaatgggagtcaccactacttgtaccgatgtctatgcttttggagcttttatccttgaagtggtatgtggaaggagaccagtagacccagatgcaccacgtgagcaggtgattttggttaagtgggttgcgagctgcgggaaaagagatgctttaactgatactgttgacagcaaactaatagactttaaagttgaggaggccaagcttcttttgaagctaggaatgctctgttcacagatcaacccagaaaacagacccagtatgagacagatattacaatatctggaaggaaatgtaagtgttccagctatatcgtttggtactgttgcacttggtatacccaatataagccatgaaacagtaacacaaatgacaacaacctcttcatcagctaatttctcatttgaggatgttacagtcctatttggtggtcgctag

SEQ ID NO: 90660 - protein, 674 aa, Arabidopsis thaliana
  peptide (1)..(674): Ceres Seq. ID no. 12724713
  misc_feature (290)..(674): Homolog of NCBI NO: 15237850 NR Description: receptor-like protein kinase; protein id:
  misc_feature (1)..(253): Homolog of NCBI NO: 15237850 NR Description: receptor-like protein kinase; protein id:
  misc_feature (364)..(674): Homolog of NCBI NO: 9759248 NR Description: receptor-like protein kinase-like protein
  misc_feature (1)..(277): Homolog of NCBI NO: 9759248 NR Description: receptor-like protein kinase-like protein
  misc_feature (24)..(674): Homolog of NCBI NO: 15230694 NR Description: receptor-like protein kinase; protein id:
  misc_feature (3)..(674): Homolog of NCBI NO: 15239260 NR Description: receptor like protein kinase; protein id:
  misc_feature (12)..(674): Homolog of NCBI NO: 15239268 NR Description: receptor-like protein kinase; protein id:
  misc_feature (231)..(674): Homolog of NCBI NO: 34395078 NR Description: putative receptor kinase Lecrk [Oryza sativa
  misc_feature (28)..(287): Homolog of NCBI NO: 34395078 NR Description: putative receptor kinase Lecrk [Oryza sativa
  misc_feature (18)..(674): Homolog of NCBI NO: 15230670 NR Description: receptor-like protein kinase; protein id:
MAGVLGSVVFWLIIGIHVTFLVFAQEGDHFVYYDFRNADLELDGMANTNHGPLHLTNNTNTGTGHAFYNIPIKFTASSLSSFSFSTEFVFAIFPLQKSTYGHGMAFVVSPTKDLRSNGSANSNLGIFNRANDNKTATHIFAVELDTNQNSESFDKGGNDVGIDINSIVSVESADASYFNARKGKNISLPLASGKSILVWIDYDGIEKVLNVTLAPVQTPKPDSPYFSSFIKPKVPLLSRSINLSEIFTETMYVGFSGSTGSIKSNQYILGWSFKQGGKAESLDISRLSNPPPSPKRFPLKEVLGATISTIAFLTLGGIVYLYKKKKYAEVLEQWEKEYSPQRYSFRILYKATKGFRENQLLGAGGFGKVYKGILPSGTQIAVKRVYHDAEQGMKQYVAEIASMGRLRHKNLVHLLGYCRRKGELLLVYDYMPNGSLDDYLFHKNKLKDLTWSQRVNIIKGVASALLYLHEEWEQVVLHRDIKASNILLDADLNGKLGDFGLARFHDRGVNLEATRVVGTIGYMAPELTAMGVTTTCTDVYAFGAFILEVVCGRRPVDPDAPREQVILVKWVASCGKRDALTDTVDSKLIDFKVEEAKLLLKLGMLCSQINPENRPSMRQILQYLEGNVSVPAISFGTVALGIPNISHETVTQMTTTSSSANFSFEDVTVLFGGR

SEQ ID NO: 90661 - protein, 630 aa, Arabidopsis thaliana
  peptide (1)..(630): Ceres Seq. ID no. 12724714
  misc_feature (246)..(630): Homolog of NCBI NO: 15237850 NR Description: receptor-like protein kinase; protein id:
  misc_feature (1)..(209): Homolog of NCBI NO: 15237850 NR Description: receptor-like protein kinase; protein id:
  misc_feature (320)..(630): Homolog of NCBI NO: 9759248 NR Description: receptor-like protein kinase-like protein
  misc_feature (1)..(233): Homolog of NCBI NO: 9759248 NR Description: receptor-like protein kinase-like protein
  misc_feature (1)..(630): Homolog of NCBI NO: 15230694 NR Description: receptor-like protein kinase; protein id:
  misc_feature (1)..(630): Homolog of NCBI NO: 15239260 NR Description: receptor like protein kinase; protein id:
  misc_feature (1)..(630): Homolog of NCBI NO: 15239268 NR Description: receptor-like protein kinase; protein id:
  misc_feature (187)..(630): Homolog of NCBI NO: 34395078 NR Description: putative receptor kinase Lecrk [Oryza sativa
  misc_feature (1)..(243): Homolog of NCBI NO: 34395078 NR Description: putative receptor kinase Lecrk [Oryza sativa
  misc_feature (1)..(630): Homolog of NCBI NO: 15230670 NR Description: receptor-like protein kinase; protein id:
MANTNHGPLHLTNNTNTGTGHAFYNIPIKFTASSLSSFSFSTEFVFAIFPLQKSTYGHGMAFVVSPTKDLRSNGSANSNLGIFNRANDNKTATHIFAVELDTNQNSESFDKGGNDVGIDINSIVSVESADASYFNARKGKNISLPLASGKSILVWIDYDGIEKVLNVTLAPVQTPKPDSPYFSSFIKPKVPLLSRSINLSEIFTETMYVGFSGSTGSIKSNQYILGWSFKQGGKAESLDISRLSNPPPSPKRFPLKEVLGATISTIAFLTLGGIVYLYKKKKYAEVLEQWEKEYSPQRYSFRILYKATKGFRENQLLGAGGFGKVYKGILPSGTQIAVKRVYHDAEQGMKQYVAEIASMGRLRHKNLVHLLGYCRRKGELLLVYDYMPNGSLDDYLFHKNKLKDLTWSQRVNIIKGVASALLYLHEEWEQVVLHRDIKASNILLDADLNGKLGDFGLARFHDRGVNLEATRVVGTIGYMAPELTAMGVTTTCTDVYAFGAFILEVVCGRRPVDPDAPREQVILVKWVASCGKRDALTDTVDSKLIDFKVEEAKLLLKLGMLCSQINPENRPSMRQILQYLEGNVSVPAISFGTVALGIPNISHETVTQMTTTSSSANFSFEDVTVLFGGR

SEQ ID NO: 90662 - protein, 571 aa, Arabidopsis thaliana
  peptide (1)..(571): Ceres Seq. ID no. 12724715
  misc_feature (187)..(571): Homolog of NCBI NO: 15237850 NR Description: receptor-like protein kinase; protein id:
  misc_feature (1)..(150): Homolog of NCBI NO: 15237850 NR Description: receptor-like protein kinase; protein id:
  misc_feature (261)..(571): Homolog of NCBI NO: 9759248 NR Description: receptor-like protein kinase-like protein
  misc_feature (1)..(174): Homolog of NCBI NO: 9759248 NR Description: receptor-like protein kinase-like protein
  misc_feature (1)..(571): Homolog of NCBI NO: 15230694 NR Description: receptor-like protein kinase; protein id:
  misc_feature (1)..(571): Homolog of NCBI NO: 15239260 NR Description: receptor like protein kinase; protein id:
  misc_feature (1)..(571): Homolog of NCBI NO: 15239268 NR Description: receptor-like protein kinase; protein id:
  misc_feature (128)..(571): Homolog of NCBI NO: 34395078 NR Description: putative receptor kinase Lecrk [Oryza sativa
  misc_feature (1)..(184): Homolog of NCBI NO: 34395078 NR Description: putative receptor kinase Lecrk [Oryza sativa
  misc_feature (1)..(571): Homolog of NCBI NO: 15230670 NR Description: receptor-like protein kinase; protein id:
MAFVVSPTKDLRSNGSANSNLGIFNRANDNKTATHIFAVELDTNQNSESFDKGGNDVGIDINSIVSVESADASYFNARKGKNISLPLASGKSILVWIDYDGIEKVLNVTLAPVQTPKPDSPYFSSFIKPKVPLLSRSINLSEIFTETMYVGFSGSTGSIKSNQYILGWSFKQGGKAESLDISRLSNPPPSPKRFPLKEVLGATISTIAFLTLGGIVYLYKKKKYAEVLEQWEKEYSPQRYSFRILYKATKGFRENQLLGAGGFGKVYKGILPSGTQIAVKRVYHDAEQGMKQYVAEIASMGRLRHKNLVHLLGYCRRKGELLLVYDYMPNGSLDDYLFHKNKLKDLTWSQRVNIIKGVASALLYLHEEWEQVVLHRDIKASNILLDADLNGKLGDFGLARFHDRGVNLEATRVVGTIGYMAPELTAMGVTTTCTDVYAFGAFILEVVCGRRPVDPDAPREQVILVKWVASCGKRDALTDTVDSKLIDFKVEEAKLLLKLGMLCSQINPENRPSMRQILQYLEGNVSVPAISFGTVALGIPNISHETVTQMTTTSSSANFSFEDVTVLFGGR

SEQ ID NO: 90663 - DNA, 801 bp, Arabidopsis thaliana
  misc_feature (1)..(801): Ceres Seq. ID no. 12724740
  misc_feature: MA Experiment ID: 20000182 Result: Up-regulated in Transcription
  misc_feature: MA Experiment 20000182 PARAMETER Experiment Name: At_2mM_SA_P Parameter: Age (day) Value: 14
  misc_feature: MA Experiment 20000182 PARAMETER Experiment Name: At_2mM_SA_P Parameter: Organism Value: A. thaliana
  misc_feature: MA Experiment 20000182 PARAMETER Experiment Name: At_2mM_SA_P Parameter: Plant Line Value: WS
  misc_feature: MA Experiment 20000182 PARAMETER Experiment Name: At_2mM_SA_P Parameter: Timepoint (hr) Value: 6
  misc_feature: MA Experiment 20000182 PARAMETER Experiment Name: At_2mM_SA_P Parameter: Tissue Value: Aerial
  misc_feature: MA Experiment 20000182 PARAMETER Experiment Name: At_2mM_SA_P Parameter: Treatment Value: 2mM SA vs. No Treatment
  misc_feature: MA Experiment ID: 20000185 Result: Up-regulated in Transcription
  misc_feature: MA Experiment 20000185 PARAMETER Experiment Name: At_Roots__P Parameter: Age (day) Value: 7 vs. 21
  misc_feature: MA Experiment 20000185 PARAMETER Experiment Name: At_Roots__P Parameter: Organism Value: A. thaliana
  misc_feature: MA Experiment 20000185 PARAMETER Experiment Name: At_Roots__P Parameter: Tissue Value: Roots vs. Whole Plant
  misc_feature: MA Experiment ID: 20000437 Result: Up-regulated in Transcription
  misc_feature: MA Experiment 20000437 PARAMETER Experiment Name: At_Drought_P Parameter: Age (day) Value: 8
  misc_feature: MA Experiment 20000437 PARAMETER Experiment Name: At_Drought_P Parameter: Organism Value: A. thaliana
  misc_feature: MA Experiment 20000437 PARAMETER Experiment Name: At_Drought_P Parameter: Plant Line Value: WS
  misc_feature: MA Experiment 20000437 PARAMETER Experiment Name: At_Drought_P Parameter: Timepoint (hr) Value: 24
  misc_feature: MA Experiment 20000437 PARAMETER Experiment Name: At_Drought_P Parameter: Tissue Value: Whole Plant
  misc_feature: MA Experiment 20000437 PARAMETER Experiment Name: At_Drought_P Parameter: Treatment Value: Drought vs. No Drought
  misc_feature: MA Experiment ID: 20000439 Result: Up-regulated in Transcription
  misc_feature: MA Experiment 20000439 PARAMETER Experiment Name: At_Roots__P Parameter: Age (day) Value: 14 vs. 21
  misc_feature: MA Experiment 20000439 PARAMETER Experiment Name: At_Roots__P Parameter: Organism Value: A. thaliana
  misc_feature: MA Experiment 20000439 PARAMETER Experiment Name: At_Roots__P Parameter: Tissue Value: Roots vs. Whole Plant
atggaatttgtgaacagctctccaccaagatatgaatgtctcctctttgatttggatgatactctttatcctttaagctctggcttatcagatgcatgctccaacaacattatagaatatatggttgaaaagcttggaatagatgaagatggagtcgttgaactaaaccaaattctttataagaaatatggaacttcaatggccggtcttaaggcggtaggttatgaattcgataatgacgagtaccaccggtatgttcatggtagattaccttatgaaaaccttaaaccggacccggttctaaggagtctcctccttggtctacctttgcgaaaattggtattctcgaatggagatgaggttcatgtgatgaaggctctcacaagacttggcatcgaagattgttttgagagaatcataagtttcgagaccttaaaccctgatatcaacgaagctgagctttcttgcgtcacaggtcatcttcccgagaatccggttatttgtaaaccaactgagattgctttcgagaaagccttcgacattgcacagctcaatcctcacaaaaccttgttctttgacgacagtacccggaacatccaaaccgggaaagccgttggtctccatacagtcttggttggtaaatcagagaaaatagatggaagcgattacgcgttagaaagcattcacaacatgaaagaggcattccccgagttatggtcggaatccattatcaacaacaaagaaactgaaagaattgattacgcttcacagatctcgattgaaacttctgttcaagcttaa

SEQ ID NO: 90664 - protein, 266 aa, Arabidopsis thaliana
  peptide (1)..(266): Ceres Seq. ID no. 12724741
  misc_feature (11)..(215): Pfam Name: haloacid dehalogenase-like hydrolase Pfam Description: haloacid dehalogenase-like hydrolase
  misc_feature (1)..(266): Homolog of NCBI NO: 8885554 NR Description: ripening-related protein-like; hydrolase-like
  misc_feature (1)..(266): Homolog of NCBI NO: 15238429 NR Description: putative ripening-related protein - like; protein
  misc_feature (3)..(147): Homolog of NCBI NO: 7406669 NR Description: putative ripening-related protein [Vitis vinifera]
  misc_feature (161)..(266): Homolog of NCBI NO: 7406669 NR Description: putative ripening-related protein [Vitis vinifera]
  misc_feature (1)..(266): Homolog of NCBI NO: 15241720 NR Description: putative protein; protein id: At5g02230.1, by cDNA: 36724. [Arabidopsis thaliana] >gi|11358409|pir||T48244
  misc_feature (1)..(266): Homolog of NCBI NO: 21593165 NR Description: unknown [Arabidopsis thaliana]
  misc_feature (3)..(153): Homolog of NCBI NO: 30697234 NR Description: haloacid dehalogenase-like hydrolase family
  misc_feature (161)..(262): Homolog of NCBI NO: 30697234 NR Description: haloacid dehalogenase-like hydrolase family
  misc_feature (3)..(153): Homolog of NCBI NO: 21618155 NR Description: putative ripening-related protein-like
  misc_feature (161)..(262): Homolog of NCBI NO: 21618155 NR Description: putative ripening-related protein-like
MEFVNSSPPRYECLLFDLDDTLYPLSSGLSDACSNNIIEYMVEKLGIDEDGVVELNQILYKKYGTSMAGLKAVGYEFDNDEYHRYVHGRLPYENLKPDPVLRSLLLGLPLRKLVFSNGDEVHVMKALTRLGIEDCFERIISFETLNPDINEAELSCVTGHLPENPVICKPTEIAFEKAFDIAQLNPHKTLFFDDSTRNIQTGKAVGLHTVLVGKSEKIDGSDYALESIHNMKEAFPELWSESIINNKETERIDYASQISIETSVQA

SEQ ID NO: 90665 - protein, 226 aa, Arabidopsis thaliana
  peptide (1)..(226): Ceres Seq. ID no. 12724742
  misc_feature (1)..(175): Pfam Name: haloacid dehalogenase-like hydrolase Pfam Description: haloacid dehalogenase-like hydrolase
  misc_feature (1)..(226): Homolog of NCBI NO: 8885554 NR Description: ripening-related protein-like; hydrolase-like
  misc_feature (1)..(226): Homolog of NCBI NO: 15238429 NR Description: putative ripening-related protein - like; protein
  misc_feature (1)..(107): Homolog of NCBI NO: 7406669 NR Description: putative ripening-related protein [Vitis vinifera]
  misc_feature (121)..(226): Homolog of NCBI NO: 7406669 NR Description: putative ripening-related protein [Vitis vinifera]
  misc_feature (1)..(226): Homolog of NCBI NO: 15241720 NR Description: putative protein; protein id: At5g02230.1, by cDNA: 36724. [Arabidopsis thaliana] >gi|11358409|pir||T48244
  misc_feature (1)..(226): Homolog of NCBI NO: 21593165 NR Description: unknown [Arabidopsis thaliana]
  misc_feature (1)..(113): Homolog of NCBI NO: 30697234 NR Description: haloacid dehalogenase-like hydrolase family
  misc_feature (121)..(222): Homolog of NCBI NO: 30697234 NR Description: haloacid dehalogenase-like hydrolase family
  misc_feature (1)..(113): Homolog of NCBI NO: 21618155 NR Description: putative ripening-related protein-like
  misc_feature (121)..(222): Homolog of NCBI NO: 21618155 NR Description: putative ripening-related protein-like
MVEKLGIDEDGVVELNQILYKKYGTSMAGLKAVGYEFDNDEYHRYVHGRLPYENLKPDPVLRSLLLGLPLRKLVFSNGDEVHVMKALTRLGIEDCFERIISFETLNPDINEAELSCVTGHLPENPVICKPTEIAFEKAFDIAQLNPHKTLFFDDSTRNIQTGKAVGLHTVLVGKSEKIDGSDYALESIHNMKEAFPELWSESIINNKETERIDYASQISIETSVQA

SEQ ID NO: 90666 - protein, 200 aa, Arabidopsis thaliana
  peptide (1)..(200): Ceres Seq. ID no. 12724743
  misc_feature (1)..(149): Pfam Name: haloacid dehalogenase-like hydrolase Pfam Description: haloacid dehalogenase-like hydrolase
  misc_feature (1)..(200): Homolog of NCBI NO: 8885554 NR Description: ripening-related protein-like; hydrolase-like
  misc_feature (1)..(200): Homolog of NCBI NO: 15238429 NR Description: putative ripening-related protein - like; protein
  misc_feature (1)..(81): Homolog of NCBI NO: 7406669 NR Description: putative ripening-related protein [Vitis vinifera]
  misc_feature (95)..(200): Homolog of NCBI NO: 7406669 NR Description: putative ripening-related protein [Vitis vinifera]
  misc_feature (1)..(200): Homolog of NCBI NO: 15241720 NR Description: putative protein; protein id: At5g02230.1, by cDNA: 36724. [Arabidopsis thaliana] >gi|11358409|pir||T48244
  misc_feature (1)..(200): Homolog of NCBI NO: 21593165 NR Description: unknown [Arabidopsis thaliana]
  misc_feature (1)..(87): Homolog of NCBI NO: 30697234 NR Description: haloacid dehalogenase-like hydrolase family
  misc_feature (95)..(196): Homolog of NCBI NO: 30697234 NR Description: haloacid dehalogenase-like hydrolase family
  misc_feature (1)..(87): Homolog of NCBI NO: 21618155 NR Description: putative ripening-related protein-like
  misc_feature (95)..(196): Homolog of NCBI NO: 21618155 NR Description: putative ripening-related protein-like
MAGLKAVGYEFDNDEYHRYVHGRLPYENLKPDPVLRSLLLGLPLRKLVFSNGDEVHVMKALTRLGIEDCFERIISFETLNPDINEAELSCVTGHLPENPVICKPTEIAFEKAFDIAQLNPHKTLFFDDSTRNIQTGKAVGLHTVLVGKSEKIDGSDYALESIHNMKEAFPELWSESIINNKETERIDYASQISIETSVQA

SEQ ID NO: 90667 - DNA, 1095 bp, Arabidopsis thaliana
  misc_feature (1)..(1095): Ceres Seq. ID no. 12724748
  misc_feature: MA Experiment ID: 20000179 Result: Down-regulated in Transcription
  misc_feature: MA Experiment 20000179 PARAMETER Experiment Name: At_Germinating_Seeds_P Parameter: Age (hr) Value: 6 vs. 0
  misc_feature: MA Experiment 20000179 PARAMETER Experiment Name: At_Germinating_Seeds_P Parameter: Tissue Value: Germinating Seeds
  misc_feature: MA Experiment ID: 20000180 Result: Down-regulated in Transcription
  misc_feature: MA Experiment 20000180 PARAMETER Experiment Name: At_Germinating_Seeds_P Parameter: Age (hr) Value: 24 vs. 0
  misc_feature: MA Experiment 20000180 PARAMETER Experiment Name: At_Germinating_Seeds_P Parameter: Tissue Value: Germinating Seeds
  misc_feature: MA Experiment ID: 20000185 Result: Up-regulated in Transcription
  misc_feature: MA Experiment 20000185 PARAMETER Experiment Name: At_Roots__P Parameter: Age (day) Value: 7 vs. 21
  misc_feature: MA Experiment 20000185 PARAMETER Experiment Name: At_Roots__P Parameter: Organism Value: A. thaliana
  misc_feature: MA Experiment 20000185 PARAMETER Experiment Name: At_Roots__P Parameter: Tissue Value: Roots vs. Whole Plant
  misc_feature: MA Experiment ID: 20000227 Result: Down-regulated in Transcription
  misc_feature: MA Experiment 20000227 PARAMETER Experiment Name: At_Root-Tips-vs-Tops_P Parameter: Tissue Value: Root Tips vs. Root Tops
  misc_feature: MA Experiment ID: 20000439 Result: Up-regulated in Transcription
  misc_feature: MA Experiment 20000439 PARAMETER Experiment Name: At_Roots__P Parameter: Age (day) Value: 14 vs. 21
  misc_feature: MA Experiment 20000439 PARAMETER Experiment Name: At_Roots__P Parameter: Organism Value: A. thaliana
  misc_feature: MA Experiment 20000439 PARAMETER Experiment Name: At_Roots__P Parameter: Tissue Value: Roots vs. Whole Plant
atggccaaaaactctgtcgaattcgatcgttacatcgagcgcaaagctttcgacaatacaaaagaaggtgttaaagggctcatcgatgctaaaatcaccgagatccctcgaattttccacgtccctcaagataccttaccagacaagaaacgctctgtttcagacctagagatccctaccatcgactttgcaagcgtcaacgtggacacaccctcacgtgaagccatcgtggagaaagtcaaatatgcggtggagaattggggattcttccaggtgattaatcatggtgttcctttaaacgttcttgaagagattaaagatggggttcgtaggtttcacgaggaagaagatcctgaggtcaagaaatcatactactcgcttgatttcaccaagaacaaatttgcatacagtagtaatttcgatctatatagttcttcgccgtctcttacttggagagattctatctcttgttacatggctcctgatcctccaactcctgaggagctccctgagacttgcagggatgctatgattgaatactcaaagcatgtactgagcttaggtgatttgctctttgagcttctctcagaagcactaggtttgaaatctgagatccttaagagcatggattgcttgaagagtttgcttatgatctgccattattatccaccttgtccacaacctgacctaactttaggaataagtaaacactcagacaactctttcctcacagttcttcttcaagacaacattggtggtcttcaaattcttcatcaagactcttgggtcgatgtctctcctcttcctggagctctggtagtcaacgtcggagatttcttgcagctgataaccaacgataagtttataagtgtagagcatagggtactagcgaatacacgaggcccacggatttctgtagcgagctttttcagctcaagtatacgtgagaattcaacagtttatggaccgatgaaagagcttgtgtctgaagaaaaccctccaaaatacagagacacaaccttgagagaatactcagaaggatactttaagaaaggtcttgatggaacatcgcatctgtcaaatttcagaatatga

SEQ ID NO: 90668 - protein, 364 aa, Arabidopsis thaliana
  peptide (1)..(364): Ceres Seq. ID no. 12724749
  misc_feature (213)..(312): Pfam Name: 2OG-Fe(II) oxygenase superfamily Pfam Description: 2OG-Fe(II) oxygenase superfamily
  misc_feature (1)..(364): Homolog of NCBI NO: 15238458 NR Description: 1-aminocyclopropane-1-carboxylate oxidase - like protein id: At5g59530.1 [Arabidopsis thaliana]
  misc_feature (1)..(364): Homolog of NCBI NO: 15238459 NR Description: 1-aminocyclopropane-1-carboxylate oxidase - like protein id: At5g59540.1, supported by cDNA: gi_15983482
  misc_feature (7)..(364): Homolog of NCBI NO: 15219715 NR Description: putative 1-aminocyclopropane-1-carboxylate protein id: At1g04350.1, supported by cDNA: gi_15292974, by cDNA: gi_21281120 [Arabidopsis thaliana]
  misc_feature (33)..(364): Homolog of NCBI NO: 15219718 NR Description: putative 1-aminocyclopropane-1-carboxylate protein id: At1g04380.1 [Arabidopsis thaliana]
  misc_feature (1)..(364): Homolog of NCBI NO: 15239868 NR Description: 1-aminocyclopropane-1-carboxylate oxidase; id: At5g43440.1, supported by cDNA: gi_15983808 [Arabidopsis
  misc_feature (9)..(364): Homolog of NCBI NO: 30679748 NR Description: 2-oxoglutarate-dependent dioxygenase, putative thaliana] >gi|30102640|gb|AAP21238.1| At1g06620 [Arabidopsis
  misc_feature (1)..(364): Homolog of NCBI NO: 15239870 NR Description: 1-aminocyclopropane-1-carboxylate oxidase; id: At5g43450.1, supported by cDNA: gi_14596164 [Arabidopsis
  misc_feature (1)..(364): Homolog of NCBI NO: 14596165 NR Description: 1-aminocyclopropane-1-carboxylate oxidase
  misc_feature (8)..(364): Homolog of NCBI NO: 5031283 NR Description: unknown [Prunus armeniaca]
  misc_feature (3)..(364): Homolog of NCBI NO: 15221544 NR Description: oxidoreductase, putative; protein id: supported by cDNA: gi_13430545 [Arabidopsis thaliana] putative oxidoreductase [Arabidopsis thaliana]
MAKNSVEFDRYIERKAFDNTKEGVKGLIDAKITEIPRIFHVPQDTLPDKKRSVSDLEIPTIDFASVNVDTPSREAIVEKVKYAVENWGFFQVINHGVPLNVLEEIKDGVRRFHEEEDPEVKKSYYSLDFTKNKFAYSSNFDLYSSSPSLTWRDSISCYMAPDPPTPEELPETCRDAMIEYSKHVLSLGDLLFELLSEALGLKSEILKSMDCLKSLLMICHYYPPCPQPDLTLGISKHSDNSFLTVLLQDNIGGLQILHQDSWVDVSPLPGALVVNVGDFLQLITNDKFISVEHRVLANTRGPRISVASFFSSSIRENSTVYGPMKELVSEENPPKYRDTTLREYSEGYFKKGLDGTSHLSNFRI

SEQ ID NO: 90669 - protein, 206 aa, Arabidopsis thaliana
  peptide (1)..(206): Ceres Seq. ID no. 12724750
  misc_feature (55)..(154): Pfam Name: 2OG-Fe(II) oxygenase superfamily Pfam Description: 2OG-Fe(II) oxygenase superfamily
  misc_feature (1)..(206): Homolog of NCBI NO: 15238458 NR Description: 1-aminocyclopropane-1-carboxylate oxidase - like protein id: At5g59530.1 [Arabidopsis thaliana]
  misc_feature (1)..(206): Homolog of NCBI NO: 15238459 NR Description: 1-aminocyclopropane-1-carboxylate oxidase - like protein id: At5g59540.1, supported by cDNA: gi_15983482
  misc_feature (1)..(206): Homolog of NCBI NO: 15219715 NR Description: putative 1-aminocyclopropane-1-carboxylate protein id: At1g04350.1, supported by cDNA: gi_15292974, by cDNA: gi_21281120 [Arabidopsis thaliana]
  misc_feature (1)..(206): Homolog of NCBI NO: 15219718 NR Description: putative 1-aminocyclopropane-1-carboxylate protein id: At1g04380.1 [Arabidopsis thaliana]
  misc_feature (1)..(206): Homolog of NCBI NO: 15239868 NR Description: 1-aminocyclopropane-1-carboxylate oxidase; id: At5g43440.1, supported by cDNA: gi_15983808 [Arabidopsis
  misc_feature (1)..(206): Homolog of NCBI NO: 30679748 NR Description: 2-oxoglutarate-dependent dioxygenase, putative thaliana] >gi|30102640|gb|AAP21238.1| At1g06620 [Arabidopsis
  misc_feature (1)..(206): Homolog of NCBI NO: 15239870 NR Description: 1-aminocyclopropane-1-carboxylate oxidase; id: At5g43450.1, supported by cDNA: gi_14596164 [Arabidopsis
  misc_feature (1)..(206): Homolog of NCBI NO: 14596165 NR Description: 1-aminocyclopropane-1-carboxylate oxidase
  misc_feature (1)..(206): Homolog of NCBI NO: 5031283 NR Description: unknown [Prunus armeniaca]
  misc_feature (1)..(206): Homolog of NCBI NO: 15221544 NR Description: oxidoreductase, putative; protein id: supported by cDNA: gi_13430545 [Arabidopsis thaliana] putative oxidoreductase [Arabidopsis thaliana]
MAPDPPTPEELPETCRDAMIEYSKHVLSLGDLLFELLSEALGLKSEILKSMDCLKSLLMICHYYPPCPQPDLTLGISKHSDNSFLTVLLQDNIGGLQILHQDSWVDVSPLPGALVVNVGDFLQLITNDKFISVEHRVLANTRGPRISVASFFSSSIRENSTVYGPMKELVSEENPPKYRDTTLREYSEGYFKKGLDGTSHLSNFRI

SEQ ID NO: 90670 - protein, 188 aa, Arabidopsis thaliana
  peptide (1)..(188): Ceres Seq. ID no. 12724751
  misc_feature (37)..(136): Pfam Name: 2OG-Fe(II) oxygenase superfamily Pfam Description: 2OG-Fe(II) oxygenase superfamily
  misc_feature (1)..(188): Homolog of NCBI NO: 15238458 NR Description: 1-aminocyclopropane-1-carboxylate oxidase - like protein id: At5g59530.1 [Arabidopsis thaliana]
  misc_feature (1)..(188): Homolog of NCBI NO: 15238459 NR Description: 1-aminocyclopropane-1-carboxylate oxidase - like protein id: At5g59540.1, supported by cDNA: gi_15983482
  misc_feature (1)..(188): Homolog of NCBI NO: 15219715 NR Description: putative 1-aminocyclopropane-1-carboxylate protein id: At1g04350.1, supported by cDNA: gi_15292974, by cDNA: gi_21281120 [Arabidopsis thaliana]
  misc_feature (1)..(188): Homolog of NCBI NO: 15219718 NR Description: putative 1-aminocyclopropane-1-carboxylate protein id: At1g04380.1 [Arabidopsis thaliana]
  misc_feature (1)..(188): Homolog of NCBI NO: 15239868 NR Description: 1-aminocyclopropane-1-carboxylate oxidase; id: At5g43440.1, supported by cDNA: gi_15983808 [Arabidopsis
  misc_feature (1)..(188): Homolog of NCBI NO: 30679748 NR Description: 2-oxoglutarate-dependent dioxygenase, putative thaliana] >gi|30102640|gb|AAP21238.1| At1g06620 [Arabidopsis
  misc_feature (1)..(188): Homolog of NCBI NO: 15239870 NR Description: 1-aminocyclopropane-1-carboxylate oxidase; id: At5g43450.1, supported by cDNA: gi_14596164 [Arabidopsis
  misc_feature (1)..(188): Homolog of NCBI NO: 14596165 NR Description: 1-aminocyclopropane-1-carboxylate oxidase
  misc_feature (1)..(188): Homolog of NCBI NO: 5031283 NR Description: unknown [Prunus armeniaca]
  misc_feature (1)..(188): Homolog of NCBI NO: 15221544 NR Description: oxidoreductase, putative; protein id: supported by cDNA: gi_13430545 [Arabidopsis thaliana] putative oxidoreductase [Arabidopsis thaliana]
MIEYSKHVLSLGDLLFELLSEALGLKSEILKSMDCLKSLLMICHYYPPCPQPDLTLGISKHSDNSFLTVLLQDNIGGLQILHQDSWVDVSPLPGALVVNVGDFLQLITNDKFISVEHRVLANTRGPRISVASFFSSSIRENSTVYGPMKELVSEENPPKYRDTTLREYSEGYFKKGLDGTSHLSNFRI

SEQ ID NO: 90671 - DNA, 1224 bp, Arabidopsis thaliana
  misc_feature (1)..(1224): Ceres Seq. ID no. 12724752
  misc_feature: MA Experiment ID: 108434 Result: Down-regulated in Transcription
  misc_feature: MA Experiment 108434 PARAMETER Experiment Name: At_Root_Tips_cDNA_P Parameter: Tissue Value: Root Tips
  misc_feature: MA Experiment ID: 108463 Result: Up-regulated in Transcription
  misc_feature: MA Experiment 108463 PARAMETER Experiment Name: At_Germinating_Seeds_cDNA_P Parameter: Age (day) Value: 3 vs. 0
  misc_feature: MA Experiment 108463 PARAMETER Experiment Name: At_Germinating_Seeds_cDNA_P Parameter: Tissue Value: Germinating Seeds
  misc_feature: MA Experiment ID: 108464 Result: Up-regulated in Transcription
  misc_feature: MA Experiment 108464 PARAMETER Experiment Name: At_Germinating_Seeds_cDNA_P Parameter: Age (day) Value: 4 vs. 0
  misc_feature: MA Experiment 108464 PARAMETER Experiment Name: At_Germinating_Seeds_cDNA_P Parameter: Tissue Value: Germinating Seeds
  misc_feature: MA Experiment ID: 108488 Result: Down-regulated in Transcription
  misc_feature: MA Experiment ID: 108573 Result: Up-regulated in Transcription
  misc_feature: MA Experiment 108573 PARAMETER Experiment Name: At_Drought_cDNA_P Parameter: Timepoint (hr) Value: 6
  misc_feature: MA Experiment 108573 PARAMETER Experiment Name: At_Drought_cDNA_P Parameter: Tissue Value: Aerial
  misc_feature: MA Experiment 108573 PARAMETER Experiment Name: At_Drought_cDNA_P Parameter: Treatment Value: Drought vs. No Drought
  misc_feature: MA Experiment ID: 108577 Result: Down-regulated in Transcription
  misc_feature: MA Experiment 108577 PARAMETER Experiment Name: At_42deg_Heat_cDNA_P Parameter: Temperature (deg C) Value: 42 vs. 22
  misc_feature: MA Experiment 108577 PARAMETER Experiment Name: At_42deg_Heat_cDNA_P Parameter: Timepoint (hr) Value: 6
  misc_feature: MA Experiment 108577 PARAMETER Experiment Name: At_42deg_Heat_cDNA_P Parameter: Tissue Value: Aerial
  misc_feature: MA Experiment ID: 108585 Result: Up-regulated in Transcription
  misc_feature: MA Experiment 108585 PARAMETER Experiment Name: At_5mM_NaNP_cDNA_P Parameter: Timepoint (hr) Value: 6
  misc_feature: MA Experiment 108585 PARAMETER Experiment Name: At_5mM_NaNP_cDNA_P Parameter: Tissue Value: Aerial
  misc_feature: MA Experiment 108585 PARAMETER Experiment Name: At_5mM_NaNP_cDNA_P Parameter: Treatment Value: null
  misc_feature: MA Experiment ID: 108595 Result: Up-regulated in Transcription
  misc_feature: MA Experiment 108595 PARAMETER Experiment Name: At_Ler-pi_Ovule_cDNA_P Parameter: Plant Line Value: null
  misc_feature: MA Experiment ID: 108667 Result: Up-regulated in Transcription
  misc_feature: MA Experiment 108667 PARAMETER Experiment Name: At_2mM_SA_cDNA_P Parameter: Plant Line Value: WS
  misc_feature: MA Experiment 108667 PARAMETER Experiment Name: At_2mM_SA_cDNA_P Parameter: Timepoint (hr) Value: 1
  misc_feature: MA Experiment 108667 PARAMETER Experiment Name: At_2mM_SA_cDNA_P Parameter: Treatment Value: 2mM SA vs. No Treatment
  misc_feature: MA Experiment ID: 20000088 Result: Up-regulated in Transcription
  misc_feature: MA Experiment 20000088 PARAMETER Experiment Name: At_100uM_ABA_Mutants_cDNA_P Parameter: Plant Line Value: Landsberg
  misc_feature: MA Experiment 20000088 PARAMETER Experiment Name: At_100uM_ABA_Mutants_cDNA_P Parameter: Timepoint (hr) Value: 6
  misc_feature: MA Experiment 20000088 PARAMETER Experiment Name: At_100uM_ABA_Mutants_cDNA_P Parameter: Tissue Value: Aerial
  misc_feature: MA Experiment 20000088 PARAMETER Experiment Name: At_100uM_ABA_Mutants_cDNA_P Parameter: Treatment Value: 100uM ABA vs. No Treatment
  misc_feature: MA Experiment ID: 20000185 Result: Down-regulated in Transcription
  misc_feature: MA Experiment 20000185 PARAMETER Experiment Name: At_Roots__P Parameter: Age (day) Value: 7 vs. 21
  misc_feature: MA Experiment 20000185 PARAMETER Experiment Name: At_Roots__P Parameter: Organism Value: A. thaliana
  misc_feature: MA Experiment 20000185 PARAMETER Experiment Name: At_Roots__P Parameter: Tissue Value: Roots vs. Whole Plant
  misc_feature: MA Experiment ID: 20000234 Result: Down-regulated in Transcription
  misc_feature: MA Experiment 20000234 PARAMETER Experiment Name: At_Siliques_P Parameter: Age (day) Value: 21
  misc_feature: MA Experiment 20000234 PARAMETER Experiment Name: At_Siliques_P Parameter: Organism Value: A. thaliana
  misc_feature: MA Experiment 20000234 PARAMETER Experiment Name: At_Siliques_P Parameter: Plant Line Value: WS
  misc_feature: MA Experiment 20000234 PARAMETER Experiment Name: At_Siliques_P Parameter: Tissue Value: Less Than 5mm Siliques vs. Whole Plant
  misc_feature: MA Experiment ID: 20000235 Result: Down-regulated in Transcription
  misc_feature: MA Experiment 20000235 PARAMETER Experiment Name: At_Siliques_P Parameter: Age (day) Value: 21
  misc_feature: MA Experiment 20000235 PARAMETER Experiment Name: At_Siliques_P Parameter: Organism Value: A. thaliana
  misc_feature: MA Experiment 20000235 PARAMETER Experiment Name: At_Siliques_P Parameter: Plant Line Value: WS
  misc_feature: MA Experiment 20000235 PARAMETER Experiment Name: At_Siliques_P Parameter: Tissue Value: 5-10mm Siliques vs. Whole Plant
  misc_feature: MA Experiment ID: 20000264 Result: Down-regulated in Transcription
  misc_feature: MA Experiment 20000264 PARAMETER Experiment Name: At_Open_Flower_P Parameter: Age (day) Value: 21
  misc_feature: MA Experiment 20000264 PARAMETER Experiment Name: At_Open_Flower_P Parameter: Plant Line Value: WS
  misc_feature: MA Experiment 20000264 PARAMETER Experiment Name: At_Open_Flower_P Parameter: Tissue Value: Open Flower vs. Whole Plant
  misc_feature: MA Experiment ID: 20000265 Result: Down-regulated in Transcription
  misc_feature: MA Experiment 20000265 PARAMETER Experiment Name: At_Open_Flower_P Parameter: Age (day) Value: 21
  misc_feature: MA Experiment 20000265 PARAMETER Experiment Name: At_Open_Flower_P Parameter: Plant Line Value: WS
  misc_feature: MA Experiment 20000265 PARAMETER Experiment Name: At_Open_Flower_P Parameter: Tissue Value: Closed Flower vs. Whole Plant
  misc_feature: MA Experiment ID: 20000286 Result: Down-regulated in Transcription
  misc_feature: MA Experiment 20000286 PARAMETER Experiment Name: At_Open_Flower_P Parameter: Age (day) Value: 21
  misc_feature: MA Experiment 20000286 PARAMETER Experiment Name: At_Open_Flower_P Parameter: Plant Line Value: WS
  misc_feature: MA Experiment 20000286 PARAMETER Experiment Name: At_Open_Flower_P Parameter: Tissue Value: Half Open vs. Whole Plant
  misc_feature: MA Experiment ID: 20000439 Result: Down-regulated in Transcription
  misc_feature: MA Experiment 20000439 PARAMETER Experiment Name: At_Roots__P Parameter: Age (day) Value: 14 vs. 21
  misc_feature: MA Experiment 20000439 PARAMETER Experiment Name: At_Roots__P Parameter: Organism Value: A. thaliana
  misc_feature: MA Experiment 20000439 PARAMETER Experiment Name: At_Roots__P Parameter: Tissue Value: Roots vs. Whole Plant
  misc_feature: MA Experiment ID: 20000460 Result: Up-regulated in Transcription
  misc_feature: MA Experiment 20000460 PARAMETER Experiment Name: At_10percent_PEG_P Parameter: Age (day) Value: 12
  misc_feature: MA Experiment 20000460 PARAMETER Experiment Name: At_10percent_PEG_P Parameter: Organism Value: A. thaliana
  misc_feature: MA Experiment 20000460 PARAMETER Experiment Name: At_10percent_PEG_P Parameter: Plant Line Value: WS
  misc_feature: MA Experiment 20000460 PARAMETER Experiment Name: At_10percent_PEG_P Parameter: Timepoint (day) Value: 12
  misc_feature: MA Experiment 20000460 PARAMETER Experiment Name: At_10percent_PEG_P Parameter: Tissue Value: Whole Plant
  misc_feature: MA Experiment 20000460 PARAMETER Experiment Name: At_10percent_PEG_P Parameter: Treatment Value: 10percent PEG vs. No Treatment
  misc_feature: MA Experiment ID: 20000527 Result: Up-regulated in Transcription
  misc_feature: MA Experiment 20000527 PARAMETER Experiment Name: At_10percent_PEG_P Parameter: Age (day) Value: 20
  misc_feature: MA Experiment 20000527 PARAMETER Experiment Name: At_10percent_PEG_P Parameter: Organism Value: A. thaliana
  misc_feature: MA Experiment 20000527 PARAMETER Experiment Name: At_10percent_PEG_P Parameter: Plant Line Value: WS
  misc_feature: MA Experiment 20000527 PARAMETER Experiment Name: At_10percent_PEG_P Parameter: Timepoint (day) Value: 20
  misc_feature: MA Experiment 20000527 PARAMETER Experiment Name: At_10percent_PEG_P Parameter: Tissue Value: Whole Plant
  misc_feature: MA Experiment 20000527 PARAMETER Experiment Name: At_10percent_PEG_P Parameter: Treatment Value: 10percent PEG vs. No Treatment
  misc_feature: MA Experiment ID: 20000794 Result: Down-regulated in Transcription
  misc_feature: MA Experiment 20000794 PARAMETER Experiment Name: At_Petals_P Parameter: Age (day) Value: 23-25 days
  misc_feature: MA Experiment 20000794 PARAMETER Experiment Name: At_Petals_P Parameter: Plant Line Value: WS
  misc_feature: MA Experiment 20000794 PARAMETER Experiment Name: At_Petals_P Parameter: Tissue Value: Petals vs. Whole plant
  misc_feature: MA Experiment ID: 20001247 Result: Up-regulated in Transcription
  misc_feature: MA Experiment 20001247 PARAMETER Experiment Name: At_Far-red-induction_P Parameter: Age (day) Value: 7
  misc_feature: MA Experiment 20001247 PARAMETER Experiment Name: At_Far-red-induction_P Parameter: Light Value: Far-red vs. White
  misc_feature: MA Experiment 20001247 PARAMETER Experiment Name: At_Far-red-induction_P Parameter: Organism Value: A. thaliana
  misc_feature: MA Experiment 20001247 PARAMETER Experiment Name: At_Far-red-induction_P Parameter: Plant Line Value: Columbia
  misc_feature: MA Experiment 20001247 PARAMETER Experiment Name: At_Far-red-induction_P Parameter: Timepoint (hr) Value: 1
  misc_feature: MA Experiment 20001247 PARAMETER Experiment Name: At_Far-red-induction_P Parameter: Tissue Value: Whole Plant
atgccgtcaacgccgacgacgccgactacaacaacgccgatcacggcttcgtattggtgttacagctgtacgcgtttcgtcagcgtttgggctgatcaaggcacaacaaccgtcggtagcgtcgcttgccctcactgcgacggcggttttatcgaacagattaacgattcttcctccgccgctaccgaattaacgattccggcttctactgaagtaagatcgatcaataacaaccgtagatccgtgattagacgccggagatccggtcgtcgtccgtcctttaatccggtcatcgtacttcaaggaggcgccggcgagagagaagagggagaagaaggagatgcggctagagatcgacgcgcttttgagttttattacgatgacggatccggatcgggtcttagaccgcttccggattctgtatctgagatcttgatgggatctggattcgagcggttacttgaacagctaagccaaatcgaagcgtcggctactggaattggtagatctggaaaccctccggcgtctaaatcggcgattgagtctttacctagagtcgaaatctcggattgccacataggctcggaggctaattgcgctgtttgcacggagattttcgagacggagacggaggcgcgtgagatgccgtgtaaacaccttttccacgacgattgcatcgtaccgtggctatcgattcgaaactcttgtcccgtgtgcagattcgagctaccttcagagcctaatcgacggagcaacaacaacgaggaggataacgccgtggggatgacgatttggagacttcccggtggtggattcgccgtagggaggtttaacgcagcaatgagagacggagagagagttttgccagtggtgttaacagaaatggatggtggtgggattggtaatagccaggatggtcctagacggatctcatgggttaggtcacacggtacactcgaatcggatagtaacggtactggctcaggttccggctccggtggaagattgaggaggatggttcgtggaatggtgtcgttaatgaggagagtgagaccaaaccgtagctcttcttcttcatcagctgcgatatcaacttcttctgataatctggatttgaacattgaagtagaatctagggttttggataggtcaaattcagtgatgagaagatacttcagaagaaacagaagtaacagggattcttcgtcttcagttcttcattga

SEQ ID NO: 90672 - protein, 407 aa, Arabidopsis thaliana; identical to SEQ ID NO: 35169
  peptide (1)..(407): Ceres Seq. ID no. 12724753
  misc_feature (199)..(239): Pfam Name: Zinc finger, C3HC4 type (RING finger) Pfam Description: Zinc finger, C3HC4 type (RING finger)
  misc_feature (1)..(407): Homolog of NCBI NO: 8885559 NR Description: emb|CAB62332.1~gene_id:F2O15.22~strong similarity
  misc_feature (1)..(407): Homolog of NCBI NO: 18424254 NR Description: putative protein; protein id: At5g59550.1, by cDNA: gi_15450686, supported by cDNA: gi_17380611 [Arabidopsis >gi|15450687|gb|AAK96615.1| AT5g59550/f2o15_210 [Arabidopsis
  misc_feature (3)..(392): Homolog of NCBI NO: 15232595 NR Description: putative protein; protein id: At3g46620.1, by cDNA: gi_20260607 [Arabidopsis thaliana]
  misc_feature (2)..(386): Homolog of NCBI NO: 14719329 NR Description: putative RING-H2 finger protein [Oryza sativa]
  misc_feature (15)..(395): Homolog of NCBI NO: 18405141 NR Description: expressed protein; protein id: At2g39720.1, by cDNA: 253849., supported by cDNA: gi_18377863, supported by gi_20334831, supported by cDNA: gi_3790594 [Arabidopsis thaliana]
  misc_feature (102)..(320): Homolog of NCBI NO: 34902106 NR Description: unknown protein [Oryza sativa (japonica
  misc_feature (138)..(325): Homolog of NCBI NO: 34906008 NR Description: putative RING-H2 finger protein RHC2a [Oryza
  misc_feature (13)..(276): Homolog of NCBI NO: 34908968 NR Description: P0003D09.21 [Oryza sativa (japonica
  misc_feature (14)..(259): Homolog of NCBI NO: 18410530 NR Description: Expressed protein; protein id: At3g56580.1, by cDNA: gi_15028360 [Arabidopsis thaliana] unknown protein [Arabidopsis thaliana]
  misc_feature (17)..(254): Homolog of NCBI NO: 18405518 NR Description: expressed protein; protein id: At2g40830.1,

SEQ ID NO: 90673 - protein, 262 aa, Arabidopsis thaliana; identical to SEQ ID NO: 35170
  peptide (1)..(262): Ceres Seq. ID no. 12724754
  misc_feature (54)..(94): Pfam Name: Zinc finger, C3HC4 type (RING finger) Pfam Description: Zinc finger, C3HC4 type (RING finger)
  misc_feature (1)..(262): Homolog of NCBI NO: 8885559 NR Description: emb|CAB62332.1~gene_id:F2O15.22~strong similarity
  misc_feature (1)..(262): Homolog of NCBI NO: 18424254 NR Description: putative protein; protein id: At5g59550.1, by cDNA: gi_15450686, supported by cDNA: gi_17380611 [Arabidopsis >gi|15450687|gb|AAK96615.1| AT5g59550/f2o15_210 [Arabidopsis
  misc_feature (1)..(247): Homolog of NCBI NO: 15232595 NR Description: putative protein; protein id: At3g46620.1, by cDNA: gi_20260607 [Arabidopsis thaliana]
  misc_feature (1)..(241): Homolog of NCBI NO: 14719329 NR Description: putative RING-H2 finger protein [Oryza sativa]
  misc_feature (1)..(250): Homolog of NCBI NO: 18405141 NR Description: expressed protein; protein id: At2g39720.1, by cDNA: 253849., supported by cDNA: gi_18377863, supported by gi_20334831, supported by cDNA: gi_3790594 [Arabidopsis thaliana]
  misc_feature (1)..(175): Homolog of NCBI NO: 34902106 NR Description: unknown protein [Oryza sativa (japonica
  misc_feature (1)..(180): Homolog of NCBI NO: 34906008 NR Description: putative RING-H2 finger protein RHC2a [Oryza
  misc_feature (1)..(131): Homolog of NCBI NO: 34908968 NR Description: P0003D09.21 [Oryza sativa (japonica
  misc_feature (1)..(114): Homolog of NCBI NO: 18410530 NR Description: Expressed protein; protein id: At3g56580.1, by cDNA: gi_15028360 [Arabidopsis thaliana] unknown protein [Arabidopsis thaliana]
  misc_feature (1)..(109): Homolog of NCBI NO: 18405518 NR Description: expressed protein; protein id: At2g40830.1,

SEQ ID NO: 90674 - DNA, 2823 bp, Arabidopsis thaliana
  misc_feature (1)..(2823): Ceres Seq. ID no. 12724764
  misc_feature: MA Experiment ID: 20000314 Result: Up-regulated in Transcription
  misc_feature: MA Experiment 20000314 PARAMETER Experiment Name: At_14day_Shoots-Roots_Sub_P Parameter: Age (day) Value: 14
  misc_feature: MA Experiment 20000314 PARAMETER Experiment Name: At_14day_Shoots-Roots_Sub_P Parameter: Organism Value: A. thaliana
  misc_feature: MA Experiment 20000314 PARAMETER Experiment Name: At_14day_Shoots-Roots_Sub_P Parameter: Plant Line Value: WS
  misc_feature: MA Experiment 20000314 PARAMETER Experiment Name: At_14day_Shoots-Roots_Sub_P Parameter: Tissue Value: Roots vs. Whole Plant
  misc_feature: MA Experiment ID: 20000315 Result: Down-regulated in Transcription
  misc_feature: MA Experiment 20000315 PARAMETER Experiment Name: At_14day_Shoots-Roots_Sub_P Parameter: Age (day) Value: 14
  misc_feature: MA Experiment 20000315 PARAMETER Experiment Name: At_14day_Shoots-Roots_Sub_P Parameter: Organism Value: A. thaliana
  misc_feature: MA Experiment 20000315 PARAMETER Experiment Name: At_14day_Shoots-Roots_Sub_P Parameter: Plant Line Value: WS
  misc_feature: MA Experiment 20000315 PARAMETER Experiment Name: At_14day_Shoots-Roots_Sub_P Parameter: Tissue Value: Shoots vs. Whole Plant
  misc_feature: MA Experiment ID: 20000327 Result: Down-regulated in Transcription
  misc_feature: MA Experiment 20000327 PARAMETER Experiment Name: At_42deg_Heat_Sub_P Parameter: Age (day) Value: 14
  misc_feature: MA Experiment 20000327 PARAMETER Experiment Name: At_42deg_Heat_Sub_P Parameter: Organism Value: A. thaliana
  misc_feature: MA Experiment 20000327 PARAMETER Experiment Name: At_42deg_Heat_Sub_P Parameter: Plant Line Value: WS
  misc_feature: MA Experiment 20000327 PARAMETER Experiment Name: At_42deg_Heat_Sub_P Parameter: Temperature (deg C) Value: 42 vs. 22
  misc_feature: MA Experiment 20000327 PARAMETER Experiment Name: At_42deg_Heat_Sub_P Parameter: Timepoint (hr) Value: 1
  misc_feature: MA Experiment 20000327 PARAMETER Experiment Name: At_42deg_Heat_Sub_P Parameter: Tissue Value: Aerial
  misc_feature: MA Experiment ID: 20000328 Result: Down-regulated in Transcription
  misc_feature: MA Experiment 20000328 PARAMETER Experiment Name: At_42deg_Heat_Sub_P Parameter: Age (day) Value: 14
  misc_feature: MA Experiment 20000328 PARAMETER Experiment Name: At_42deg_Heat_Sub_P Parameter: Organism Value: A. thaliana
  misc_feature: MA Experiment 20000328 PARAMETER Experiment Name: At_42deg_Heat_Sub_P Parameter: Plant Line Value: WS
  misc_feature: MA Experiment 20000328 PARAMETER Experiment Name: At_42deg_Heat_Sub_P Parameter: Temperature (deg C) Value: 42 vs. 22
  misc_feature: MA Experiment 20000328 PARAMETER Experiment Name: At_42deg_Heat_Sub_P Parameter: Timepoint (hr) Value: 6
  misc_feature: MA Experiment 20000328 PARAMETER Experiment Name: At_42deg_Heat_Sub_P Parameter: Tissue Value: Aerial
  misc_feature: MA Experiment ID: 20000347 Result: Up-regulated in Transcription
  misc_feature: MA Experiment 20000347 PARAMETER Experiment Name: At_2mM_SA_Sub_P Parameter: Age (day) Value: 14
  misc_feature: MA Experiment 20000347 PARAMETER Experiment Name: At_2mM_SA_Sub_P Parameter: Organism Value: A. thaliana
  misc_feature: MA Experiment 20000347 PARAMETER Experiment Name: At_2mM_SA_Sub_P Parameter: Plant Line Value: WS
  misc_feature: MA Experiment 20000347 PARAMETER Experiment Name: At_2mM_SA_Sub_P Parameter: Timepoint (hr) Value: 6
  misc_feature: MA Experiment 20000347 PARAMETER Experiment Name: At_2mM_SA_Sub_P Parameter: Tissue Value: Aerial
  misc_feature: MA Experiment 20000347 PARAMETER Experiment Name: At_2mM_SA_Sub_P Parameter: Treatment Value: 2mM SA vs. No Treatment
gccacccgttggtttcttgatttttccttgggagttaagaaaagatggagagttcttttgggcttttgttggcactgttaactttgaccatcattcatattgttcaagctcaagacccacaagggttcatcagtttggattgcgggctacccgcaaatgagacgtctccttatacagagactcaaactggtctgttgttctcttcggacgcaacattcatccagagcggaaaaactggtagagtccaagcaaatcaagagagtaaattcttgaagccatacagaacgctgagatatttcccagagggagtacggaattgctacaatctgagtgtgttcaaggagcgtaaatatttgatcgctgctagttttttatatggaaattacgatggtcataacatagcccctgtgtttgatctttatcttggaccaaatttatgggcgaaaatagatttacaagatgtgaatggtacaggggaagagatcttacacatcccaacatcgaactcgttgcagatatgtcttgttcagactggggaaactacaccgctgatatcctctttggaattacggccaatgagaactggaagctataccactgtgtctggttccctgaaaacatacaggcgtttatattttaaaaagtctggatctaggctacggtacagtaaagatgtttatgatcgctcatggtttccgcgcttcatggacgaatggacccagatttccactgctctcggggtgattaataccaacatctaccaaccaccggaagatgcgctgaaaaatgctgccacgcctactgatgctagtgcgccactgacatttaaatggaattcagaaaaattggatgtccaatattacttttacgcacactatgctgagatccaagacttgcaggcaaatgataccagagaattcaacatcttattgaatggacaaaatttatctgtgactggccctgaagtcccagataagctaagtataaagaccttccaaagctcgtcaccgataagttgcaatggatgggcatgtaattttcagctgataagaaccaaaagatcaactcttccacctctacttaatgctttggaagtctacacagttattcagtttccacggtccgaaacagatgaaagcgacgtggttgctatgaaaaacatctcagccagctatggattgagtagaatcaactggcaaggcgatccatgcttccctcagcagcttaggtgggacgctttagactgcaccaacagaaatatctcccaaccaccaagaatcacttctttaaacttgtcttcaagtcgtttaaatggaaccatagcagctgccattcaaagtattacacaacttgaaacactggacttgtcgtataataacttaactggagaggtgccagagtttcttggcaaaatgaaatcgttgtcggtcataaacttaagcgggaacaatcttaatggttcaattccgcaagctcttcgaaagaaaagactaaaactataccttgaaggaaacccaaggcttataaaaccacctaagaaggaatttcctgtggcaattgttacattagttgtttttgtcacagtcattgtggttctttttcttgttttcagaaagaaaatgtccacgattgtaaaaggtctacgcctgccaccaaggacatcaatggtggatgttacattttctaataaaaaaagcaaaaggttcacatattcagaggtcgtccaagtgacaaagaacttccaaagagttttaggtaaaggagggttcggcatggtctatcacggtactgtaaagggttctgaacaggtggccgttaaggttctctctcaatcgtcaactcaaggctctaaggagttcaaagcagaggttgatctccttctgagagtgcaccatacaaatttggtgagcctggttgggtattgctgtgaaggagattacttggccctcgtctatgagtttcttcccaatggagacttaaaacaacatttgtcaggaaaaggaggtaattccatcatcaactggagtattcgactgcgaatagctttggaagcagcactaggtttggagtacttgcatattggatgcacaccaccgatggttcatagagatgtcaaaactgccaacatattgctcgacgagaattttaaggccaaactcgctgattttggtctttcaagatctttccaaggtgaaggcgaatctcaggaatcgacaacaattgctggtactcttggataccttgatcccgaatgttaccattcaggtcgattgggtgagaagagtgatgtctacagtttcgggatcgtgttattggagatgatcacaaaccaaccagtgatcaatcaaacctcgggagattctcacataacacaatgggttggctttcagatgaaccgaggtgatattcttgagattatggatccaaaccttcgcaaggattataacattaattctgcctggagagctttggaactggcaatgtcatgcgcgtatccttcttcctcaaaacgaccatccatgtctcaggttatacacgagctgaaagagtgtattgcgtgtgaaaacacagggataagtaagaatcgaagcttggaatatcaagaaatgaacgttagcttggacactacggcggttcccatggcaagatagttctgaatgttttctactaataaggaatcaatactcaactagttacacatttagcaagatttgtaaacttgttaaagtaatgattgaagtgtgtaattgtgtatacgtcttgtagataaactcgaagtcgacaaatttccttctgcgttcattgattattaatatattcaga

SEQ ID NO: 90675 - protein, 868 aa, Arabidopsis thaliana
  peptide (1)..(868): Ceres Seq. ID no. 12724765
  misc_feature (1)..(868): Homolog of NCBI NO: 9758834 NR Description: receptor-like protein kinase [Arabidopsis
  misc_feature (1)..(868): Homolog of NCBI NO: 15238493 NR Description: serine/threonine-specific protein kinase - like;
  misc_feature (16)..(868): Homolog of NCBI NO: 9758831 NR Description: receptor-like protein kinase [Arabidopsis
  misc_feature (8)..(496): Homolog of NCBI NO: 9294681 NR Description: receptor-like protein kinase [Arabidopsis
  misc_feature (404)..(868): Homolog of NCBI NO: 9294681 NR Description: receptor-like protein kinase [Arabidopsis
  misc_feature (306)..(608): Homolog of NCBI NO: 15238490 NR Description: leucine-rich repeat transmembrane protein kinase,
  misc_feature (634)..(868): Homolog of NCBI NO: 15238490 NR Description: leucine-rich repeat transmembrane protein kinase,
  misc_feature (178)..(265): Homolog of NCBI NO: 15238490 NR Description: leucine-rich repeat transmembrane protein kinase,
  misc_feature (1)..(79): Homolog of NCBI NO: 15238490 NR Description: leucine-rich repeat transmembrane protein kinase,
  misc_feature (7)..(493): Homolog of NCBI NO: 25387119 NR Description: probable protein kinase [imported] - Arabidopsis >gi|9802783|gb|AAF99852.1|AC015448_2 Putative protein kinase
MESSFGLLLALLTLTIIHIVQAQDPQGFISLDCGLPANETSPYTETQTGLLFSSDATFIQSGKTGRVQANQESKFLKPYRTLRYFPEGVRNCYNLSVFKERKYLIAASFLYGNYDGHNIAPVFDLYLGPNLWAKIDLQDVNGTGEEILHIPTSNSLQICLVQTGETTPLISSLELRPMRTGSYTTVSGSLKTYRRLYFKKSGSRLRYSKDVYDRSWFPRFMDEWTQISTALGVINTNIYQPPEDALKNAATPTDASAPLTFKWNSEKLDVQYYFYAHYAEIQDLQANDTREFNILLNGQNLSVTGPEVPDKLSIKTFQSSSPISCNGWACNFQLIRTKRSTLPPLLNALEVYTVIQFPRSETDESDVVAMKNISASYGLSRINWQGDPCFPQQLRWDALDCTNRNISQPPRITSLNLSSSRLNGTIAAAIQSITQLETLDLSYNNLTGEVPEFLGKMKSLSVINLSGNNLNGSIPQALRKKRLKLYLEGNPRLIKPPKKEFPVAIVTLVVFVTVIVVLFLVFRKKMSTIVKGLRLPPRTSMVDVTFSNKKSKRFTYSEVVQVTKNFQRVLGKGGFGMVYHGTVKGSEQVAVKVLSQSSTQGSKEFKAEVDLLLRVHHTNLVSLVGYCCEGDYLALVYEFLPNGDLKQHLSGKGGNSIINWSIRLRIALEAALGLEYLHIGCTPPMVHRDVKTANILLDENFKAKLADFGLSRSFQGEGESQESTTIAGTLGYLDPECYHSGRLGEKSDVYSFGIVLLEMITNQPVINQTSGDSHITQWVGFQMNRGDILEIMDPNLRKDYNINSAWRALELAMSCAYPSSSKRPSMSQVIHELKECIACENTGISKNRSLEYQEMNVSLDTTAVPMAR

SEQ ID NO: 90676 - protein, 691 aa, Arabidopsis thaliana
  peptide (1)..(691): Ceres Seq. ID no. 12724766
  misc_feature (1)..(691): Homolog of NCBI NO: 9758834 NR Description: receptor-like protein kinase [Arabidopsis
  misc_feature (1)..(691): Homolog of NCBI NO: 15238493 NR Description: serine/threonine-specific protein kinase - like;
  misc_feature (1)..(691): Homolog of NCBI NO: 9758831 NR Description: receptor-like protein kinase [Arabidopsis
  misc_feature (1)..(319): Homolog of NCBI NO: 9294681 NR Description: receptor-like protein kinase [Arabidopsis
  misc_feature (227)..(691): Homolog of NCBI NO: 9294681 NR Description: receptor-like protein kinase [Arabidopsis
  misc_feature (129)..(431): Homolog of NCBI NO: 15238490 NR Description: leucine-rich repeat transmembrane protein kinase,
  misc_feature (457)..(691): Homolog of NCBI NO: 15238490 NR Description: leucine-rich repeat transmembrane protein kinase,
  misc_feature (1)..(88): Homolog of NCBI NO: 15238490 NR Description: leucine-rich repeat transmembrane protein kinase,
  misc_feature (1)..(316): Homolog of NCBI NO: 25387119 NR Description: probable protein kinase [imported] - Arabidopsis >gi|9802783|gb|AAF99852.1|AC015448_2 Putative protein kinase
  misc_feature (235)..(691): Homolog of NCBI NO: 25387119 NR Description: probable protein kinase [imported] - Arabidopsis >gi|9802783|gb|AAF99852.1|AC015448_2 Putative protein kinase
MRTGSYTTVSGSLKTYRRLYFKKSGSRLRYSKDVYDRSWFPRFMDEWTQISTALGVINTNIYQPPEDALKNAATPTDASAPLTFKWNSEKLDVQYYFYAHYAEIQDLQANDTREFNILLNGQNLSVTGPEVPDKLSIKTFQSSSPISCNGWACNFQLIRTKRSTLPPLLNALEVYTVIQFPRSETDESDVVAMKNISASYGLSRINWQGDPCFPQQLRWDALDCTNRNISQPPRITSLNLSSSRLNGTIAAAIQSITQLETLDLSYNNLTGEVPEFLGKMKSLSVINLSGNNLNGSIPQALRKKRLKLYLEGNPRLIKPPKKEFPVAIVTLVVFVTVIVVLFLVFRKKMSTIVKGLRLPPRTSMVDVTFSNKKSKRFTYSEVVQVTKNFQRVLGKGGFGMVYHGTVKGSEQVAVKVLSQSSTQGSKEFKAEVDLLLRVHHTNLVSLVGYCCEGDYLALVYEFLPNGDLKQHLSGKGGNSIINWSIRLRIALEAALGLEYLHIGCTPPMVHRDVKTANILLDENFKAKLADFGLSRSFQGEGESQESTTIAGTLGYLDPECYHSGRLGEKSDVYSFGIVLLEMITNQPVINQTSGDSHITQWVGFQMNRGDILEIMDPNLRKDYNINSAWRALELAMSCAYPSSSKRPSMSQVIHELKECIACENTGISKNRSLEYQEMNVSLDTTAVPMAR

SEQ ID NO: 90677 - protein, 648 aa, Arabidopsis thaliana
  peptide (1)..(648): Ceres Seq. ID no. 12724767
  misc_feature (1)..(648): Homolog of NCBI NO: 9758834 NR Description: receptor-like protein kinase [Arabidopsis
  misc_feature (1)..(648): Homolog of NCBI NO: 15238493 NR Description: serine/threonine-specific protein kinase - like;
  misc_feature (1)..(648): Homolog of NCBI NO: 9758831 NR Description: receptor-like protein kinase [Arabidopsis
  misc_feature (1)..(276): Homolog of NCBI NO: 9294681 NR Description: receptor-like protein kinase [Arabidopsis
  misc_feature (184)..(648): Homolog of NCBI NO: 9294681 NR Description: receptor-like protein kinase [Arabidopsis
  misc_feature (86)..(388): Homolog of NCBI NO: 15238490 NR Description: leucine-rich repeat transmembrane protein kinase,
  misc_feature (414)..(648): Homolog of NCBI NO: 15238490 NR Description: leucine-rich repeat transmembrane protein kinase,
  misc_feature (1)..(45): Homolog of NCBI NO: 15238490 NR Description: leucine-rich repeat transmembrane protein kinase,
  misc_feature (1)..(273): Homolog of NCBI NO: 25387119 NR Description: probable protein kinase [imported] - Arabidopsis >gi|9802783|gb|AAF99852.1|AC015448_2 Putative protein kinase
  misc_feature (192)..(648): Homolog of NCBI NO: 25387119 NR Description: probable protein kinase [imported] - Arabidopsis >gi|9802783|gb|AAF99852.1|AC015448_2 Putative protein kinase
MDEWTQISTALGVINTNIYQPPEDALKNAATPTDASAPLTFKWNSEKLDVQYYFYAHYAEIQDLQANDTREFNILLNGQNLSVTGPEVPDKLSIKTFQSSSPISCNGWACNFQLIRTKRSTLPPLLNALEVYTVIQFPRSETDESDVVAMKNISASYGLSRINWQGDPCFPQQLRWDALDCTNRNISQPPRITSLNLSSSRLNGTIAAAIQSITQLETLDLSYNNLTGEVPEFLGKMKSLSVINLSGNNLNGSIPQALRKKRLKLYLEGNPRLIKPPKKEFPVAIVTLVVFVTVIVVLFLVFRKKMSTIVKGLRLPPRTSMVDVTFSNKKSKRFTYSEVVQVTKNFQRVLGKGGFGMVYHGTVKGSEQVAVKVLSQSSTQGSKEFKAEVDLLLRVHHTNLVSLVGYCCEGDYLALVYEFLPNGDLKQHLSGKGGNSIINWSIRLRIALEAALGLEYLHIGCTPPMVHRDVKTANILLDENFKAKLADFGLSRSFQGEGESQESTTIAGTLGYLDPECYHSGRLGEKSDVYSFGIVLLEMITNQPVINQTSGDSHITQWVGFQMNRGDILEIMDPNLRKDYNINSAWRALELAMSCAYPSSSKRPSMSQVIHELKECIACENTGISKNRSLEYQEMNVSLDTTAVPMAR

SEQ ID NO: 90678 - DNA, 1323 bp, Arabidopsis thaliana
  misc_feature (1)..(1323): Ceres Seq. ID no. 12724802
  misc_feature: MA Experiment ID: 20000166 Result: Up-regulated in Transcription
  misc_feature: MA Experiment 20000166 PARAMETER Experiment Name: At_100uM_ABA_P Parameter: Age (day) Value: 14
  misc_feature: MA Experiment 20000166 PARAMETER Experiment Name: At_100uM_ABA_P Parameter: Organism Value: A. thaliana
  misc_feature: MA Experiment 20000166 PARAMETER Experiment Name: At_100uM_ABA_P Parameter: Plant Line Value: WS
  misc_feature: MA Experiment 20000166 PARAMETER Experiment Name: At_100uM_ABA_P Parameter: Timepoint (hr) Value: 1
  misc_feature: MA Experiment 20000166 PARAMETER Experiment Name: At_100uM_ABA_P Parameter: Tissue Value: Aerial
  misc_feature: MA Experiment 20000166 PARAMETER Experiment Name: At_100uM_ABA_P Parameter: Treatment Value: 100uM ABA vs. No Treatment
  misc_feature: MA Experiment ID: 20000173 Result: Up-regulated in Transcription
  misc_feature: MA Experiment 20000173 PARAMETER Experiment Name: At_42deg_Heat_P Parameter: Age (day) Value: 14
  misc_feature: MA Experiment 20000173 PARAMETER Experiment Name: At_42deg_Heat_P Parameter: Organism Value: A. thaliana
  misc_feature: MA Experiment 20000173 PARAMETER Experiment Name: At_42deg_Heat_P Parameter: Plant Line Value: WS
  misc_feature: MA Experiment 20000173 PARAMETER Experiment Name: At_42deg_Heat_P Parameter: Temperature (deg C) Value: 42 vs. 22
  misc_feature: MA Experiment 20000173 PARAMETER Experiment Name: At_42deg_Heat_P Parameter: Timepoint (hr) Value: 6
  misc_feature: MA Experiment 20000173 PARAMETER Experiment Name: At_42deg_Heat_P Parameter: Tissue Value: Aerial
  misc_feature: MA Experiment ID: 20000182 Result: Up-regulated in Transcription
  misc_feature: MA Experiment 20000182 PARAMETER Experiment Name: At_2mM_SA_P Parameter: Age (day) Value: 14
  misc_feature: MA Experiment 20000182 PARAMETER Experiment Name: At_2mM_SA_P Parameter: Organism Value: A. thaliana
  misc_feature: MA Experiment 20000182 PARAMETER Experiment Name: At_2mM_SA_P Parameter: Plant Line Value: WS
  misc_feature: MA Experiment 20000182 PARAMETER Experiment Name: At_2mM_SA_P Parameter: Timepoint (hr) Value: 6
  misc_feature: MA Experiment 20000182 PARAMETER Experiment Name: At_2mM_SA_P Parameter: Tissue Value: Aerial
  misc_feature: MA Experiment 20000182 PARAMETER Experiment Name: At_2mM_SA_P Parameter: Treatment Value: 2mM SA vs. No Treatment
  misc_feature: MA Experiment ID: 20000235 Result: Down-regulated in Transcription
  misc_feature: MA Experiment 20000235 PARAMETER Experiment Name: At_Siliques_P Parameter: Age (day) Value: 21
  misc_feature: MA Experiment 20000235 PARAMETER Experiment Name: At_Siliques_P Parameter: Organism Value: A. thaliana
  misc_feature: MA Experiment 20000235 PARAMETER Experiment Name: At_Siliques_P Parameter: Plant Line Value: WS
  misc_feature: MA Experiment 20000235 PARAMETER Experiment Name: At_Siliques_P Parameter: Tissue Value: 5-10mm Siliques vs. Whole Plant
  misc_feature: MA Experiment ID: 20000265 Result: Down-regulated in Transcription
  misc_feature: MA Experiment 20000265 PARAMETER Experiment Name: At_Open_Flower_P Parameter: Age (day) Value: 21
  misc_feature: MA Experiment 20000265 PARAMETER Experiment Name: At_Open_Flower_P Parameter: Plant Line Value: WS
  misc_feature: MA Experiment 20000265 PARAMETER Experiment Name: At_Open_Flower_P Parameter: Tissue Value: Closed Flower vs. Whole Plant
  misc_feature: MA Experiment ID: 20000286 Result: Down-regulated in Transcription
  misc_feature: MA Experiment 20000286 PARAMETER Experiment Name: At_Open_Flower_P Parameter: Age (day) Value: 21
  misc_feature: MA Experiment 20000286 PARAMETER Experiment Name: At_Open_Flower_P Parameter: Plant Line Value: WS
  misc_feature: MA Experiment 20000286 PARAMETER Experiment Name: At_Open_Flower_P Parameter: Tissue Value: Half Open vs. Whole Plant
  misc_feature: MA Experiment ID: 20001451 Result: Up-regulated in Transcription
  misc_feature: MA Experiment 20001451 PARAMETER Experiment Name: At_Far-red-induction_P Parameter: Age (day) Value: 7
  misc_feature: MA Experiment 20001451 PARAMETER Experiment Name: At_Far-red-induction_P Parameter: Light Value: Far-red vs. White
  misc_feature: MA Experiment 20001451 PARAMETER Experiment Name: At_Far-red-induction_P Parameter: Organism Value: A. thaliana
  misc_feature: MA Experiment 20001451 PARAMETER Experiment Name: At_Far-red-induction_P Parameter: Plant Line Value: Columbia
  misc_feature: MA Experiment 20001451 PARAMETER Experiment Name: At_Far-red-induction_P Parameter: Timepoint (hr) Value: 24
  misc_feature: MA Experiment 20001451 PARAMETER Experiment Name: At_Far-red-induction_P Parameter: Tissue Value: Whole Plant
cccaaagcaaaaacaaattacatcattcaattcaattctcaatgcctcttcttctccctacctcttccttcaaaacgacggccaccgtcgtaatcgccggcgtttcatctattgccacggcgatgattctcacggtcccttccgtttcccatttcgtagtctcttgctttccgattatttacgataacaccgtcttcctcttaaaaccaccgtatctttacttagtcatcaactctatcatcgtctgcatcatcgctacttctaaactcactcataaatcgtcctccgtcgatgactctgagatctcggaagtagtgactccaataccgataccggtaccggttcatttaccttctgatatcgattccggttatttaaacgtggttcatgtggtttctgattataccggatttgttgagaaaatcgatgacgtgtcgattaatccaacggtggaggctatccggaagtttccagaagttcaggaggcggagaagtcgaaagagagtagcgattcgccggaaccggagacggagaagccaaaattgaagaatgattcgccggagatttcgattctgaagcacagtacgagaaaaccgccgcgatttaatcagcaaaaatctcttaaatctaattcagaaggtggaaataaaaagacggcgttgggagtgacgaagccaccgaggagacaagacacgctggagacgacgtggaagaagataacggaaggacgttcaacgccgttaactaagcacttgactaaatccgacacgtggcaagaaagagctcacgtgcaaagctcaccagaaaataaggagaagatgaccaagtccgagaatttaaaggacataaatacccccacggaggagaagacggtgttgaaacgcgagccgtcgccgggacaggaggagttgaatcggcgcgttgaagcgtttataaagaagtttaacgaagagatgagattgcaaagattagaatctttggctaaatacaatgaaatggtaaatggagggactcgtttgtaaattttcgtggtttttgcttaggcgtcggtgaaggagaaaaatgacggcacagtcgcaaaagttgacttgactcttttttacaaccacttaaaagagtttttttttccttcttccggggaacaaaatttcaaaataatgcaaaaattgtgtttatgattgttatgtttcttttggggtcgagacgttaatcgtgtggttacaagtgaaggattatatgttaacagtagtgagtagtgactagtgttcgaatctgttttcttttgtaattttacattataaacaatattatttatttactatt

SEQ ID NO: 90679 - protein, 339 aa, Arabidopsis thaliana
  peptide (1)..(339): Ceres Seq. ID no. 12724803
  misc_feature (26)..(331): Pfam Name: Cotton fibre expressed protein Pfam Description: Cotton fibre expressed protein
  misc_feature (14)..(339): Homolog of NCBI NO: 15239605 NR Description: cotton fiber expressed protein 1-like protein; id: At5g54300.1, supported by cDNA: gi_20466705 [Arabidopsis
  misc_feature (27)..(337): Homolog of NCBI NO: 34898720 NR Description: putative fiber protein [Oryza sativa (japonica group)] >gi|23617203|dbj|BAC20874.1| putative fiber protein
  misc_feature (29)..(337): Homolog of NCBI NO: 7484716 NR Description: fiber protein 1 [imported] - upland cotton
  misc_feature (11)..(326): Homolog of NCBI NO: 25373435 NR Description: hypothetical protein [imported] - Arabidopsis >gi|5734737|gb|AAD50002.1|AC007259_15 Unknown protein
  misc_feature (20)..(326): Homolog of NCBI NO: 15220310 NR Description: hypothetical protein; protein id: At1g11220.1
  misc_feature (158)..(336): Homolog of NCBI NO: 25373438 NR Description: hypothetical protein F11P17.2 [imported] - thaliana >gi|2443876|gb|AAB71469.1| Hypothetical protein
  misc_feature (158)..(336): Homolog of NCBI NO: 30696552 NR Description: cotton fiber expressed protein -related
  misc_feature (29)..(281): Homolog of NCBI NO: 7484717 NR Description: fiber protein 2 [imported] - upland cotton
  misc_feature (27)..(336): Homolog of NCBI NO: 18391249 NR Description: expressed protein; protein id: At1g11210.1, by cDNA: 37592., supported by cDNA: gi_13358179, supported by gi_15146279, supported by cDNA: gi_19699167 [Arabidopsis
  misc_feature (27)..(336): Homolog of NCBI NO: 21593266 NR Description: unknown [Arabidopsis thaliana]
QSKNKLHHSIQFSMPLLLPTSSFKTTATVVIAGVSSIATAMILTVPSVSHFVVSCFPIIYDNTVFLLKPPYLYLVINSIIVCIIATSKLTHKSSSVDDSEISEVVTPIPIPVPVHLPSDIDSGYLNVVHVVSDYTGFVEKIDDVSINPTVEAIRKFPEVQEAEKSKESSDSPEPETEKPKLKNDSPEISILKHSTRKPPRFNQQKSLKSNSEGGNKKTALGVTKPPRRQDTLETTWKKITEGRSTPLTKHLTKSDTWQERAHVQSSPENKEKMTKSENLKDINTPTEEKTVLKREPSPGQEELNRRVEAFIKKFNEEMRLQRLESLAKYNEMVNGGTRL

SEQ ID NO: 90680 - protein, 326 aa, Arabidopsis thaliana
  peptide (1)..(326): Ceres Seq. ID no. 12724804
  misc_feature (13)..(318): Pfam Name: Cotton fibre expressed protein Pfam Description: Cotton fibre expressed protein
  misc_feature (1)..(326): Homolog of NCBI NO: 15239605 NR Description: cotton fiber expressed protein 1-like protein; id: At5g54300.1, supported by cDNA: gi_20466705 [Arabidopsis
  misc_feature (14)..(324): Homolog of NCBI NO: 34898720 NR Description: putative fiber protein [Oryza sativa (japonica group)] >gi|23617203|dbj|BAC20874.1| putative fiber protein
  misc_feature (16)..(324): Homolog of NCBI NO: 7484716 NR Description: fiber protein 1 [imported] - upland cotton
  misc_feature (1)..(313): Homolog of NCBI NO: 25373435 NR Description: hypothetical protein [imported] - Arabidopsis >gi|5734737|gb|AAD50002.1|AC007259_15 Unknown protein
  misc_feature (7)..(313): Homolog of NCBI NO: 15220310 NR Description: hypothetical protein; protein id: At1g11220.1
  misc_feature (145)..(323): Homolog of NCBI NO: 25373438 NR Description: hypothetical protein F11P17.2 [imported] - thaliana >gi|2443876|gb|AAB71469.1| Hypothetical protein
  misc_feature (145)..(323): Homolog of NCBI NO: 30696552 NR Description: cotton fiber expressed protein -related
  misc_feature (16)..(268): Homolog of NCBI NO: 7484717 NR Description: fiber protein 2 [imported] - upland cotton
  misc_feature (14)..(323): Homolog of NCBI NO: 18391249 NR Description: expressed protein; protein id: At1g11210.1, by cDNA: 37592., supported by cDNA: gi_13358179, supported by gi_15146279, supported by cDNA: gi_19699167 [Arabidopsis
  misc_feature (14)..(323): Homolog of NCBI NO: 21593266 NR Description: unknown [Arabidopsis thaliana]
MPLLLPTSSFKTTATVVIAGVSSIATAMILTVPSVSHFVVSCFPIIYDNTVFLLKPPYLYLVINSIIVCIIATSKLTHKSSSVDDSEISEVVTPIPIPVPVHLPSDIDSGYLNVVHVVSDYTGFVEKIDDVSINPTVEAIRKFPEVQEAEKSKESSDSPEPETEKPKLKNDSPEISILKHSTRKPPRFNQQKSLKSNSEGGNKKTALGVTKPPRRQDTLETTWKKITEGRSTPLTKHLTKSDTWQERAHVQSSPENKEKMTKSENLKDINTPTEEKTVLKREPSPGQEELNRRVEAFIKKFNEEMRLQRLESLAKYNEMVNGGTRL

SEQ ID NO: 90681 - protein, 299 aa, Arabidopsis thaliana
  peptide (1)..(299): Ceres Seq. ID no. 12724805
  misc_feature (1)..(291): Pfam Name: Cotton fibre expressed protein Pfam Description: Cotton fibre expressed protein
  misc_feature (1)..(299): Homolog of NCBI NO: 15239605 NR Description: cotton fiber expressed protein 1-like protein; id: At5g54300.1, supported by cDNA: gi_20466705 [Arabidopsis
  misc_feature (1)..(297): Homolog of NCBI NO: 34898720 NR Description: putative fiber protein [Oryza sativa (japonica group)] >gi|23617203|dbj|BAC20874.1| putative fiber protein
  misc_feature (1)..(297): Homolog of NCBI NO: 7484716 NR Description: fiber protein 1 [imported] - upland cotton
  misc_feature (1)..(286): Homolog of NCBI NO: 25373435 NR Description: hypothetical protein [imported] - Arabidopsis >gi|5734737|gb|AAD50002.1|AC007259_15 Unknown protein
  misc_feature (1)..(286): Homolog of NCBI NO: 15220310 NR Description: hypothetical protein; protein id: At1g11220.1
  misc_feature (118)..(296): Homolog of NCBI NO: 25373438 NR Description: hypothetical protein F11P17.2 [imported] - thaliana >gi|2443876|gb|AAB71469.1| Hypothetical protein
  misc_feature (118)..(296): Homolog of NCBI NO: 30696552 NR Description: cotton fiber expressed protein -related
  misc_feature (1)..(241): Homolog of NCBI NO: 7484717 NR Description: fiber protein 2 [imported] - upland cotton
  misc_feature (1)..(296): Homolog of NCBI NO: 18391249 NR Description: expressed protein; protein id: At1g11210.1, by cDNA: 37592., supported by cDNA: gi_13358179, supported by gi_15146279, supported by cDNA: gi_19699167 [Arabidopsis
  misc_feature (1)..(296): Homolog of NCBI NO: 21593266 NR Description: unknown [Arabidopsis thaliana]
MILTVPSVSHFVVSCFPIIYDNTVFLLKPPYLYLVINSIIVCIIATSKLTHKSSSVDDSEISEVVTPIPIPVPVHLPSDIDSGYLNVVHVVSDYTGFVEKIDDVSINPTVEAIRKFPEVQEAEKSKESSDSPEPETEKPKLKNDSPEISILKHSTRKPPRFNQQKSLKSNSEGGNKKTALGVTKPPRRQDTLETTWKKITEGRSTPLTKHLTKSDTWQERAHVQSSPENKEKMTKSENLKDINTPTEEKTVLKREPSPGQEELNRRVEAFIKKFNEEMRLQRLESLAKYNEMVNGGTRL

SEQ ID NO: 90682 - DNA, 879 bp, Arabidopsis thaliana
  misc_feature (1)..(879): Ceres Seq. ID no. 12724820
  misc_feature: MA Experiment ID: 20000184 Result: Down-regulated in Transcription
  misc_feature: MA Experiment 20000184 PARAMETER Experiment Name: At_Shoots__P Parameter: Age (day) Value: 7
  misc_feature: MA Experiment 20000184 PARAMETER Experiment Name: At_Shoots__P Parameter: Tissue Value: Shoots vs. Whole Plant
  misc_feature: MA Experiment ID: 20000234 Result: Up-regulated in Transcription
  misc_feature: MA Experiment 20000234 PARAMETER Experiment Name: At_Siliques_P Parameter: Age (day) Value: 21
  misc_feature: MA Experiment 20000234 PARAMETER Experiment Name: At_Siliques_P Parameter: Organism Value: A. thaliana
  misc_feature: MA Experiment 20000234 PARAMETER Experiment Name: At_Siliques_P Parameter: Plant Line Value: WS
  misc_feature: MA Experiment 20000234 PARAMETER Experiment Name: At_Siliques_P Parameter: Tissue Value: Less Than 5mm Siliques vs. Whole Plant
  misc_feature: MA Experiment ID: 20000235 Result: Up-regulated in Transcription
  misc_feature: MA Experiment 20000235 PARAMETER Experiment Name: At_Siliques_P Parameter: Age (day) Value: 21
  misc_feature: MA Experiment 20000235 PARAMETER Experiment Name: At_Siliques_P Parameter: Organism Value: A. thaliana
  misc_feature: MA Experiment 20000235 PARAMETER Experiment Name: At_Siliques_P Parameter: Plant Line Value: WS
  misc_feature: MA Experiment 20000235 PARAMETER Experiment Name: At_Siliques_P Parameter: Tissue Value: 5-10mm Siliques vs. Whole Plant
  misc_feature: MA Experiment ID: 20000264 Result: Up-regulated in Transcription
  misc_feature: MA Experiment 20000264 PARAMETER Experiment Name: At_Open_Flower_P Parameter: Age (day) Value: 21
  misc_feature: MA Experiment 20000264 PARAMETER Experiment Name: At_Open_Flower_P Parameter: Plant Line Value: WS
  misc_feature: MA Experiment 20000264 PARAMETER Experiment Name: At_Open_Flower_P Parameter: Tissue Value: Open Flower vs. Whole Plant
  misc_feature: MA Experiment ID: 20000286 Result: Up-regulated in Transcription
  misc_feature: MA Experiment 20000286 PARAMETER Experiment Name: At_Open_Flower_P Parameter: Age (day) Value: 21
  misc_feature: MA Experiment 20000286 PARAMETER Experiment Name: At_Open_Flower_P Parameter: Plant Line Value: WS
  misc_feature: MA Experiment 20000286 PARAMETER Experiment Name: At_Open_Flower_P Parameter: Tissue Value: Half Open vs. Whole Plant
  misc_feature: MA Experiment ID: 20000438 Result: Down-regulated in Transcription
  misc_feature: MA Experiment 20000438 PARAMETER Experiment Name: At_Shoots__P Parameter: Age (day) Value: 14
  misc_feature: MA Experiment 20000438 PARAMETER Experiment Name: At_Shoots__P Parameter: Tissue Value: Shoots vs. Whole Plant
  misc_feature: MA Experiment ID: 20000451 Result: Up-regulated in Transcription
  misc_feature: MA Experiment 20000451 PARAMETER Experiment Name: At_CS6879_Shoots-Roots_P Parameter: Age (day) Value: 14
  misc_feature: MA Experiment 20000451 PARAMETER Experiment Name: At_CS6879_Shoots-Roots_P Parameter: Organism Value: A. thaliana
  misc_feature: MA Experiment 20000451 PARAMETER Experiment Name: At_CS6879_Shoots-Roots_P Parameter: Plant Line Value: CS6879 vs. WS
  misc_feature: MA Experiment 20000451 PARAMETER Experiment Name: At_CS6879_Shoots-Roots_P Parameter: Tissue Value: Roots
  misc_feature: MA Experiment ID: 20000794 Result: Up-regulated in Transcription
  misc_feature: MA Experiment 20000794 PARAMETER Experiment Name: At_Petals_P Parameter: Age (day) Value: 23-25 days
  misc_feature: MA Experiment 20000794 PARAMETER Experiment Name: At_Petals_P Parameter: Plant Line Value: WS
  misc_feature: MA Experiment 20000794 PARAMETER Experiment Name: At_Petals_P Parameter: Tissue Value: Petals vs. Whole plant
  misc_feature: MA Experiment ID: 20001557 Result: Up-regulated in Transcription
  misc_feature: MA Experiment 20001557 PARAMETER Experiment Name: At_Drought_Soil_Dry_P Parameter: Age (day) Value: 27
  misc_feature: MA Experiment 20001557 PARAMETER Experiment Name: At_Drought_Soil_Dry_P Parameter: Organism Value: A. thaliana
  misc_feature: MA Experiment 20001557 PARAMETER Experiment Name: At_Drought_Soil_Dry_P Parameter: Plant Line Value: WS
  misc_feature: MA Experiment 20001557 PARAMETER Experiment Name: At_Drought_Soil_Dry_P Parameter: Post Timepoint (hr) Value: 3
  misc_feature: MA Experiment 20001557 PARAMETER Experiment Name: At_Drought_Soil_Dry_P Parameter: Post-Treatment Value: Re-Water vs. No Drought
  misc_feature: MA Experiment 20001557 PARAMETER Experiment Name: At_Drought_Soil_Dry_P Parameter: Timepoint (day) Value: 13
  misc_feature: MA Experiment 20001557 PARAMETER Experiment Name: At_Drought_Soil_Dry_P Parameter: Treatment Value: Drought vs. No Drought
atggggaagacaacgaatggaacaagagactgggctcagatctacgcaatctacgggatcgagcaaaaacacacactcatcttcctgatactcaacgcgattgctttctctatactctccaccgtctttgtcatctactttaacccgatctgcgtcttctttcaatcgtttctcttctctaacgccgcggcagctagattctcggctggattctttggagctgttacggcgctttccgccgtgtgtttgtttttcgcggcggcgaattttttttactctgctgtgccgcttaggtatgagatggcgcagaggatggttggatctgttggagattggtcgagtgtgaagaccgctcttgacttaggttgtggtcgtgggattttgcttaatgccgttgcgacgcagctcaagaaaactggtagctcgggtcgggtcgttgggttggatcggtccatgactactactctctctactctacgtacagctcacatcgaaggagtacaagagtacgtgacatgccgtgaaggagacgtaagaaggcttccgtttagtgataactactttgacgtggtggtttctgcagtgtttctccataccattgggaaagaatacggtcagaagacggtggaggcggcggcagagaggatgagagtacttggagaagcggtgagagtgttgaaaccaggaggagttggagtggtttgggacttagtgcacgtgccggagtatgtgcggcggttacaggagctgaggatggaggagattagagtttcgaaacgagtcactgcgtttatggttaagagccatatggtctcgtttaagaaacctagtcagcattttgtgggatctggtgaagtacgtttagattggagatgttaa

SEQ ID NO: 90683 - protein, 292 aa, Arabidopsis thaliana
  peptide (1)..(292): Ceres Seq. ID no. 12724821
  misc_feature (1)..(292): Homolog of NCBI NO: 15239632 NR Description: putative protein; protein id: At5g54400.1 thaliana] >gi|8885583|dbj|BAA97513.1|
  misc_feature (1)..(291): Homolog of NCBI NO: 18400797 NR Description: expressed protein; protein id: At3g15530.1, by cDNA: 15303. [Arabidopsis thaliana] >gi|7021738|gb|AAF35419.1| protein [Arabidopsis thaliana] >gi|15795118|dbj|BAB02382.1|
  misc_feature (69)..(276): Homolog of NCBI NO: 22971588 NR Description: hypothetical protein [Chloroflexus aurantiacus]
  misc_feature (112)..(288): Homolog of NCBI NO: 23127439 NR Description: hypothetical protein [Nostoc punctiforme]
MGKTTNGTRDWAQIYAIYGIEQKHTLIFLILNAIAFSILSTVFVIYFNPICVFFQSFLFSNAAAARFSAGFFGAVTALSAVCLFFAAANFFYSAVPLRYEMAQRMVGSVGDWSSVKTALDLGCGRGILLNAVATQLKKTGSSGRVVGLDRSMTTTLSTLRTAHIEGVQEYVTCREGDVRRLPFSDNYFDVVVSAVFLHTIGKEYGQKTVEAAAERMRVLGEAVRVLKPGGVGVVWDLVHVPEYVRRLQELRMEEIRVSKRVTAFMVKSHMVSFKKPSQHFVGSGEVRLDWRC

SEQ ID NO: 90684 - protein, 192 aa, Arabidopsis thaliana
  peptide (1)..(192): Ceres Seq. ID no. 12724822
  misc_feature (1)..(192): Homolog of NCBI NO: 15239632 NR Description: putative protein; protein id: At5g54400.1 thaliana] >gi|8885583|dbj|BAA97513.1|
  misc_feature (1)..(191): Homolog of NCBI NO: 18400797 NR Description: expressed protein; protein id: At3g15530.1, by cDNA: 15303. [Arabidopsis thaliana] >gi|7021738|gb|AAF35419.1| protein [Arabidopsis thaliana] >gi|15795118|dbj|BAB02382.1|
  misc_feature (1)..(176): Homolog of NCBI NO: 22971588 NR Description: hypothetical protein [Chloroflexus aurantiacus]
  misc_feature (12)..(188): Homolog of NCBI NO: 23127439 NR Description: hypothetical protein [Nostoc punctiforme]
MAQRMVGSVGDWSSVKTALDLGCGRGILLNAVATQLKKTGSSGRVVGLDRSMTTTLSTLRTAHIEGVQEYVTCREGDVRRLPFSDNYFDVVVSAVFLHTIGKEYGQKTVEAAAERMRVLGEAVRVLKPGGVGVVWDLVHVPEYVRRLQELRMEEIRVSKRVTAFMVKSHMVSFKKPSQHFVGSGEVRLDWRC

SEQ ID NO: 90685 - protein, 188 aa, Arabidopsis thaliana
  peptide (1)..(188): Ceres Seq. ID no. 12724823
  misc_feature (1)..(188): Homolog of NCBI NO: 15239632 NR Description: putative protein; protein id: At5g54400.1 thaliana] >gi|8885583|dbj|BAA97513.1|
  misc_feature (1)..(187): Homolog of NCBI NO: 18400797 NR Description: expressed protein; protein id: At3g15530.1, by cDNA: 15303. [Arabidopsis thaliana] >gi|7021738|gb|AAF35419.1| protein [Arabidopsis thaliana] >gi|15795118|dbj|BAB02382.1|
  misc_feature (1)..(172): Homolog of NCBI NO: 22971588 NR Description: hypothetical protein [Chloroflexus aurantiacus]
  misc_feature (8)..(184): Homolog of NCBI NO: 23127439 NR Description: hypothetical protein [Nostoc punctiforme]
MVGSVGDWSSVKTALDLGCGRGILLNAVATQLKKTGSSGRVVGLDRSMTTTLSTLRTAHIEGVQEYVTCREGDVRRLPFSDNYFDVVVSAVFLHTIGKEYGQKTVEAAAERMRVLGEAVRVLKPGGVGVVWDLVHVPEYVRRLQELRMEEIRVSKRVTAFMVKSHMVSFKKPSQHFVGSGEVRLDWRC

SEQ ID NO: 90686 - DNA, 1572 bp, Arabidopsis thaliana
  misc_feature (1)..(1572): Ceres Seq. ID no. 12724855
  misc_feature: MA Experiment ID: 20000264 Result: Up-regulated in Transcription
  misc_feature: MA Experiment 20000264 PARAMETER Experiment Name: At_Open_Flower_P Parameter: Age (day) Value: 21
  misc_feature: MA Experiment 20000264 PARAMETER Experiment Name: At_Open_Flower_P Parameter: Plant Line Value: WS
  misc_feature: MA Experiment 20000264 PARAMETER Experiment Name: At_Open_Flower_P Parameter: Tissue Value: Open Flower vs. Whole Plant
  misc_feature: MA Experiment ID: 20000265 Result: Up-regulated in Transcription
  misc_feature: MA Experiment 20000265 PARAMETER Experiment Name: At_Open_Flower_P Parameter: Age (day) Value: 21
  misc_feature: MA Experiment 20000265 PARAMETER Experiment Name: At_Open_Flower_P Parameter: Plant Line Value: WS
  misc_feature: MA Experiment 20000265 PARAMETER Experiment Name: At_Open_Flower_P Parameter: Tissue Value: Closed Flower vs. Whole Plant
  misc_feature: MA Experiment ID: 20000794 Result: Up-regulated in Transcription
  misc_feature: MA Experiment 20000794 PARAMETER Experiment Name: At_Petals_P Parameter: Age (day) Value: 23-25 days
  misc_feature: MA Experiment 20000794 PARAMETER Experiment Name: At_Petals_P Parameter: Plant Line Value: WS
  misc_feature: MA Experiment 20000794 PARAMETER Experiment Name: At_Petals_P Parameter: Tissue Value: Petals vs. Whole plant
atggaatctttaatgagactcgtcttagttctgtttccgttcttcgtcgtcttcttcgtacctcttgatcacgtttcttcagaatctatcagcagagcaaattttccagatggatttgtattcggaacagcttcttcagcttaccagttcgaaggagctgtgaaagaaggaaacaaaggagaaagcatatgggacactttcacgaaggagaaaccaggaaagatactggatttcagcaatgcggatactacggttgatcaatatcataggtttcacaatgacatagacctgatgaaagatctgagaatggatgcttacagattctctatatcttggtcaagaatattccctaatggaacaggggaagtaaacccagatggagttaagtactataacagcctaatagatgctcttttagccaaaggaatcaaaccttatgtgacattgtatcactgggatctcccacaagccttagaagacagatatgaaggatggctaagcagagaagtggtggatgattttgagcattatgcattcacctgtttcaaagcatttggagatagagtgaagtactggatcactttcaatgagcctcatggggtatcgatccaaggctatgacacagggatacaagctccaggaaggtgctcacttctgggacattggttctgtaagaaggggaagtcatcggtcgaaccgtatattgtagctcataacattctgttgtctcatgctgctgcttaccatacctaccaaagaaactttaaggagaaacaacgtggtcaaatcgggatatcattagatgcaaaatggtatgagccaatgtctgattgtgatgaggacaaagatgcagctcgtagagcaatggattttgggcttggatggtttatggatcctctaatcaatggagactatccagcttcaatgaagagtctagtggaagagagactacctaagataacaccagagatgtataaaaccataaaaggggcatttgattacgtgggaatcaaccactacaccacattatacgcgaggaatgacagaactaggataaggaaactgattctacaagatgcttcttctgattcagccgtgattacaagctggtcaagctggctacacattgtcccatggggaatcaggaaactggcagtgtatgttaaagacatatatggaaacccacctgtattcatcacagaaaacggcatggatgagaaaaacagtccattcatagacatggaaaaagcattaaaagatgacaagaggattggcttccacagagattacctctcaaacttatcagctgccataaggaatgatgaatgcgacgtaagaggatattttgtgtggtcattgctagacaattgggaatggaactcaggatacacggtccggtttgggatctactatgttgactacaagaacaatctcacaaggatacctaaagcttctgctcgatggtttcaaacaatacttagcggctcttcttcaacatcagattccagcaagcttattctactggaagaggcaacagaacaacaacaagagtacaaattccaagagaaatga

SEQ ID NO: 90687 - protein, 523 aa, Arabidopsis thaliana
  peptide (1)..(523): Ceres Seq. ID no. 12724856
  misc_feature (1)..(523): Homolog of NCBI NO: 22327832 NR Description: glycosyl hydrolase family 1; protein id:
  misc_feature (5)..(523): Homolog of NCBI NO: 9758949 NR Description: beta-glucosidase [Arabidopsis thaliana]
  misc_feature (30)..(403): Homolog of NCBI NO: 37532728 NR Description: putative beta-glucosidase [Oryza sativa (japonica
  misc_feature (371)..(497): Homolog of NCBI NO: 37532728 NR Description: putative beta-glucosidase [Oryza sativa (japonica
  misc_feature (26)..(493): Homolog of NCBI NO: 22658440 NR Description: beta-glucosidase [Oryza sativa (japonica
  misc_feature (6)..(497): Homolog of NCBI NO: 15222734 NR Description: glycosyl hydrolase family 1; protein id: supported by cDNA: 125606., supported by cDNA: gi_15028208
  misc_feature (30)..(497): Homolog of NCBI NO: 21537259 NR Description: beta-glucosidase, putative [Arabidopsis thaliana]
  misc_feature (30)..(493): Homolog of NCBI NO: 38344468 NR Description: OSJNBa0022H21.3 [Oryza sativa (japonica
  misc_feature (29)..(523): Homolog of NCBI NO: 7435445 NR Description: beta-glucosidase (EC 3.2.1.21) precursor isoform
  misc_feature (29)..(523): Homolog of NCBI NO: 15778634 NR Description: amygdalin hydrolase isoform AH I precursor
MESLMRLVLVLFPFFVVFFVPLDHVSSESISRANFPDGFVFGTASSAYQFEGAVKEGNKGESIWDTFTKEKPGKILDFSNADTTVDQYHRFHNDIDLMKDLRMDAYRFSISWSRIFPNGTGEVNPDGVKYYNSLIDALLAKGIKPYVTLYHWDLPQALEDRYEGWLSREVVDDFEHYAFTCFKAFGDRVKYWITFNEPHGVSIQGYDTGIQAPGRCSLLGHWFCKKGKSSVEPYIVAHNILLSHAAAYHTYQRNFKEKQRGQIGISLDAKWYEPMSDCDEDKDAARRAMDFGLGWFMDPLINGDYPASMKSLVEERLPKITPEMYKTIKGAFDYVGINHYTTLYARNDRTRIRKLILQDASSDSAVITSWSSWLHIVPWGIRKLAVYVKDIYGNPPVFITENGMDEKNSPFIDMEKALKDDKRIGFHRDYLSNLSAAIRNDECDVRGYFVWSLLDNWEWNSGYTVRFGIYYVDYKNNLTRIPKASARWFQTILSGSSSTSDSSKLILLEEATEQQQEYKFQEK

SEQ ID NO: 90688 - protein, 519 aa, Arabidopsis thaliana
  peptide (1)..(519): Ceres Seq. ID no. 12724857
  misc_feature (1)..(519): Homolog of NCBI NO: 22327832 NR Description: glycosyl hydrolase family 1; protein id:
  misc_feature (1)..(519): Homolog of NCBI NO: 9758949 NR Description: beta-glucosidase [Arabidopsis thaliana]
  misc_feature (26)..(399): Homolog of NCBI NO: 37532728 NR Description: putative beta-glucosidase [Oryza sativa (japonica
  misc_feature (367)..(493): Homolog of NCBI NO: 37532728 NR Description: putative beta-glucosidase [Oryza sativa (japonica
  misc_feature (22)..(489): Homolog of NCBI NO: 22658440 NR Description: beta-glucosidase [Oryza sativa (japonica
  misc_feature (2)..(493): Homolog of NCBI NO: 15222734 NR Description: glycosyl hydrolase family 1; protein id: supported by cDNA: 125606., supported by cDNA: gi_15028208
  misc_feature (26)..(493): Homolog of NCBI NO: 21537259 NR Description: beta-glucosidase, putative [Arabidopsis thaliana]
  misc_feature (26)..(489): Homolog of NCBI NO: 38344468 NR Description: OSJNBa0022H21.3 [Oryza sativa (japonica
  misc_feature (25)..(519): Homolog of NCBI NO: 7435445 NR Description: beta-glucosidase (EC 3.2.1.21) precursor isoform
  misc_feature (25)..(519): Homolog of NCBI NO: 15778634 NR Description: amygdalin hydrolase isoform AH I precursor
MRLVLVLFPFFVVFFVPLDHVSSESISRANFPDGFVFGTASSAYQFEGAVKEGNKGESIWDTFTKEKPGKILDFSNADTTVDQYHRFHNDIDLMKDLRMDAYRFSISWSRIFPNGTGEVNPDGVKYYNSLIDALLAKGIKPYVTLYHWDLPQALEDRYEGWLSREVVDDFEHYAFTCFKAFGDRVKYWITFNEPHGVSIQGYDTGIQAPGRCSLLGHWFCKKGKSSVEPYIVAHNILLSHAAAYHTYQRNFKEKQRGQIGISLDAKWYEPMSDCDEDKDAARRAMDFGLGWFMDPLINGDYPASMKSLVEERLPKITPEMYKTIKGAFDYVGINHYTTLYARNDRTRIRKLILQDASSDSAVITSWSSWLHIVPWGIRKLAVYVKDIYGNPPVFITENGMDEKNSPFIDMEKALKDDKRIGFHRDYLSNLSAAIRNDECDVRGYFVWSLLDNWEWNSGYTVRFGIYYVDYKNNLTRIPKASARWFQTILSGSSSTSDSSKLILLEEATEQQQEYKFQEK

SEQ ID NO: 90689 - protein, 426 aa, Arabidopsis thaliana
  peptide (1)..(426): Ceres Seq. ID no. 12724858
  misc_feature (1)..(426): Homolog of NCBI NO: 22327832 NR Description: glycosyl hydrolase family 1; protein id:
  misc_feature (1)..(426): Homolog of NCBI NO: 9758949 NR Description: beta-glucosidase [Arabidopsis thaliana]
  misc_feature (1)..(306): Homolog of NCBI NO: 37532728 NR Description: putative beta-glucosidase [Oryza sativa (japonica
  misc_feature (274)..(400): Homolog of NCBI NO: 37532728 NR Description: putative beta-glucosidase [Oryza sativa (japonica
  misc_feature (1)..(396): Homolog of NCBI NO: 22658440 NR Description: beta-glucosidase [Oryza sativa (japonica
  misc_feature (1)..(400): Homolog of NCBI NO: 15222734 NR Description: glycosyl hydrolase family 1; protein id: supported by cDNA: 125606., supported by cDNA: gi_15028208
  misc_feature (1)..(400): Homolog of NCBI NO: 21537259 NR Description: beta-glucosidase, putative [Arabidopsis thaliana]
  misc_feature (1)..(396): Homolog of NCBI NO: 38344468 NR Description: OSJNBa0022H21.3 [Oryza sativa (japonica
  misc_feature (1)..(426): Homolog of NCBI NO: 7435445 NR Description: beta-glucosidase (EC 3.2.1.21) precursor isoform
  misc_feature (1)..(426): Homolog of NCBI NO: 16757966 NR Description: amygdalin hydrolase isoform AH I precursor
MKDLRMDAYRFSISWSRIFPNGTGEVNPDGVKYYNSLIDALLAKGIKPYVTLYHWDLPQALEDRYEGWLSREVVDDFEHYAFTCFKAFGDRVKYWITFNEPHGVSIQGYDTGIQAPGRCSLLGHWFCKKGKSSVEPYIVAHNILLSHAAAYHTYQRNFKEKQRGQIGISLDAKWYEPMSDCDEDKDAARRAMDFGLGWFMDPLINGDYPASMKSLVEERLPKITPEMYKTIKGAFDYVGINHYTTLYARNDRTRIRKLILQDASSDSAVITSWSSWLHIVPWGIRKLAVYVKDIYGNPPVFITENGMDEKNSPFIDMEKALKDDKRIGFHRDYLSNLSAAIRNDECDVRGYFVWSLLDNWEWNSGYTVRFGIYYVDYKNNLTRIPKASARWFQTILSGSSSTSDSSKLILLEEATEQQQEYKFQEK

SEQ ID NO: 90690 - DNA, 1721 bp, Arabidopsis thaliana
  misc_feature (1)..(1721): Ceres Seq. ID no. 12724862
  misc_feature: MA Experiment ID: 20000173 Result: Down-regulated in Transcription
  misc_feature: MA Experiment 20000173 PARAMETER Experiment Name: At_42deg_Heat_P Parameter: Age (day) Value: 14
  misc_feature: MA Experiment 20000173 PARAMETER Experiment Name: At_42deg_Heat_P Parameter: Organism Value: A. thaliana
  misc_feature: MA Experiment 20000173 PARAMETER Experiment Name: At_42deg_Heat_P Parameter: Plant Line Value: WS
  misc_feature: MA Experiment 20000173 PARAMETER Experiment Name: At_42deg_Heat_P Parameter: Temperature (deg C) Value: 42 vs. 22
  misc_feature: MA Experiment 20000173 PARAMETER Experiment Name: At_42deg_Heat_P Parameter: Timepoint (hr) Value: 6
  misc_feature: MA Experiment 20000173 PARAMETER Experiment Name: At_42deg_Heat_P Parameter: Tissue Value: Aerial
  misc_feature: MA Experiment ID: 20000179 Result: Up-regulated in Transcription
  misc_feature: MA Experiment 20000179 PARAMETER Experiment Name: At_Germinating_Seeds_P Parameter: Age (hr) Value: 6 vs. 0
  misc_feature: MA Experiment 20000179 PARAMETER Experiment Name: At_Germinating_Seeds_P Parameter: Tissue Value: Germinating Seeds
  misc_feature: MA Experiment ID: 20000185 Result: Up-regulated in Transcription
  misc_feature: MA Experiment 20000185 PARAMETER Experiment Name: At_Roots__P Parameter: Age (day) Value: 7 vs. 21
  misc_feature: MA Experiment 20000185 PARAMETER Experiment Name: At_Roots__P Parameter: Organism Value: A. thaliana
  misc_feature: MA Experiment 20000185 PARAMETER Experiment Name: At_Roots__P Parameter: Tissue Value: Roots vs. Whole Plant
  misc_feature: MA Experiment ID: 20000234 Result: Up-regulated in Transcription
  misc_feature: MA Experiment 20000234 PARAMETER Experiment Name: At_Siliques_P Parameter: Age (day) Value: 21
  misc_feature: MA Experiment 20000234 PARAMETER Experiment Name: At_Siliques_P Parameter: Organism Value: A. thaliana
  misc_feature: MA Experiment 20000234 PARAMETER Experiment Name: At_Siliques_P Parameter: Plant Line Value: WS
  misc_feature: MA Experiment 20000234 PARAMETER Experiment Name: At_Siliques_P Parameter: Tissue Value: Less Than 5mm Siliques vs. Whole Plant
  misc_feature: MA Experiment ID: 20000437 Result: Down-regulated in Transcription
  misc_feature: MA Experiment 20000437 PARAMETER Experiment Name: At_Drought_P Parameter: Age (day) Value: 8
  misc_feature: MA Experiment 20000437 PARAMETER Experiment Name: At_Drought_P Parameter: Organism Value: A. thaliana
  misc_feature: MA Experiment 20000437 PARAMETER Experiment Name: At_Drought_P Parameter: Plant Line Value: WS
  misc_feature: MA Experiment 20000437 PARAMETER Experiment Name: At_Drought_P Parameter: Timepoint (hr) Value: 24
  misc_feature: MA Experiment 20000437 PARAMETER Experiment Name: At_Drought_P Parameter: Tissue Value: Whole Plant
  misc_feature: MA Experiment 20000437 PARAMETER Experiment Name: At_Drought_P Parameter: Treatment Value: Drought vs. No Drought
  misc_feature: MA Experiment ID: 20000573 Result: Down-regulated in Transcription
  misc_feature: MA Experiment 20000573 PARAMETER Experiment Name: At_100uM_ABA_Mutants__P Parameter: Organism Value: A. thaliana
  misc_feature: MA Experiment 20000573 PARAMETER Experiment Name: At_100uM_ABA_Mutants__P Parameter: Plant Line Value: CS22 vs. Ler wt
  misc_feature: MA Experiment 20000573 PARAMETER Experiment Name: At_100uM_ABA_Mutants__P Parameter: Timepoint (hr) Value: N/A
  misc_feature: MA Experiment 20000573 PARAMETER Experiment Name: At_100uM_ABA_Mutants__P Parameter: Tissue Value: Whole Plant
  misc_feature: MA Experiment 20000573 PARAMETER Experiment Name: At_100uM_ABA_Mutants__P Parameter: Treatment Value: None
  misc_feature: MA Experiment ID: 20000574 Result: Down-regulated in Transcription
  misc_feature: MA Experiment 20000574 PARAMETER Experiment Name: At_100uM_ABA_Mutants__P Parameter: Organism Value: A. thaliana
  misc_feature: MA Experiment 20000574 PARAMETER Experiment Name: At_100uM_ABA_Mutants__P Parameter: Plant Line Value: CS23 vs. Ler wt
  misc_feature: MA Experiment 20000574 PARAMETER Experiment Name: At_100uM_ABA_Mutants__P Parameter: Timepoint (hr) Value: N/A
  misc_feature: MA Experiment 20000574 PARAMETER Experiment Name: At_100uM_ABA_Mutants__P Parameter: Tissue Value: Whole Plant
  misc_feature: MA Experiment 20000574 PARAMETER Experiment Name: At_100uM_ABA_Mutants__P Parameter: Treatment Value: None
  misc_feature: MA Experiment ID: 20001911 Result: Down-regulated in Transcription
  misc_feature: MA Experiment 20001911 PARAMETER Experiment Name: At_Drought_Reproduction_P Parameter: Age (day) Value: 40
  misc_feature: MA Experiment 20001911 PARAMETER Experiment Name: At_Drought_Reproduction_P Parameter: Organism Value: A. thaliana
  misc_feature: MA Experiment 20001911 PARAMETER Experiment Name: At_Drought_Reproduction_P Parameter: Plant Line Value: WS
  misc_feature: MA Experiment 20001911 PARAMETER Experiment Name: At_Drought_Reproduction_P Parameter: Timepoint (day) Value: 10
  misc_feature: MA Experiment 20001911 PARAMETER Experiment Name: At_Drought_Reproduction_P Parameter: Tissue Value: Flowers
  misc_feature: MA Experiment 20001911 PARAMETER Experiment Name: At_Drought_Reproduction_P Parameter: Treatment Value: Drought vs. No Drought
actattctttggattcttttctctgtaatcaaagcaaagctctgcaaaaatatttctctccttttctcttcaaaactttccttttttatgattcatctgctaaaatgcaccaattttctataatccttcacatttctccagagacgtctaaagaagcttgaaaccattattagagtatttgacaatggaaggagaatccaaaggattaatcgttgggatctcactaggtttggtgattggtgttgtcttagctatctcagctttgttctgctttaggtatcatagaaaaaagtctcagattgtgaatagtggatcacgaagaagtgcaaccattcccatcagagagaatggagctgattcgtgtaatataatgtcggattcgaccattggtccggattcacctgtgaaatcttctaagaatgggaggtctgtttggcttgaagggtttagtaagaggagtaatgtcatctctgcttctggcattttggaatattcttacagggatttgcagaaagcgacgtgtaatttcacgactttgataggccaaggagcatttggacctgtctacaaagctcaaatgtctactggtgagatcgtggctgtgaaagttctagccactgattctaaacagggcgaaaaagagtttcagacagaggttatgttattgggaaggttgcatcaccgtaacctagtgaacttgattggatactgtgcagagaaaggccaacacatgcttatatatgtttacatgagtaaaggaagcttagcttctcatttatacagcgaaaaacatgaaccgctgagctgggatttgagagtatatattgctttagacgtggcacgtggtctagagtatcttcatgatggggtaagctgcttgctaaaaccattcaccattttaatgcatctcttaaacaacaacttcaaaactcatgttctaatcaattgttccaggctgttcctcctgtaatccacagagatatcaaatcttccaacatcttgctggatcaatctatgagagctcgggttgctgactttggcctctccagagaagaaatggtagacaaacatgcagctaacatcagaggaacatttggctacctcgatcccgaatacatttcaacaagaacattcaccaagaaaagcgatgtctatggcttcggagttttgcttttcgagcttatagcaggaagaaatcctcaacaaggtctaatggaattggttgagctggcggctatgaatgcagaggaaaaagtcggatgggaagagatagtagattcaagattagatgggagatatgatttacaagaagtgaatgaagtagcagcttttgcttacaaatgcatctctcgtgcacctagaaaacgtcctaacatgagggacattgttcaggttttgactcgtgttattaaagtgagacattgcagaaagcggcagaagaattctccgtcgccgtctccacggcttcctcctcctcctccgatagtggaggagtcagaaggtgagttaactgcaaacggatcattacgatcagaaattcatcggagggataattccttggacagtagtatagctgaagacgtgattttgtaaacaaaatgaaaaaaaagtctcaatttttttaattattattaacttttaaaatgtgattttgtttttcaattcttttgggtttttagacgctagattgtctatatttgtgaatgaaaatttgttctttg

SEQ ID NO: 90691 - protein, 261 aa, Arabidopsis thaliana
  peptide (1)..(261): Ceres Seq. ID no. 12724863
  misc_feature (1)..(228): Homolog of NCBI NO: 30696480 NR Description: protein kinase family [Arabidopsis thaliana]
  misc_feature (1)..(228): Homolog of NCBI NO: 38636770 NR Description: putative serine/threonine-specific protein kinase
  misc_feature (1)..(261): Homolog of NCBI NO: 30696478 NR Description: protein kinase family [Arabidopsis thaliana]
  misc_feature (63)..(261): Homolog of NCBI NO: 15912249 NR Description: AT5g54590/MRB17_9 [Arabidopsis thaliana]
  misc_feature (8)..(228): Homolog of NCBI NO: 1076634 NR Description: serine/threonine-specific protein kinase NPK15
  misc_feature (1)..(228): Homolog of NCBI NO: 11358843 NR Description: serine/threonine-specific protein kinase-like
  misc_feature (1)..(228): Homolog of NCBI NO: 18417765 NR Description: serine/threonine-specific protein kinase-like protein id: At5g15730.1, supported by cDNA: 25636. [Arabidopsis
  misc_feature (103)..(226): Homolog of NCBI NO: 38345516 NR Description: OSJNBa0039K24.19 [Oryza sativa (japonica
  misc_feature (60)..(246): Homolog of NCBI NO: 8778594 NR Description: F5M15.3 [Arabidopsis thaliana]
  misc_feature (29)..(227): Homolog of NCBI NO: 18397825 NR Description: putative protein kinase; protein id: At3g07070.1 thaliana] >gi|6642658|gb|AAF20239.1|AC012395_26 putative protein
MEGESKGLIVGISLGLVIGVVLAISALFCFRYHRKKSQIVNSGSRRSATIPIRENGADSCNIMSDSTIGPDSPVKSSKNGRSVWLEGFSKRSNVISASGILEYSYRDLQKATCNFTTLIGQGAFGPVYKAQMSTGEIVAVKVLATDSKQGEKEFQTEVMLLGRLHHRNLVNLIGYCAEKGQHMLIYVYMSKGSLASHLYSEKHEPLSWDLRVYIALDVARGLEYLHDGVSCLLKPFTILMHLLNNNFKTHVLINCSRLFLL

SEQ ID NO: 90692 - protein, 199 aa, Arabidopsis thaliana
  peptide (1)..(199): Ceres Seq. ID no. 12724864
  misc_feature (1)..(166): Homolog of NCBI NO: 30696480 NR Description: protein kinase family [Arabidopsis thaliana]
  misc_feature (1)..(166): Homolog of NCBI NO: 38636770 NR Description: putative serine/threonine-specific protein kinase
  misc_feature (1)..(199): Homolog of NCBI NO: 30696478 NR Description: protein kinase family [Arabidopsis thaliana]
  misc_feature (1)..(199): Homolog of NCBI NO: 15912249 NR Description: AT5g54590/MRB17_9 [Arabidopsis thaliana]
  misc_feature (1)..(166): Homolog of NCBI NO: 1076634 NR Description: serine/threonine-specific protein kinase NPK15
  misc_feature (1)..(166): Homolog of NCBI NO: 11358843 NR Description: serine/threonine-specific protein kinase-like
  misc_feature (1)..(166): Homolog of NCBI NO: 18417765 NR Description: serine/threonine-specific protein kinase-like protein id: At5g15730.1, supported by cDNA: 25636. [Arabidopsis
  misc_feature (41)..(164): Homolog of NCBI NO: 38345516 NR Description: OSJNBa0039K24.19 [Oryza sativa (japonica
  misc_feature (1)..(184): Homolog of NCBI NO: 8778594 NR Description: F5M15.3 [Arabidopsis thaliana]
  misc_feature (1)..(165): Homolog of NCBI NO: 18397825 NR Description: putative protein kinase; protein id: At3g07070.1 thaliana] >gi|6642658|gb|AAF20239.1|AC012395_26 putative protein
MSDSTIGPDSPVKSSKNGRSVWLEGFSKRSNVISASGILEYSYRDLQKATCNFTTLIGQGAFGPVYKAQMSTGEIVAVKVLATDSKQGEKEFQTEVMLLGRLHHRNLVNLIGYCAEKGQHMLIYVYMSKGSLASHLYSEKHEPLSWDLRVYIALDVARGLEYLHDGVSCLLKPFTILMHLLNNNFKTHVLINCSRLFLL

SEQ ID NO: 90693 - protein, 192 aa, Arabidopsis thaliana
  peptide (1)..(192): Ceres Seq. ID no. 12724865
  misc_feature (1)..(192): Homolog of NCBI NO: 30696480 NR Description: protein kinase family [Arabidopsis thaliana]
  misc_feature (1)..(174): Homolog of NCBI NO: 38636770 NR Description: putative serine/threonine-specific protein kinase
  misc_feature (1)..(131): Homolog of NCBI NO: 1076634 NR Description: serine/threonine-specific protein kinase NPK15
  misc_feature (1)..(148): Homolog of NCBI NO: 11358843 NR Description: serine/threonine-specific protein kinase-like
  misc_feature (1)..(148): Homolog of NCBI NO: 18417765 NR Description: serine/threonine-specific protein kinase-like protein id: At5g15730.1, supported by cDNA: 25636. [Arabidopsis
  misc_feature (1)..(129): Homolog of NCBI NO: 38345516 NR Description: OSJNBa0039K24.19 [Oryza sativa (japonica
  misc_feature (1)..(155): Homolog of NCBI NO: 8778594 NR Description: F5M15.3 [Arabidopsis thaliana]
  misc_feature (1)..(128): Homolog of NCBI NO: 18397825 NR Description: putative protein kinase; protein id: At3g07070.1 thaliana] >gi|6642658|gb|AAF20239.1|AC012395_26 putative protein
  misc_feature (1)..(128): Homolog of NCBI NO: 28416685 NR Description: At3g07070 [Arabidopsis thaliana]
  misc_feature (1)..(129): Homolog of NCBI NO: 11994661 NR Description: receptor protein kinase-like protein [Arabidopsis
MRARVADFGLSREEMVDKHAANIRGTFGYLDPEYISTRTFTKKSDVYGFGVLLFELIAGRNPQQGLMELVELAAMNAEEKVGWEEIVDSRLDGRYDLQEVNEVAAFAYKCISRAPRKRPNMRDIVQVLTRVIKVRHCRKRQKNSPSPSPRLPPPPPIVEESEGELTANGSLRSEIHRRDNSLDSSIAEDVIL

SEQ ID NO: 90694 - DNA, 2794 bp, Arabidopsis thaliana
  misc_feature (1)..(2794): Ceres Seq. ID no. 12724878
  misc_feature: MA Experiment ID: 20000185 Result: Up-regulated in Transcription
  misc_feature: MA Experiment 20000185 PARAMETER Experiment Name: At_Roots__P Parameter: Age (day) Value: 7 vs. 21
  misc_feature: MA Experiment 20000185 PARAMETER Experiment Name: At_Roots__P Parameter: Organism Value: A. thaliana
  misc_feature: MA Experiment 20000185 PARAMETER Experiment Name: At_Roots__P Parameter: Tissue Value: Roots vs. Whole Plant
  misc_feature: MA Experiment ID: 20000235 Result: Up-regulated in Transcription
  misc_feature: MA Experiment 20000235 PARAMETER Experiment Name: At_Siliques_P Parameter: Age (day) Value: 21
  misc_feature: MA Experiment 20000235 PARAMETER Experiment Name: At_Siliques_P Parameter: Organism Value: A. thaliana
  misc_feature: MA Experiment 20000235 PARAMETER Experiment Name: At_Siliques_P Parameter: Plant Line Value: WS
  misc_feature: MA Experiment 20000235 PARAMETER Experiment Name: At_Siliques_P Parameter: Tissue Value: 5-10mm Siliques vs. Whole Plant
  misc_feature: MA Experiment ID: 20000264 Result: Up-regulated in Transcription
  misc_feature: MA Experiment 20000264 PARAMETER Experiment Name: At_Open_Flower_P Parameter: Age (day) Value: 21
  misc_feature: MA Experiment 20000264 PARAMETER Experiment Name: At_Open_Flower_P Parameter: Plant Line Value: WS
  misc_feature: MA Experiment 20000264 PARAMETER Experiment Name: At_Open_Flower_P Parameter: Tissue Value: Open Flower vs. Whole Plant
  misc_feature: MA Experiment ID: 20000265 Result: Up-regulated in Transcription
  misc_feature: MA Experiment 20000265 PARAMETER Experiment Name: At_Open_Flower_P Parameter: Age (day) Value: 21
  misc_feature: MA Experiment 20000265 PARAMETER Experiment Name: At_Open_Flower_P Parameter: Plant Line Value: WS
  misc_feature: MA Experiment 20000265 PARAMETER Experiment Name: At_Open_Flower_P Parameter: Tissue Value: Closed Flower vs. Whole Plant
  misc_feature: MA Experiment ID: 20000495 Result: Up-regulated in Transcription
  misc_feature: MA Experiment 20000495 PARAMETER Experiment Name: At_Guard_Cells_P Parameter: Harvest Date Value: 8/2/2002
  misc_feature: MA Experiment 20000495 PARAMETER Experiment Name: At_Guard_Cells_P Parameter: Organism Value: A. thaliana
  misc_feature: MA Experiment 20000495 PARAMETER Experiment Name: At_Guard_Cells_P Parameter: Tissue Value: Guard Cells vs. Leaves
gaaacgtgcctccatttctaaaacccaaatccttcttcgtacaaacgacacaatctctcttaaatgccaaaggtcctctttttcgtcttcttccactctctctatacttctctcacaaatctgggcatgttttgaaatccacattcttcattcactgagtttcctttacctcttaaagtttcaatctttagattgagagagaaatttgaagtaatttaaggtaacaagaagagaacaattttgttctgttatggtgggggcgatggcaaacaatggaagaatccggtcagcttttccggtgactaatgggtcaaaagatctgacgccgaacagtgctccggcgagtacaaccggatctgaatatggtcctgttgagttcacaagagaagacgttgaaactcttcttaatgaacgaatcaagtacaagagcaaattcaactacaaggagagatgcgagaatatgatggattatataaaaagacttagactttgcattagatggtttcaagaacttgagttggattatgcttttgagcaagagaagttgaagaacgcattggaattgaatgagaagcattgtgttgacatggaggttagtttgaaaaacaaagaagaggagctgaatatgataattgaagagctgaggaaaaactttgaatctgttcaagttcaacttgccagggaacaaacggagaagttggcggcgaatgattctcttggaaaagagaaagaagcaagactttctgttgaaaaggcacaagctggtctcacagaagagctaggaaaagcacaaggagatcttcaaacggctaaccagaggatacaatccgtgaatgacatgtacaaactgttgcaagagtataactcaagcttgcagctgtataacagcaagctacaaggtgatcttgatgaagctcacgagactataaaacgcggtgagaaagaacggactgccattattgaaaatattggcaacttgaagggtcagttttcagcattacaggaacaacttgctgcttctaaggcttctcaagaagatatcatgaagcagaaaggtgaattggtaaatgaaattgcgagtctcaaggtagagcttcagcaagtcaaagatgaccgtgatcgccatttagtggaagttaaaaccttacaaaccgaggcaaccaagtacaatgacttcaaagacgccataaccgagcttgagactacatgttcgtcccagagtacccagatacgacagttgcaggatcgactagtaaactctgagaggagactgcaggtgtctgatctatctacctttgagaaaatgaatgagtatgaagaccagaagcaaagcattatcgatctgaaaagtcgcgtagaagaagcagaacttaaactcgttgaaggagaaaaactacggaagaagttgcacaataccattcttgaactgaaaggtaacatacgtgtgttctgtagagttagacctctattgccgggtgagaacaatggagatgagggaaaaactatttcttacccgacatccctagaagcacttggccgtggtattgacttgatgcaaaatgcgcaaaagcatgctttcacatttgataaggtttttgcgccgactgcatcacaagaagatgtcttcactgagatttctcaacttgttcaaagtgctctcgatggttacaaggtgtgcatttttgcatatggacaaactggatcgggaaaaacttacaccatgatgggtaggccaggaaacgtcgaggaaaaaggtctgatcccgcgatgtttggagcaaatatttgagacgaggcagtctcttcgatctcagggttggaaatacgaactgcaggtatccatgttagaaatatacaatgaaacgatccgagatctcctgtcaacaaacaaagaagcagtaagaacagacagtggtgtttctccacagaaacatgctattaaacatgatgctagtggaaacacgcatgtcgctgagcttactattttggatgttaaaagctctcgggaggtttcattcctcttagatcatgctgctcgtaacaggtctgtagggaagactcagatgaacgagcaatcttccagaagccattttgttttcacgctaagaatctctggtgttaacgagagcactgagcaacaagtacaaggtgtcttgaacctgattgatcttgcggggagtgagcgtttatcgaagagtggatcaaccggagatagacttaaagaaactcaagcaatcaacaaaagtttgtcgtcgctaggcgatgtcatattcgccttagcaaagaaagaagatcatgtaccattccgaaactcaaagctcacatatcttctccagccttgcttaggcggtgacgcaaagacgctaatgtttgtgaacattgcaccggaatcttcttcaaccggtgagtctctctgctctcttagattcgcagcgagagtgaatgcttgcgagattggaacaccacgtaggcagactaacatcaaaccattggaaaatcggttgagccttggatgagggaaagaaaagagagatggatttgaagtttgaagctaaaagcttcatttcaaagttaattatatgaatgtacttaatatggtcacaacttgatgaagaaggatgggatgattctaacaagaaaacatgaagaccttttgttgtaatttgtatagtttggtttagcattttattatctgttgtttatgtaattctttttcttttggatcataagtaggattttgcttgttgatgttcggattcatattcatcttctgggattcaaaatatttacttctc

SEQ ID NO: 90695 - protein, 754 aa, Arabidopsis thaliana
  peptide (1)..(754): Ceres Seq. ID no. 12724879
  misc_feature (83)..(376): Pfam Name: Myosin tail Pfam Description: Myosin tail
  misc_feature (27)..(754): Homolog of NCBI NO: 25295723 NR Description: kinesin-like protein [imported] - Arabidopsis
  misc_feature (27)..(754): Homolog of NCBI NO: 30680014 NR Description: kinesin-like protein A, putative [Arabidopsis
  misc_feature (27)..(754): Homolog of NCBI NO: 34849893 NR Description: At4g05190 [Arabidopsis thaliana]
  misc_feature (2)..(754): Homolog of NCBI NO: 15233583 NR Description: kinesin-like protein A (katA); protein id:
  misc_feature (27)..(729): Homolog of NCBI NO: 39546247 NR Description: OSJNBa0089N06.17 [Oryza sativa (japonica
  misc_feature (89)..(747): Homolog of NCBI NO: 34915504 NR Description: putative kinesin-related protein katA [Oryza
  misc_feature (350)..(747): Homolog of NCBI NO: 33354214 NR Description: kinesin-related protein KLPA-like protein [Oryza
  misc_feature (392)..(742): Homolog of NCBI NO: 15208457 NR Description: kinesin heavy chain [Zea mays]
  misc_feature (466)..(738): Homolog of NCBI NO: 15208463 NR Description: kinesin heavy chain [Zea mays]
  misc_feature (191)..(741): Homolog of NCBI NO: 3133267 NR Description: kinesin-related protein K2 [Dictyostelium
MVGAMANNGRIRSAFPVTNGSKDLTPNSAPASTTGSEYGPVEFTREDVETLLNERIKYKSKFNYKERCENMMDYIKRLRLCIRWFQELELDYAFEQEKLKNALELNEKHCVDMEVSLKNKEEELNMIIEELRKNFESVQVQLAREQTEKLAANDSLGKEKEARLSVEKAQAGLTEELGKAQGDLQTANQRIQSVNDMYKLLQEYNSSLQLYNSKLQGDLDEAHETIKRGEKERTAIIENIGNLKGQFSALQEQLAASKASQEDIMKQKGELVNEIASLKVELQQVKDDRDRHLVEVKTLQTEATKYNDFKDAITELETTCSSQSTQIRQLQDRLVNSERRLQVSDLSTFEKMNEYEDQKQSIIDLKSRVEEAELKLVEGEKLRKKLHNTILELKGNIRVFCRVRPLLPGENNGDEGKTISYPTSLEALGRGIDLMQNAQKHAFTFDKVFAPTASQEDVFTEISQLVQSALDGYKVCIFAYGQTGSGKTYTMMGRPGNVEEKGLIPRCLEQIFETRQSLRSQGWKYELQVSMLEIYNETIRDLLSTNKEAVRTDSGVSPQKHAIKHDASGNTHVAELTILDVKSSREVSFLLDHAARNRSVGKTQMNEQSSRSHFVFTLRISGVNESTEQQVQGVLNLIDLAGSERLSKSGSTGDRLKETQAINKSLSSLGDVIFALAKKEDHVPFRNSKLTYLLQPCLGGDAKTLMFVNIAPESSSTGESLCSLRFAARVNACEIGTPRRQTNIKPLENRLSLG

SEQ ID NO: 90696 - protein, 750 aa, Arabidopsis thaliana
  peptide (1)..(750): Ceres Seq. ID no. 12724880
  misc_feature (79)..(372): Pfam Name: Myosin tail Pfam Description: Myosin tail
  misc_feature (23)..(750): Homolog of NCBI NO: 25295723 NR Description: kinesin-like protein [imported] - Arabidopsis
  misc_feature (23)..(750): Homolog of NCBI NO: 30680014 NR Description: kinesin-like protein A, putative [Arabidopsis
  misc_feature (23)..(750): Homolog of NCBI NO: 34849893 NR Description: At4g05190 [Arabidopsis thaliana]
  misc_feature (1)..(750): Homolog of NCBI NO: 15233583 NR Description: kinesin-like protein A (katA); protein id:
  misc_feature (23)..(725): Homolog of NCBI NO: 39546247 NR Description: OSJNBa0089N06.17 [Oryza sativa (japonica
  misc_feature (85)..(743): Homolog of NCBI NO: 34915504 NR Description: putative kinesin-related protein katA [Oryza
  misc_feature (346)..(743): Homolog of NCBI NO: 33354214 NR Description: kinesin-related protein KLPA-like protein [Oryza
  misc_feature (388)..(738): Homolog of NCBI NO: 15208457 NR Description: kinesin heavy chain [Zea mays]
  misc_feature (462)..(734): Homolog of NCBI NO: 15208463 NR Description: kinesin heavy chain [Zea mays]
  misc_feature (187)..(737): Homolog of NCBI NO: 3133267 NR Description: kinesin-related protein K2 [Dictyostelium
MANNGRIRSAFPVTNGSKDLTPNSAPASTTGSEYGPVEFTREDVETLLNERIKYKSKFNYKERCENMMDYIKRLRLCIRWFQELELDYAFEQEKLKNALELNEKHCVDMEVSLKNKEEELNMIIEELRKNFESVQVQLAREQTEKLAANDSLGKEKEARLSVEKAQAGLTEELGKAQGDLQTANQRIQSVNDMYKLLQEYNSSLQLYNSKLQGDLDEAHETIKRGEKERTAIIENIGNLKGQFSALQEQLAASKASQEDIMKQKGELVNEIASLKVELQQVKDDRDRHLVEVKTLQTEATKYNDFKDAITELETTCSSQSTQIRQLQDRLVNSERRLQVSDLSTFEKMNEYEDQKQSIIDLKSRVEEAELKLVEGEKLRKKLHNTILELKGNIRVFCRVRPLLPGENNGDEGKTISYPTSLEALGRGIDLMQNAQKHAFTFDKVFAPTASQEDVFTEISQLVQSALDGYKVCIFAYGQTGSGKTYTMMGRPGNVEEKGLIPRCLEQIFETRQSLRSQGWKYELQVSMLEIYNETIRDLLSTNKEAVRTDSGVSPQKHAIKHDASGNTHVAELTILDVKSSREVSFLLDHAARNRSVGKTQMNEQSSRSHFVFTLRISGVNESTEQQVQGVLNLIDLAGSERLSKSGSTGDRLKETQAINKSLSSLGDVIFALAKKEDHVPFRNSKLTYLLQPCLGGDAKTLMFVNIAPESSSTGESLCSLRFAARVNACEIGTPRRQTNIKPLENRLSLG

SEQ ID NO: 90697 - protein, 684 aa, Arabidopsis thaliana
  peptide (1)..(684): Ceres Seq. ID no. 12724881
  misc_feature (13)..(306): Pfam Name: Myosin tail Pfam Description: Myosin tail
  misc_feature (1)..(684): Homolog of NCBI NO: 25295723 NR Description: kinesin-like protein [imported] - Arabidopsis
  misc_feature (1)..(684): Homolog of NCBI NO: 30680014 NR Description: kinesin-like protein A, putative [Arabidopsis
  misc_feature (1)..(684): Homolog of NCBI NO: 34849893 NR Description: At4g05190 [Arabidopsis thaliana]
  misc_feature (1)..(684): Homolog of NCBI NO: 15233583 NR Description: kinesin-like protein A (katA); protein id:
  misc_feature (1)..(659): Homolog of NCBI NO: 39546247 NR Description: OSJNBa0089N06.17 [Oryza sativa (japonica
  misc_feature (19)..(677): Homolog of NCBI NO: 34915504 NR Description: putative kinesin-related protein katA [Oryza
  misc_feature (280)..(677): Homolog of NCBI NO: 33354214 NR Description: kinesin-related protein KLPA-like protein [Oryza
  misc_feature (322)..(672): Homolog of NCBI NO: 15208457 NR Description: kinesin heavy chain [Zea mays]
  misc_feature (396)..(668): Homolog of NCBI NO: 15208463 NR Description: kinesin heavy chain [Zea mays]
  misc_feature (121)..(671): Homolog of NCBI NO: 3133267 NR Description: kinesin-related protein K2 [Dictyostelium
MMDYIKRLRLCIRWFQELELDYAFEQEKLKNALELNEKHCVDMEVSLKNKEEELNMIIEELRKNFESVQVQLAREQTEKLAANDSLGKEKEARLSVEKAQAGLTEELGKAQGDLQTANQRIQSVNDMYKLLQEYNSSLQLYNSKLQGDLDEAHETIKRGEKERTAIIENIGNLKGQFSALQEQLAASKASQEDIMKQKGELVNEIASLKVELQQVKDDRDRHLVEVKTLQTEATKYNDFKDAITELETTCSSQSTQIRQLQDRLVNSERRLQVSDLSTFEKMNEYEDQKQSIIDLKSRVEEAELKLVEGEKLRKKLHNTILELKGNIRVFCRVRPLLPGENNGDEGKTISYPTSLEALGRGIDLMQNAQKHAFTFDKVFAPTASQEDVFTEISQLVQSALDGYKVCIFAYGQTGSGKTYTMMGRPGNVEEKGLIPRCLEQIFETRQSLRSQGWKYELQVSMLEIYNETIRDLLSTNKEAVRTDSGVSPQKHAIKHDASGNTHVAELTILDVKSSREVSFLLDHAARNRSVGKTQMNEQSSRSHFVFTLRISGVNESTEQQVQGVLNLIDLAGSERLSKSGSTGDRLKETQAINKSLSSLGDVIFALAKKEDHVPFRNSKLTYLLQPCLGGDAKTLMFVNIAPESSSTGESLCSLRFAARVNACEIGTPRRQTNIKPLENRLSLG

SEQ ID NO: 90698 - DNA, 1721 bp, Arabidopsis thaliana
  misc_feature (1)..(1721): Ceres Seq. ID no. 12724914
  misc_feature: MA Experiment ID: 20000171 Result: Up-regulated in Transcription
  misc_feature: MA Experiment 20000171 PARAMETER Experiment Name: At_42deg_Heat_P Parameter: Age (day) Value: 14
  misc_feature: MA Experiment 20000171 PARAMETER Experiment Name: At_42deg_Heat_P Parameter: Organism Value: A. thaliana
  misc_feature: MA Experiment 20000171 PARAMETER Experiment Name: At_42deg_Heat_P Parameter: Plant Line Value: WS
  misc_feature: MA Experiment 20000171 PARAMETER Experiment Name: At_42deg_Heat_P Parameter: Temperature (deg C) Value: 42 vs. 22
  misc_feature: MA Experiment 20000171 PARAMETER Experiment Name: At_42deg_Heat_P Parameter: Timepoint (hr) Value: 1
  misc_feature: MA Experiment 20000171 PARAMETER Experiment Name: At_42deg_Heat_P Parameter: Tissue Value: Aerial
  misc_feature: MA Experiment ID: 20000182 Result: Up-regulated in Transcription
  misc_feature: MA Experiment 20000182 PARAMETER Experiment Name: At_2mM_SA_P Parameter: Age (day) Value: 14
  misc_feature: MA Experiment 20000182 PARAMETER Experiment Name: At_2mM_SA_P Parameter: Organism Value: A. thaliana
  misc_feature: MA Experiment 20000182 PARAMETER Experiment Name: At_2mM_SA_P Parameter: Plant Line Value: WS
  misc_feature: MA Experiment 20000182 PARAMETER Experiment Name: At_2mM_SA_P Parameter: Timepoint (hr) Value: 6
  misc_feature: MA Experiment 20000182 PARAMETER Experiment Name: At_2mM_SA_P Parameter: Tissue Value: Aerial
  misc_feature: MA Experiment 20000182 PARAMETER Experiment Name: At_2mM_SA_P Parameter: Treatment Value: 2mM SA vs. No Treatment
  misc_feature: MA Experiment ID: 20000264 Result: Down-regulated in Transcription
  misc_feature: MA Experiment 20000264 PARAMETER Experiment Name: At_Open_Flower_P Parameter: Age (day) Value: 21
  misc_feature: MA Experiment 20000264 PARAMETER Experiment Name: At_Open_Flower_P Parameter: Plant Line Value: WS
  misc_feature: MA Experiment 20000264 PARAMETER Experiment Name: At_Open_Flower_P Parameter: Tissue Value: Open Flower vs. Whole Plant
  misc_feature: MA Experiment ID: 20001451 Result: Down-regulated in Transcription
  misc_feature: MA Experiment 20001451 PARAMETER Experiment Name: At_Far-red-induction_P Parameter: Age (day) Value: 7
  misc_feature: MA Experiment 20001451 PARAMETER Experiment Name: At_Far-red-induction_P Parameter: Light Value: Far-red vs. White
  misc_feature: MA Experiment 20001451 PARAMETER Experiment Name: At_Far-red-induction_P Parameter: Organism Value: A. thaliana
  misc_feature: MA Experiment 20001451 PARAMETER Experiment Name: At_Far-red-induction_P Parameter: Plant Line Value: Columbia
  misc_feature: MA Experiment 20001451 PARAMETER Experiment Name: At_Far-red-induction_P Parameter: Timepoint (hr) Value: 24
  misc_feature: MA Experiment 20001451 PARAMETER Experiment Name: At_Far-red-induction_P Parameter: Tissue Value: Whole Plant
  misc_feature: MA Experiment ID: 20001905 Result: Up-regulated in Transcription
  misc_feature: MA Experiment 20001905 PARAMETER Experiment Name: At_Drought_Reproduction_P Parameter: Age (day) Value: 40
  misc_feature: MA Experiment 20001905 PARAMETER Experiment Name: At_Drought_Reproduction_P Parameter: Organism Value: A. thaliana
  misc_feature: MA Experiment 20001905 PARAMETER Experiment Name: At_Drought_Reproduction_P Parameter: Plant Line Value: WS
  misc_feature: MA Experiment 20001905 PARAMETER Experiment Name: At_Drought_Reproduction_P Parameter: Timepoint (day) Value: 10
  misc_feature: MA Experiment 20001905 PARAMETER Experiment Name: At_Drought_Reproduction_P Parameter: Tissue Value: Rosettes
  misc_feature: MA Experiment 20001905 PARAMETER Experiment Name: At_Drought_Reproduction_P Parameter: Treatment Value: Drought vs. No Drought
aagattcttctgatgaaccggagaagataagaaacgtgttttgtctaatttcttgcgattaaggatgatacattggttgaagcagctgcgatcggcgtttggcgtcgcgtttctgtggctcgtttgtctcatttacttcactcagggatttagatcgtttgtgtggacagctgtttcgtaccagctcaaagacaggctacagttatcaccatcagcttctcagtttgtcttttcggttgccttttttccatggagcataaaaccattatatggaatcatttcagattgtataccaattggagggaaaaagaggacgccgtatttggtgatatcgactgtgctctctcttgtgccatggctcgtgcttggtctagattcaacctcgagaagttcaagtctctatctgatgattttcttgactgtacaaaatctaggatcagctatggctgatgttgtgattgatgctatgatagctgaggcagtaagacttgaaaaggcttcgtttgctggagatcttcagtctgtatcatggtttgcaatggctgtgggtggagtatgcggtagtttattaggaggctatgcgttatctaacttgaagatagaaacaatattcctccttttcacggtactaccagcgttacaattactatcatgtgctctcgtcgaagaaagtcctgctaacaatgaaccattgcctgagttgttggattcaaacgagtttgaagagaaaagcttgacgagcaatgataactatccagatacgagtaagtccaatacaagaagaaggaaggggcagaagaaaggtaaaaaaggagattccaacggaaagtctgagacacagaagaagcaatcgaagtctttagcttcacagtggttccagtcactaaaagcagccacttttggtttgggccgtgcgtttaagcaaccgatcattttgagacctatggcatggtttttcattgcacatatcactgtgccaaatctctctaccgtcatgttctattaccaaaccgaggtcttgcaattagacgctgctttcctaggaactgcccgtgttgttggttggttaggtctcatgtttggaacctttatctacaatcgctatctgcaagatatgactctacgcaagtctctcctgtttgctcacatcgggctgtctgtaacgatactcctagatatggttctagtatcaagagctaatgtgggctacggagtttcagacaagacaatggtgctcttcggatcagctctaggtgatgccatcaatcaactcaaattcatgccgttcctgatcttgtctggtcgtctatgtccacctgggattgaaggaacactgtttgcgctgtttatgtcgataaacaacctaggaaacacagttggatcgttcatgggagcaggattggcttcacttctgggaatatcgtcagggtcgtttgacaatatgtttatgggcttagccattcaagtgttttgcacttatatacccgttttgtttcttttcttgattcccaaagaagctacaggagtatcagcatcatagggcagagagcaaagagcaaaggtagtttctcatagaacagttttagatcagaatttttggataacttttttggcatcagtttttgactttctttaaacgcttggaattgactacacatcagacagacactcggtggagatttgttatatatactaaatatatactgcctcatttttctctt

SEQ ID NO: 90699 - protein, 491 aa, Arabidopsis thaliana
  peptide (1)..(491): Ceres Seq. ID no. 12724915
  misc_feature (22)..(490): Pfam Name: BT1 family Pfam Description: BT1 family
  misc_feature (1)..(491): Homolog of NCBI NO: 22327842 NR Description: putative protein; protein id: At5g54860.1, by cDNA: gi_20147214 [Arabidopsis thaliana]
  misc_feature (1)..(491): Homolog of NCBI NO: 9758266 NR Description: contains similarity to integral membrane
  misc_feature (127)..(490): Homolog of NCBI NO: 34904540 NR Description: B1066G12.15 [Oryza sativa (japonica
  misc_feature (281)..(485): Homolog of NCBI NO: 18408153 NR Description: expressed protein; protein id: At1g64890.1, by cDNA: gi_15028136 [Arabidopsis thaliana]
  misc_feature (18)..(212): Homolog of NCBI NO: 18408153 NR Description: expressed protein; protein id: At1g64890.1, by cDNA: gi_15028136 [Arabidopsis thaliana]
  misc_feature (281)..(485): Homolog of NCBI NO: 15028137 NR Description: unknown protein [Arabidopsis thaliana]
  misc_feature (281)..(485): Homolog of NCBI NO: 26449570 NR Description: unknown protein [Arabidopsis thaliana]
  misc_feature (18)..(212): Homolog of NCBI NO: 15028137 NR Description: unknown protein [Arabidopsis thaliana]
  misc_feature (18)..(212): Homolog of NCBI NO: 26449570 NR Description: unknown protein [Arabidopsis thaliana]
  misc_feature (268)..(482): Homolog of NCBI NO: 26450619 NR Description: unknown protein [Arabidopsis thaliana]
MIHWLKQLRSAFGVAFLWLVCLIYFTQGFRSFVWTAVSYQLKDRLQLSPSASQFVFSVAFFPWSIKPLYGIISDCIPIGGKKRTPYLVISTVLSLVPWLVLGLDSTSRSSSLYLMIFLTVQNLGSAMADVVIDAMIAEAVRLEKASFAGDLQSVSWFAMAVGGVCGSLLGGYALSNLKIETIFLLFTVLPALQLLSCALVEESPANNEPLPELLDSNEFEEKSLTSNDNYPDTSKSNTRRRKGQKKGKKGDSNGKSETQKKQSKSLASQWFQSLKAATFGLGRAFKQPIILRPMAWFFIAHITVPNLSTVMFYYQTEVLQLDAAFLGTARVVGWLGLMFGTFIYNRYLQDMTLRKSLLFAHIGLSVTILLDMVLVSRANVGYGVSDKTMVLFGSALGDAINQLKFMPFLILSGRLCPPGIEGTLFALFMSINNLGNTVGSFMGAGLASLLGISSGSFDNMFMGLAIQVFCTYIPVLFLFLIPKEATGVSAS

SEQ ID NO: 90700 - protein, 377 aa, Arabidopsis thaliana
  peptide (1)..(377): Ceres Seq. ID no. 12724916
  misc_feature (1)..(376): Pfam Name: BT1 family Pfam Description: BT1 family
  misc_feature (1)..(377): Homolog of NCBI NO: 22327842 NR Description: putative protein; protein id: At5g54860.1, by cDNA: gi_20147214 [Arabidopsis thaliana]
  misc_feature (1)..(377): Homolog of NCBI NO: 9758266 NR Description: contains similarity to integral membrane
  misc_feature (13)..(376): Homolog of NCBI NO: 34904540 NR Description: B1066G12.15 [Oryza sativa (japonica
  misc_feature (167)..(371): Homolog of NCBI NO: 18408153 NR Description: expressed protein; protein id: At1g64890.1, by cDNA: gi_15028136 [Arabidopsis thaliana]
  misc_feature (1)..(98): Homolog of NCBI NO: 18408153 NR Description: expressed protein; protein id: At1g64890.1, by cDNA: gi_15028136 [Arabidopsis thaliana]
  misc_feature (167)..(371): Homolog of NCBI NO: 15028137 NR Description: unknown protein [Arabidopsis thaliana]
  misc_feature (167)..(371): Homolog of NCBI NO: 26449570 NR Description: unknown protein [Arabidopsis thaliana]
  misc_feature (1)..(98): Homolog of NCBI NO: 15028137 NR Description: unknown protein [Arabidopsis thaliana]
  misc_feature (1)..(98): Homolog of NCBI NO: 26449570 NR Description: unknown protein [Arabidopsis thaliana]
  misc_feature (154)..(368): Homolog of NCBI NO: 26450619 NR Description: unknown protein [Arabidopsis thaliana]
MIFLTVQNLGSAMADVVIDAMIAEAVRLEKASFAGDLQSVSWFAMAVGGVCGSLLGGYALSNLKIETIFLLFTVLPALQLLSCALVEESPANNEPLPELLDSNEFEEKSLTSNDNYPDTSKSNTRRRKGQKKGKKGDSNGKSETQKKQSKSLASQWFQSLKAATFGLGRAFKQPIILRPMAWFFIAHITVPNLSTVMFYYQTEVLQLDAAFLGTARVVGWLGLMFGTFIYNRYLQDMTLRKSLLFAHIGLSVTILLDMVLVSRANVGYGVSDKTMVLFGSALGDAINQLKFMPFLILSGRLCPPGIEGTLFALFMSINNLGNTVGSFMGAGLASLLGISSGSFDNMFMGLAIQVFCTYIPVLFLFLIPKEATGVSAS

SEQ ID NO: 90701 - protein, 365 aa, Arabidopsis thaliana
  peptide (1)..(365): Ceres Seq. ID no. 12724917
  misc_feature (1)..(364): Pfam Name: BT1 family Pfam Description: BT1 family
  misc_feature (1)..(365): Homolog of NCBI NO: 22327842 NR Description: putative protein; protein id: At5g54860.1, by cDNA: gi_20147214 [Arabidopsis thaliana]
  misc_feature (1)..(365): Homolog of NCBI NO: 9758266 NR Description: contains similarity to integral membrane
  misc_feature (1)..(364): Homolog of NCBI NO: 34904540 NR Description: B1066G12.15 [Oryza sativa (japonica
  misc_feature (155)..(359): Homolog of NCBI NO: 18408153 NR Description: expressed protein; protein id: At1g64890.1, by cDNA: gi_15028136 [Arabidopsis thaliana]
  misc_feature (1)..(86): Homolog of NCBI NO: 18408153 NR Description: expressed protein; protein id: At1g64890.1, by cDNA: gi_15028136 [Arabidopsis thaliana]
  misc_feature (155)..(359): Homolog of NCBI NO: 15028137 NR Description: unknown protein [Arabidopsis thaliana]
  misc_feature (155)..(359): Homolog of NCBI NO: 26449570 NR Description: unknown protein [Arabidopsis thaliana]
  misc_feature (1)..(86): Homolog of NCBI NO: 15028137 NR Description: unknown protein [Arabidopsis thaliana]
  misc_feature (1)..(86): Homolog of NCBI NO: 26449570 NR Description: unknown protein [Arabidopsis thaliana]
  misc_feature (142)..(356): Homolog of NCBI NO: 26450619 NR Description: unknown protein [Arabidopsis thaliana]
MADVVIDAMIAEAVRLEKASFAGDLQSVSWFAMAVGGVCGSLLGGYALSNLKIETIFLLFTVLPALQLLSCALVEESPANNEPLPELLDSNEFEEKSLTSNDNYPDTSKSNTRRRKGQKKGKKGDSNGKSETQKKQSKSLASQWFQSLKAATFGLGRAFKQPIILRPMAWFFIAHITVPNLSTVMFYYQTEVLQLDAAFLGTARVVGWLGLMFGTFIYNRYLQDMTLRKSLLFAHIGLSVTILLDMVLVSRANVGYGVSDKTMVLFGSALGDAINQLKFMPFLILSGRLCPPGIEGTLFALFMSINNLGNTVGSFMGAGLASLLGISSGSFDNMFMGLAIQVFCTYIPVLFLFLIPKEATGVSAS

SEQ ID NO: 90702 - DNA, 1305 bp, Arabidopsis thaliana
  misc_feature (1)..(1305): Ceres Seq. ID no. 12724930
  misc_feature: MA Experiment ID: 20000171 Result: Up-regulated in Transcription
  misc_feature: MA Experiment 20000171 PARAMETER Experiment Name: At_42deg_Heat_P Parameter: Age (day) Value: 14
  misc_feature: MA Experiment 20000171 PARAMETER Experiment Name: At_42deg_Heat_P Parameter: Organism Value: A. thaliana
  misc_feature: MA Experiment 20000171 PARAMETER Experiment Name: At_42deg_Heat_P Parameter: Plant Line Value: WS
  misc_feature: MA Experiment 20000171 PARAMETER Experiment Name: At_42deg_Heat_P Parameter: Temperature (deg C) Value: 42 vs. 22
  misc_feature: MA Experiment 20000171 PARAMETER Experiment Name: At_42deg_Heat_P Parameter: Timepoint (hr) Value: 1
  misc_feature: MA Experiment 20000171 PARAMETER Experiment Name: At_42deg_Heat_P Parameter: Tissue Value: Aerial
  misc_feature: MA Experiment ID: 20000185 Result: Up-regulated in Transcription
  misc_feature: MA Experiment 20000185 PARAMETER Experiment Name: At_Roots__P Parameter: Age (day) Value: 7 vs. 21
  misc_feature: MA Experiment 20000185 PARAMETER Experiment Name: At_Roots__P Parameter: Organism Value: A. thaliana
  misc_feature: MA Experiment 20000185 PARAMETER Experiment Name: At_Roots__P Parameter: Tissue Value: Roots vs. Whole Plant
  misc_feature: MA Experiment ID: 20000439 Result: Up-regulated in Transcription
  misc_feature: MA Experiment 20000439 PARAMETER Experiment Name: At_Roots__P Parameter: Age (day) Value: 14 vs. 21
  misc_feature: MA Experiment 20000439 PARAMETER Experiment Name: At_Roots__P Parameter: Organism Value: A. thaliana
  misc_feature: MA Experiment 20000439 PARAMETER Experiment Name: At_Roots__P Parameter: Tissue Value: Roots vs. Whole Plant
  misc_feature: MA Experiment ID: 20000495 Result: Down-regulated in Transcription
  misc_feature: MA Experiment 20000495 PARAMETER Experiment Name: At_Guard_Cells_P Parameter: Harvest Date Value: 8/2/2002
  misc_feature: MA Experiment 20000495 PARAMETER Experiment Name: At_Guard_Cells_P Parameter: Organism Value: A. thaliana
  misc_feature: MA Experiment 20000495 PARAMETER Experiment Name: At_Guard_Cells_P Parameter: Tissue Value: Guard Cells vs. Leaves
  misc_feature: MA Experiment ID: 20000506 Result: Up-regulated in Transcription
  misc_feature: MA Experiment 20000506 PARAMETER Experiment Name: At_Wounding_P Parameter: Organism Value: A. thaliana
  misc_feature: MA Experiment 20000506 PARAMETER Experiment Name: At_Wounding_P Parameter: Plant Line Value: WS
  misc_feature: MA Experiment 20000506 PARAMETER Experiment Name: At_Wounding_P Parameter: Timepoint (hr) Value: 6
  misc_feature: MA Experiment 20000506 PARAMETER Experiment Name: At_Wounding_P Parameter: Tissue Value: Aerial
  misc_feature: MA Experiment 20000506 PARAMETER Experiment Name: At_Wounding_P Parameter: Treatment Value: Wounding vs. No Wounding
  misc_feature: MA Experiment ID: 20001557 Result: Up-regulated in Transcription
  misc_feature: MA Experiment 20001557 PARAMETER Experiment Name: At_Drought_Soil_Dry_P Parameter: Age (day) Value: 27
  misc_feature: MA Experiment 20001557 PARAMETER Experiment Name: At_Drought_Soil_Dry_P Parameter: Organism Value: A. thaliana
  misc_feature: MA Experiment 20001557 PARAMETER Experiment Name: At_Drought_Soil_Dry_P Parameter: Plant Line Value: WS
  misc_feature: MA Experiment 20001557 PARAMETER Experiment Name: At_Drought_Soil_Dry_P Parameter: Post Timepoint (hr) Value: 3
  misc_feature: MA Experiment 20001557 PARAMETER Experiment Name: At_Drought_Soil_Dry_P Parameter: Post-Treatment Value: Re-Water vs. No Drought
  misc_feature: MA Experiment 20001557 PARAMETER Experiment Name: At_Drought_Soil_Dry_P Parameter: Timepoint (day) Value: 13
  misc_feature: MA Experiment 20001557 PARAMETER Experiment Name: At_Drought_Soil_Dry_P Parameter: Treatment Value: Drought vs. No Drought
  misc_feature: MA Experiment ID: 20001904 Result: Down-regulated in Transcription
  misc_feature: MA Experiment 20001904 PARAMETER Experiment Name: At_Drought_Reproduction_P Parameter: Age (day) Value: 37
  misc_feature: MA Experiment 20001904 PARAMETER Experiment Name: At_Drought_Reproduction_P Parameter: Organism Value: A. thaliana
  misc_feature: MA Experiment 20001904 PARAMETER Experiment Name: At_Drought_Reproduction_P Parameter: Plant Line Value: WS
  misc_feature: MA Experiment 20001904 PARAMETER Experiment Name: At_Drought_Reproduction_P Parameter: Timepoint (day) Value: 7
  misc_feature: MA Experiment 20001904 PARAMETER Experiment Name: At_Drought_Reproduction_P Parameter: Tissue Value: Rosettes
  misc_feature: MA Experiment 20001904 PARAMETER Experiment Name: At_Drought_Reproduction_P Parameter: Treatment Value: Drought vs. No Drought
aagagcctcggagcattcgaaaagttcgccggaaaaacaaaaacatgccgacgaacaacactccgttcctcactatttttctcctctttcttggtttactccggttcgattcatttcccggtttagaagctgcaaccgggaaattagcttcgattccaggattatacgtgttcggagattcgttagttgatgccggcaacaataattacttaccaatttcaatatctaaagctaattatccacataacggcgtcgattttccgaacaagaaacctaccggaagattctgtaacggcaagaacgccgccgatgctatcgctgagaaatttggtttaccgttaccacctccctatctctcacttagaggcttactaaaaagggagaagagaaaatctgccgccgtgactggtgtgaattttgcttccggtggagccggaatcttcaacagttccgaccaaaaacttggacaagctattcctttatccaagcaagtcaacaattggctctctattcatgaagaagtcatgaaacttgaaccatccgcagcacagcttcacctatccaaatctctattcactgttgtcataggaagtaacgatcttttcgattactttggatcgttcaaactccgacgccagagcaatcctcaacaatatacacaattaatggctgataaactcaaagagcaattgaagagaattcacgatagtggagcgcgtagattccttatcatcggggtagcacaaattggttgcacaccgggaaaaagagcgaagaactcgacactccatgaatgtgacgaaggggcaaacatgtggtgctctttgtacaacgaagctctagtaaagatgctgcaacaactcaaacaagaattacaaggctcaataacttacacttactttgataactacaagtccttacatgacattatttccaaccctgcccgttacggttttgctgacgttacatctgcgtgttgtggaaatggggaattgaacgcagaccttccttgtctgcctttggcgaagttatgttcagacagaaccaaacatcttttttgggatcgctatggccatcccactgaagctgctgctcggaccatcgtcgatcttatgttgactgatgatacacattactcatctcctataactcttactcagttggtctctacatgatcaataatacacacggcttcgtttttttgggaagagtacataatcaagtagacaaatgggatttggaaacttgatttgtaatcaagtatacgttactaaatttgttaccaatgaaatatataagtttctt

SEQ ID NO: 90703 - protein, 390 aa, Arabidopsis thaliana
  peptide (1)..(390): Ceres Seq. ID no. 12724931
  misc_feature (54)..(371): Pfam Name: GDSL-like Lipase/Acylhydrolase Pfam Description: GDSL-like Lipase/Acylhydrolase
  misc_feature (15)..(390): Homolog of NCBI NO: 15240452 NR Description: GDSL-motif lipase/hydrolase-like protein; protein At5g55050.1, supported by cDNA: gi_18175651 [Arabidopsis
  misc_feature (43)..(389): Homolog of NCBI NO: 29837765 NR Description: putative GDSL-like lipase/acylhydrolase [Oryza
  misc_feature (156)..(389): Homolog of NCBI NO: 13161399 NR Description: CPRD47 [Vigna unguiculata]
  misc_feature (22)..(387): Homolog of NCBI NO: 15229742 NR Description: putative protein; protein id: At3g50400.1 thaliana] >gi|7630026|emb|CAB88323.1| putative protein thaliana] >gi|26450386|dbj|BAC42308.1| unknown protein
  misc_feature (44)..(381): Homolog of NCBI NO: 21537293 NR Description: GDSL-motif lipase/hydrolase-like protein
  misc_feature (44)..(381): Homolog of NCBI NO: 30693137 NR Description: lipase family [Arabidopsis thaliana]
  misc_feature (25)..(389): Homolog of NCBI NO: 18398991 NR Description: unknown protein; protein id: At1g33811.1, by cDNA: gi_20466731 [Arabidopsis thaliana] unknown protein [Arabidopsis thaliana]
  misc_feature (55)..(389): Homolog of NCBI NO: 15235421 NR Description: Proline-rich APG - like protein; protein id:
  misc_feature (46)..(387): Homolog of NCBI NO: 34909504 NR Description: putative GDSL-motif lipase/hydrolase-like protein
  misc_feature (52)..(387): Homolog of NCBI NO: 18417760 NR Description: putative protein; protein id: At5g15720.1, by cDNA: 118296. [Arabidopsis thaliana]
EPRSIRKVRRKNKNMPTNNTPFLTIFLLFLGLLRFDSFPGLEAATGKLASIPGLYVFGDSLVDAGNNNYLPISISKANYPHNGVDFPNKKPTGRFCNGKNAADAIAEKFGLPLPPPYLSLRGLLKREKRKSAAVTGVNFASGGAGIFNSSDQKLGQAIPLSKQVNNWLSIHEEVMKLEPSAAQLHLSKSLFTVVIGSNDLFDYFGSFKLRRQSNPQQYTQLMADKLKEQLKRIHDSGARRFLIIGVAQIGCTPGKRAKNSTLHECDEGANMWCSLYNEALVKMLQQLKQELQGSITYTYFDNYKSLHDIISNPARYGFADVTSACCGNGELNADLPCLPLAKLCSDRTKHLFWDRYGHPTEAAARTIVDLMLTDDTHYSSPITLTQLVST

SEQ ID NO: 90704 - protein, 376 aa, Arabidopsis thaliana
  peptide (1)..(376): Ceres Seq. ID no. 12724932
  misc_feature (40)..(357): Pfam Name: GDSL-like Lipase/Acylhydrolase Pfam Description: GDSL-like Lipase/Acylhydrolase
  misc_feature (1)..(376): Homolog of NCBI NO: 15240452 NR Description: GDSL-motif lipase/hydrolase-like protein; protein At5g55050.1, supported by cDNA: gi_18175651 [Arabidopsis
  misc_feature (29)..(375): Homolog of NCBI NO: 29837765 NR Description: putative GDSL-like lipase/acylhydrolase [Oryza
  misc_feature (142)..(375): Homolog of NCBI NO: 13161399 NR Description: CPRD47 [Vigna unguiculata]
  misc_feature (8)..(373): Homolog of NCBI NO: 15229742 NR Description: putative protein; protein id: At3g50400.1 thaliana] >gi|7630026|emb|CAB88323.1| putative protein thaliana] >gi|26450386|dbj|BAC42308.1| unknown protein
  misc_feature (30)..(367): Homolog of NCBI NO: 21537293 NR Description: GDSL-motif lipase/hydrolase-like protein
  misc_feature (30)..(367): Homolog of NCBI NO: 30693137 NR Description: lipase family [Arabidopsis thaliana]
  misc_feature (11)..(375): Homolog of NCBI NO: 18398991 NR Description: unknown protein; protein id: At1g33811.1, by cDNA: gi_20466731 [Arabidopsis thaliana] unknown protein [Arabidopsis thaliana]
  misc_feature (41)..(375): Homolog of NCBI NO: 15235421 NR Description: Proline-rich APG - like protein; protein id:
  misc_feature (32)..(373): Homolog of NCBI NO: 34909504 NR Description: putative GDSL-motif lipase/hydrolase-like protein
  misc_feature (38)..(373): Homolog of NCBI NO: 18417760 NR Description: putative protein; protein id: At5g15720.1, by cDNA: 118296. [Arabidopsis thaliana]
MPTNNTPFLTIFLLFLGLLRFDSFPGLEAATGKLASIPGLYVFGDSLVDAGNNNYLPISISKANYPHNGVDFPNKKPTGRFCNGKNAADAIAEKFGLPLPPPYLSLRGLLKREKRKSAAVTGVNFASGGAGIFNSSDQKLGQAIPLSKQVNNWLSIHEEVMKLEPSAAQLHLSKSLFTVVIGSNDLFDYFGSFKLRRQSNPQQYTQLMADKLKEQLKRIHDSGARRFLIIGVAQIGCTPGKRAKNSTLHECDEGANMWCSLYNEALVKMLQQLKQELQGSITYTYFDNYKSLHDIISNPARYGFADVTSACCGNGELNADLPCLPLAKLCSDRTKHLFWDRYGHPTEAAARTIVDLMLTDDTHYSSPITLTQLVST

SEQ ID NO: 90705 - protein, 216 aa, Arabidopsis thaliana
  peptide (1)..(216): Ceres Seq. ID no. 12724933
  misc_feature (1)..(197): Pfam Name: GDSL-like Lipase/Acylhydrolase Pfam Description: GDSL-like Lipase/Acylhydrolase
  misc_feature (1)..(216): Homolog of NCBI NO: 15240452 NR Description: GDSL-motif lipase/hydrolase-like protein; protein At5g55050.1, supported by cDNA: gi_18175651 [Arabidopsis
  misc_feature (1)..(215): Homolog of NCBI NO: 29837765 NR Description: putative GDSL-like lipase/acylhydrolase [Oryza
  misc_feature (1)..(215): Homolog of NCBI NO: 13161399 NR Description: CPRD47 [Vigna unguiculata]
  misc_feature (1)..(213): Homolog of NCBI NO: 15229742 NR Description: putative protein; protein id: At3g50400.1 thaliana] >gi|7630026|emb|CAB88323.1| putative protein thaliana] >gi|26450386|dbj|BAC42308.1| unknown protein
  misc_feature (1)..(207): Homolog of NCBI NO: 21537293 NR Description: GDSL-motif lipase/hydrolase-like protein
  misc_feature (1)..(207): Homolog of NCBI NO: 30693137 NR Description: lipase family [Arabidopsis thaliana]
  misc_feature (1)..(215): Homolog of NCBI NO: 18398991 NR Description: unknown protein; protein id: At1g33811.1, by cDNA: gi_20466731 [Arabidopsis thaliana] unknown protein [Arabidopsis thaliana]
  misc_feature (1)..(215): Homolog of NCBI NO: 15235421 NR Description: Proline-rich APG - like protein; protein id:
  misc_feature (1)..(213): Homolog of NCBI NO: 34909504 NR Description: putative GDSL-motif lipase/hydrolase-like protein
  misc_feature (1)..(213): Homolog of NCBI NO: 18417760 NR Description: putative protein; protein id: At5g15720.1, by cDNA: 118296. [Arabidopsis thaliana]
MKLEPSAAQLHLSKSLFTVVIGSNDLFDYFGSFKLRRQSNPQQYTQLMADKLKEQLKRIHDSGARRFLIIGVAQIGCTPGKRAKNSTLHECDEGANMWCSLYNEALVKMLQQLKQELQGSITYTYFDNYKSLHDIISNPARYGFADVTSACCGNGELNADLPCLPLAKLCSDRTKHLFWDRYGHPTEAAARTIVDLMLTDDTHYSSPITLTQLVST

SEQ ID NO: 90706 - DNA, 1347 bp, Arabidopsis thaliana
  misc_feature (1)..(1347): Ceres Seq. ID no. 12724934
  misc_feature: MA Experiment ID: 20000306 Result: Up-regulated in Transcription
  misc_feature: MA Experiment 20000306 PARAMETER Experiment Name: At_Germinating_Seeds_Sub_P Parameter: Age (hr) Value: 6 vs. 0
  misc_feature: MA Experiment 20000306 PARAMETER Experiment Name: At_Germinating_Seeds_Sub_P Parameter: Organism Value: A. thaliana
  misc_feature: MA Experiment 20000306 PARAMETER Experiment Name: At_Germinating_Seeds_Sub_P Parameter: Plant Line Value: WS
  misc_feature: MA Experiment 20000306 PARAMETER Experiment Name: At_Germinating_Seeds_Sub_P Parameter: Tissue Value: Germinating Seeds
  misc_feature: MA Experiment ID: 20000307 Result: Up-regulated in Transcription
  misc_feature: MA Experiment 20000307 PARAMETER Experiment Name: At_Germinating_Seeds_Sub_P Parameter: Age (hr) Value: 24 vs. 0
  misc_feature: MA Experiment 20000307 PARAMETER Experiment Name: At_Germinating_Seeds_Sub_P Parameter: Organism Value: A. thaliana
  misc_feature: MA Experiment 20000307 PARAMETER Experiment Name: At_Germinating_Seeds_Sub_P Parameter: Plant Line Value: WS
  misc_feature: MA Experiment 20000307 PARAMETER Experiment Name: At_Germinating_Seeds_Sub_P Parameter: Tissue Value: Germinating Seeds
  misc_feature: MA Experiment ID: 20000314 Result: Up-regulated in Transcription
  misc_feature: MA Experiment 20000314 PARAMETER Experiment Name: At_14day_Shoots-Roots_Sub_P Parameter: Age (day) Value: 14
  misc_feature: MA Experiment 20000314 PARAMETER Experiment Name: At_14day_Shoots-Roots_Sub_P Parameter: Organism Value: A. thaliana
  misc_feature: MA Experiment 20000314 PARAMETER Experiment Name: At_14day_Shoots-Roots_Sub_P Parameter: Plant Line Value: WS
  misc_feature: MA Experiment 20000314 PARAMETER Experiment Name: At_14day_Shoots-Roots_Sub_P Parameter: Tissue Value: Roots vs. Whole Plant
  misc_feature: MA Experiment ID: 20000347 Result: Up-regulated in Transcription
  misc_feature: MA Experiment 20000347 PARAMETER Experiment Name: At_2mM_SA_Sub_P Parameter: Age (day) Value: 14
  misc_feature: MA Experiment 20000347 PARAMETER Experiment Name: At_2mM_SA_Sub_P Parameter: Organism Value: A. thaliana
  misc_feature: MA Experiment 20000347 PARAMETER Experiment Name: At_2mM_SA_Sub_P Parameter: Plant Line Value: WS
  misc_feature: MA Experiment 20000347 PARAMETER Experiment Name: At_2mM_SA_Sub_P Parameter: Timepoint (hr) Value: 6
  misc_feature: MA Experiment 20000347 PARAMETER Experiment Name: At_2mM_SA_Sub_P Parameter: Tissue Value: Aerial
  misc_feature: MA Experiment 20000347 PARAMETER Experiment Name: At_2mM_SA_Sub_P Parameter: Treatment Value: 2mM SA vs. No Treatment
  misc_feature: MA Experiment ID: 20000348 Result: Up-regulated in Transcription
  misc_feature: MA Experiment 20000348 PARAMETER Experiment Name: At_100uM_ABA_Sub_P Parameter: Age (day) Value: 14
  misc_feature: MA Experiment 20000348 PARAMETER Experiment Name: At_100uM_ABA_Sub_P Parameter: Organism Value: A. thaliana
  misc_feature: MA Experiment 20000348 PARAMETER Experiment Name: At_100uM_ABA_Sub_P Parameter: Plant Line Value: WS
  misc_feature: MA Experiment 20000348 PARAMETER Experiment Name: At_100uM_ABA_Sub_P Parameter: Timepoint (hr) Value: 1
  misc_feature: MA Experiment 20000348 PARAMETER Experiment Name: At_100uM_ABA_Sub_P Parameter: Tissue Value: Aerial
  misc_feature: MA Experiment 20000348 PARAMETER Experiment Name: At_100uM_ABA_Sub_P Parameter: Treatment Value: 100uM ABA vs. No Treatment
  misc_feature: MA Experiment ID: 20000634 Result: Up-regulated in Transcription
  misc_feature: MA Experiment 20000634 PARAMETER Experiment Name: At_10percent_PEG_Sub_P Parameter: Age (day) Value: 12
  misc_feature: MA Experiment 20000634 PARAMETER Experiment Name: At_10percent_PEG_Sub_P Parameter: Organism Value: A. thaliana
  misc_feature: MA Experiment 20000634 PARAMETER Experiment Name: At_10percent_PEG_Sub_P Parameter: Plant Line Value: WS
  misc_feature: MA Experiment 20000634 PARAMETER Experiment Name: At_10percent_PEG_Sub_P Parameter: Timepoint (day) Value: 12
  misc_feature: MA Experiment 20000634 PARAMETER Experiment Name: At_10percent_PEG_Sub_P Parameter: Tissue Value: Whole Plant
  misc_feature: MA Experiment 20000634 PARAMETER Experiment Name: At_10percent_PEG_Sub_P Parameter: Treatment Value: 10% PEG vs. No Treatment
atggaggaacaaaactggataagaggaccaatcataggtcgaggctcaacagctactgtctcacttggaatcacaaattccggtgacttcttcgccgtcaaatccgccgagttttcttcatcggcgtttttgcagagagaacaatcgattttgtcgaagttgagctctccttacatagtcaagtacattggttctaatgtaacgaaggagaacgacaagttgatgtataatctcttaatggagtatgtttccggtgggagtcttcacgatttgatcaagaattccggcgggaagttaccggagccgttgattagatcctacacacgtcagatattgaaaggtttgatgtatcttcatgatcaaggaatcgttcattgcgatgtgaagagccagaatgtgatgatcggaggagagattgcgaagatcgtcgatttgggttgtgctaaaacggtggaagagaatgagaacttggaattttccggtacaccggcgtttatgtcaccggaggtagcacgtggtgaagaacagagttttccagctgatgtttgggctttggggtgtacggtgatagagatggctacagggtcaagtccttggccggagctaaacgacgtcgttgctgctatttataagattggtttcaccggcgagtcgccggtgattccggtttggttatcggagaaaggtcaagactttttgaggaagtgtttgagaaaagatccgaaacagagatggactgttgaagaattgcttcaacatccgtttctcgacgaagaagacaacgacagtgaccaaactggtaactgtctgaattcttcatctcctagtactgtgttggatcaacggttttgggatttatgtgaaacttcgagaagtagattcattaaagaggatcacgaagacccatttgcaaattctacaaatttcttatgggatgacgattctttaccgggtgatcggatcaagaaactcgccggagacgagagttccggtgaaccagactgggaaacgaacggttggattgaagtaaggggagagatagagaaacgtaacgaggaagaagatgagaattgcgttgaagcaacgtcattggaggaggacgaagaagaagtgggaggatttgagaattggatctgggatcaacaagacagcttgttcttggaatattcccctgaggacaacatttattatttttactcttattataacatctttgatgaagatataattctatattatgatcatcttgaagattgttttgtactaaaatttgatgataataataagaagatttttttctttagccacattacaaattcttgttttgagattactaattacaattga

SEQ ID NO: 90707 - protein, 448 aa, Arabidopsis thaliana
  peptide (1)..(448): Ceres Seq. ID no. 12724935
  misc_feature (6)..(256): Pfam Name: Protein kinase domain Pfam Description: Protein kinase domain
  misc_feature (1)..(448): Homolog of NCBI NO: 15240456 NR Description: putative protein; protein id: At5g55090.1
  misc_feature (3)..(433): Homolog of NCBI NO: 15236903 NR Description: putative NPK1-related protein kinase; protein id:
  misc_feature (3)..(398): Homolog of NCBI NO: 19423926 NR Description: unknown protein [Arabidopsis thaliana]
  misc_feature (6)..(348): Homolog of NCBI NO: 15225692 NR Description: putative protein kinase; protein id: At2g32510.1
  misc_feature (5)..(301): Homolog of NCBI NO: 15220416 NR Description: putative NPK1-related MAP kinase; protein id: supported by cDNA: gi_17381165, supported by cDNA: gi_20259424
  misc_feature (6)..(346): Homolog of NCBI NO: 34911466 NR Description: NPK1-related protein kinase-like protein [Oryza
  misc_feature (6)..(285): Homolog of NCBI NO: 34911472 NR Description: NPK1-related protein kinase-like protein [Oryza
  misc_feature (6)..(347): Homolog of NCBI NO: 37530788 NR Description: putative NPK1-related protein kinase [Oryza
  misc_feature (6)..(347): Homolog of NCBI NO: 37530786 NR Description: putative NPK1-related protein kinase [Oryza
  misc_feature (12)..(285): Homolog of NCBI NO: 34911476 NR Description: NPK1-related protein kinase-like protein [Oryza
MEEQNWIRGPIIGRGSTATVSLGITNSGDFFAVKSAEFSSSAFLQREQSILSKLSSPYIVKYIGSNVTKENDKLMYNLLMEYVSGGSLHDLIKNSGGKLPEPLIRSYTRQILKGLMYLHDQGIVHCDVKSQNVMIGGEIAKIVDLGCAKTVEENENLEFSGTPAFMSPEVARGEEQSFPADVWALGCTVIEMATGSSPWPELNDVVAAIYKIGFTGESPVIPVWLSEKGQDFLRKCLRKDPKQRWTVEELLQHPFLDEEDNDSDQTGNCLNSSSPSTVLDQRFWDLCETSRSRFIKEDHEDPFANSTNFLWDDDSLPGDRIKKLAGDESSGEPDWETNGWIEVRGEIEKRNEEEDENCVEATSLEEDEEEVGGFENWIWDQQDSLFLEYSPEDNIYYFYSYYNIFDEDIILYYDHLEDCFVLKFDDNNKKIFFFSHITNSCFEITNYN

SEQ ID NO: 90708 - protein, 374 aa, Arabidopsis thaliana
  peptide (1)..(374): Ceres Seq. ID no. 12724936
  misc_feature (1)..(182): Pfam Name: Protein kinase domain Pfam Description: Protein kinase domain
  misc_feature (1)..(374): Homolog of NCBI NO: 15240456 NR Description: putative protein; protein id: At5g55090.1
  misc_feature (1)..(359): Homolog of NCBI NO: 15236903 NR Description: putative NPK1-related protein kinase; protein id:
  misc_feature (1)..(324): Homolog of NCBI NO: 19423926 NR Description: unknown protein [Arabidopsis thaliana]
  misc_feature (1)..(274): Homolog of NCBI NO: 15225692 NR Description: putative protein kinase; protein id: At2g32510.1
  misc_feature (1)..(227): Homolog of NCBI NO: 15220416 NR Description: putative NPK1-related MAP kinase; protein id: supported by cDNA: gi_17381165, supported by cDNA: gi_20259424
  misc_feature (1)..(272): Homolog of NCBI NO: 34911466 NR Description: NPK1-related protein kinase-like protein [Oryza
  misc_feature (1)..(211): Homolog of NCBI NO: 34911472 NR Description: NPK1-related protein kinase-like protein [Oryza
  misc_feature (1)..(273): Homolog of NCBI NO: 37530788 NR Description: putative NPK1-related protein kinase [Oryza
  misc_feature (1)..(273): Homolog of NCBI NO: 37530786 NR Description: putative NPK1-related protein kinase [Oryza
  misc_feature (1)..(211): Homolog of NCBI NO: 34911476 NR Description: NPK1-related protein kinase-like protein [Oryza
MYNLLMEYVSGGSLHDLIKNSGGKLPEPLIRSYTRQILKGLMYLHDQGIVHCDVKSQNVMIGGEIAKIVDLGCAKTVEENENLEFSGTPAFMSPEVARGEEQSFPADVWALGCTVIEMATGSSPWPELNDVVAAIYKIGFTGESPVIPVWLSEKGQDFLRKCLRKDPKQRWTVEELLQHPFLDEEDNDSDQTGNCLNSSSPSTVLDQRFWDLCETSRSRFIKEDHEDPFANSTNFLWDDDSLPGDRIKKLAGDESSGEPDWETNGWIEVRGEIEKRNEEEDENCVEATSLEEDEEEVGGFENWIWDQQDSLFLEYSPEDNIYYFYSYYNIFDEDIILYYDHLEDCFVLKFDDNNKKIFFFSHITNSCFEITNYN

SEQ ID NO: 90709 - protein, 369 aa, Arabidopsis thaliana
  peptide (1)..(369): Ceres Seq. ID no. 12724937
  misc_feature (1)..(177): Pfam Name: Protein kinase domain Pfam Description: Protein kinase domain
  misc_feature (1)..(369): Homolog of NCBI NO: 15240456 NR Description: putative protein; protein id: At5g55090.1
  misc_feature (1)..(354): Homolog of NCBI NO: 15236903 NR Description: putative NPK1-related protein kinase; protein id:
  misc_feature (1)..(319): Homolog of NCBI NO: 19423926 NR Description: unknown protein [Arabidopsis thaliana]
  misc_feature (1)..(269): Homolog of NCBI NO: 15225692 NR Description: putative protein kinase; protein id: At2g32510.1
  misc_feature (1)..(222): Homolog of NCBI NO: 15220416 NR Description: putative NPK1-related MAP kinase; protein id: supported by cDNA: gi_17381165, supported by cDNA: gi_20259424
  misc_feature (1)..(267): Homolog of NCBI NO: 34911466 NR Description: NPK1-related protein kinase-like protein [Oryza
  misc_feature (1)..(206): Homolog of NCBI NO: 34911472 NR Description: NPK1-related protein kinase-like protein [Oryza
  misc_feature (1)..(268): Homolog of NCBI NO: 37530788 NR Description: putative NPK1-related protein kinase [Oryza
  misc_feature (1)..(268): Homolog of NCBI NO: 37530786 NR Description: putative NPK1-related protein kinase [Oryza
  misc_feature (1)..(206): Homolog of NCBI NO: 34911476 NR Description: NPK1-related protein kinase-like protein [Oryza
MEYVSGGSLHDLIKNSGGKLPEPLIRSYTRQILKGLMYLHDQGIVHCDVKSQNVMIGGEIAKIVDLGCAKTVEENENLEFSGTPAFMSPEVARGEEQSFPADVWALGCTVIEMATGSSPWPELNDVVAAIYKIGFTGESPVIPVWLSEKGQDFLRKCLRKDPKQRWTVEELLQHPFLDEEDNDSDQTGNCLNSSSPSTVLDQRFWDLCETSRSRFIKEDHEDPFANSTNFLWDDDSLPGDRIKKLAGDESSGEPDWETNGWIEVRGEIEKRNEEEDENCVEATSLEEDEEEVGGFENWIWDQQDSLFLEYSPEDNIYYFYSYYNIFDEDIILYYDHLEDCFVLKFDDNNKKIFFFSHITNSCFEITNYN

SEQ ID NO: 90710 - DNA, 1331 bp, Arabidopsis thaliana
  misc_feature (1)..(1331): Ceres Seq. ID no. 12724950
  misc_feature: MA Experiment ID: 20000171 Result: Down-regulated in Transcription
  misc_feature: MA Experiment 20000171 PARAMETER Experiment Name: At_42deg_Heat_P Parameter: Age (day) Value: 14
  misc_feature: MA Experiment 20000171 PARAMETER Experiment Name: At_42deg_Heat_P Parameter: Organism Value: A. thaliana
  misc_feature: MA Experiment 20000171 PARAMETER Experiment Name: At_42deg_Heat_P Parameter: Plant Line Value: WS
  misc_feature: MA Experiment 20000171 PARAMETER Experiment Name: At_42deg_Heat_P Parameter: Temperature (deg C) Value: 42 vs. 22
  misc_feature: MA Experiment 20000171 PARAMETER Experiment Name: At_42deg_Heat_P Parameter: Timepoint (hr) Value: 1
  misc_feature: MA Experiment 20000171 PARAMETER Experiment Name: At_42deg_Heat_P Parameter: Tissue Value: Aerial
  misc_feature: MA Experiment ID: 20000173 Result: Down-regulated in Transcription
  misc_feature: MA Experiment 20000173 PARAMETER Experiment Name: At_42deg_Heat_P Parameter: Age (day) Value: 14
  misc_feature: MA Experiment 20000173 PARAMETER Experiment Name: At_42deg_Heat_P Parameter: Organism Value: A. thaliana
  misc_feature: MA Experiment 20000173 PARAMETER Experiment Name: At_42deg_Heat_P Parameter: Plant Line Value: WS
  misc_feature: MA Experiment 20000173 PARAMETER Experiment Name: At_42deg_Heat_P Parameter: Temperature (deg C) Value: 42 vs. 22
  misc_feature: MA Experiment 20000173 PARAMETER Experiment Name: At_42deg_Heat_P Parameter: Timepoint (hr) Value: 6
  misc_feature: MA Experiment 20000173 PARAMETER Experiment Name: At_42deg_Heat_P Parameter: Tissue Value: Aerial
  misc_feature: MA Experiment ID: 20000227 Result: Down-regulated in Transcription
  misc_feature: MA Experiment 20000227 PARAMETER Experiment Name: At_Root-Tips-vs-Tops_P Parameter: Tissue Value: Root Tips vs. Root Tops
gagaaaacaccccttcggagaggagcaaagcctctcctggggaagaagaagaagaacacgactttttgcttcttctttttaatgcagattttctaaaggtcttcgtaaattttgcgtctgattatcaaattaggttttttttgttgtttccattagttgtctcattgtctgtgaagagaaaggaacagaggaaaatgtcagacctagacaagcaaatagagcagcttaaacgctgcgaggctttgaaggaatcagaagtgaaggctctttgtcttaaagctatggagattctagttgaagagagcaatgttcaaagagtcgatgctcctgtcactatatgtggcgacattcatggacagttctatgacatgaaagagcttttcaaagttgggggtgattgccctaagaccaattatttgtttcttggagattttgttgaccgaggtttttattcggttgagacatttctacttcttctagctctcaaggttagatatccagaccgtataactctcattagagggaaccacgagagccggcagattacgcaggtatatggattttatgatgagtgtctgcgtaaatatggctctgtaaatgtttggagatactgcacagatatctttgactacttgagtctttcagctcttgtcgagaacaagatattttgtgttcatggaggtctctctccagctattatgactctagaccagatcagggctattgatcgaaagcaagaagtaccacatgatggtgctatgtgtgatcttttatggtctgatccagaagatattgtcgatggttggggattgagtccccgtggtgccggattccttttcggcggcagtgttgttacgtcttttaaccactcaaacaacattgattacatatgtcgagctcatcagctagtgatggaaggttacaaatggatgttcaatagccagatagtcactgtttggtctgccccaaattactgttatagatgcggtaatgtagctgcaattctagagctcgatgagaatctaaacaaagagtttcgtgtcttcgatgcagccccacaagaatcgagaggagctctagccaagaaacctgcacctgattatttcctgtgagacgcaagtgaatacagaaactggttccttcttctcattgcagagcaagaaagctacccaaaatcatcggtgtataggttgtaaaaatgcaaaagaatctacaatccatgtgttgccaaagagatctctactcaagggtccgtttgagtagaatctttgtgtcttaaaaaaagcttttttttttttttttccttctcttttgtttgtaatgctactttt

SEQ ID NO: 90711 - protein, 369 aa, Arabidopsis thaliana
  peptide (1)..(369): Ceres Seq. ID no. 12724951
  misc_feature (108)..(304): Pfam Name: Calcineurin-like phosphoesterase Pfam Description: Calcineurin-like phosphoesterase
  misc_feature (65)..(369): Homolog of NCBI NO: 15240488 NR Description: serine/threonine protein phosphatase; protein id:
  misc_feature (65)..(369): Homolog of NCBI NO: 629550 NR Description: phosphoprotein phosphatase (EC 3.1.3.16) X-2 EP128) - Arabidopsis thaliana >gi|397590|emb|CAA80312.1| protein
  misc_feature (65)..(369): Homolog of NCBI NO: 15236841 NR Description: phosphoprotein phosphatase (PPX-1); protein id: [Arabidopsis thaliana] >gi|1346782|sp|P48529|PPX1_ARATH
  misc_feature (66)..(369): Homolog of NCBI NO: 5410609 NR Description: protein phosphatase 4 catalytic subunit discoideum] >gi|28829486|gb|AAO52019.1| similar to Dictyostelium (Slime mold). Protein phosphatase 4 catalytic subunit (EC
  misc_feature (64)..(369): Homolog of NCBI NO: 4506027 NR Description: protein phosphatase 4 (formerly X), catalytic Protein phosphatase 4, catalytic subunit [Homo sapiens] protein phosphatase 4, catalytic subunit; protein phosphatase X
  misc_feature (64)..(369): Homolog of NCBI NO: 130788 NR Description: SERINE/THREONINE PROTEIN PHOSPHATASE 4 (PP4)
  misc_feature (64)..(369): Homolog of NCBI NO: 346323 NR Description: phosphoprotein phosphatase (EC 3.1.3.16) X
  misc_feature (65)..(369): Homolog of NCBI NO: 4101701 NR Description: serine/threonine phosphatase [Takifugu rubripes]
  misc_feature (66)..(369): Homolog of NCBI NO: 17864424 NR Description: Protein phosphatase 19C CG32505-PA
  misc_feature (61)..(369): Homolog of NCBI NO: 17554396 NR Description: Protein phosphatase PPH-4.1 (37.4 kD) (pph-4.1)
ENTPSERSKASPGEEEEEHDFLLLLFNADFLKVFVNFASDYQIRFFLLFPLVVSLSVKRKEQRKMSDLDKQIEQLKRCEALKESEVKALCLKAMEILVEESNVQRVDAPVTICGDIHGQFYDMKELFKVGGDCPKTNYLFLGDFVDRGFYSVETFLLLLALKVRYPDRITLIRGNHESRQITQVYGFYDECLRKYGSVNVWRYCTDIFDYLSLSALVENKIFCVHGGLSPAIMTLDQIRAIDRKQEVPHDGAMCDLLWSDPEDIVDGWGLSPRGAGFLFGGSVVTSFNHSNNIDYICRAHQLVMEGYKWMFNSQIVTVWSAPNYCYRCGNVAAILELDENLNKEFRVFDAAPQESRGALAKKPAPDYFL

SEQ ID NO: 90712 - protein, 305 aa, Arabidopsis thaliana
  peptide (1)..(305): Ceres Seq. ID no. 12724952
  misc_feature (44)..(240): Pfam Name: Calcineurin-like phosphoesterase Pfam Description: Calcineurin-like phosphoesterase
  misc_feature (1)..(305): Homolog of NCBI NO: 15240488 NR Description: serine/threonine protein phosphatase; protein id:
  misc_feature (1)..(305): Homolog of NCBI NO: 629550 NR Description: phosphoprotein phosphatase (EC 3.1.3.16) X-2 EP128) - Arabidopsis thaliana >gi|397590|emb|CAA80312.1| protein
  misc_feature (1)..(305): Homolog of NCBI NO: 15236841 NR Description: phosphoprotein phosphatase (PPX-1); protein id: [Arabidopsis thaliana] >gi|1346782|sp|P48529|PPX1_ARATH
  misc_feature (2)..(305): Homolog of NCBI NO: 5410609 NR Description: protein phosphatase 4 catalytic subunit discoideum] >gi|28829486|gb|AAO52019.1| similar to Dictyostelium (Slime mold). Protein phosphatase 4 catalytic subunit (EC
  misc_feature (1)..(305): Homolog of NCBI NO: 4506027 NR Description: protein phosphatase 4 (formerly X), catalytic Protein phosphatase 4, catalytic subunit [Homo sapiens] protein phosphatase 4, catalytic subunit; protein phosphatase X
  misc_feature (1)..(305): Homolog of NCBI NO: 130788 NR Description: SERINE/THREONINE PROTEIN PHOSPHATASE 4 (PP4)
  misc_feature (1)..(305): Homolog of NCBI NO: 346323 NR Description: phosphoprotein phosphatase (EC 3.1.3.16) X
  misc_feature (1)..(305): Homolog of NCBI NO: 4101701 NR Description: serine/threonine phosphatase [Takifugu rubripes]
  misc_feature (2)..(305): Homolog of NCBI NO: 17864424 NR Description: Protein phosphatase 19C CG32505-PA
  misc_feature (1)..(305): Homolog of NCBI NO: 17554396 NR Description: Protein phosphatase PPH-4.1 (37.4 kD) (pph-4.1)
MSDLDKQIEQLKRCEALKESEVKALCLKAMEILVEESNVQRVDAPVTICGDIHGQFYDMKELFKVGGDCPKTNYLFLGDFVDRGFYSVETFLLLLALKVRYPDRITLIRGNHESRQITQVYGFYDECLRKYGSVNVWRYCTDIFDYLSLSALVENKIFCVHGGLSPAIMTLDQIRAIDRKQEVPHDGAMCDLLWSDPEDIVDGWGLSPRGAGFLFGGSVVTSFNHSNNIDYICRAHQLVMEGYKWMFNSQIVTVWSAPNYCYRCGNVAAILELDENLNKEFRVFDAAPQESRGALAKKPAPDYFL

SEQ ID NO: 90713 - protein, 276 aa, Arabidopsis thaliana
  peptide (1)..(276): Ceres Seq. ID no. 12724953
  misc_feature (15)..(211): Pfam Name: Calcineurin-like phosphoesterase Pfam Description: Calcineurin-like phosphoesterase
  misc_feature (1)..(276): Homolog of NCBI NO: 15240488 NR Description: serine/threonine protein phosphatase; protein id:
  misc_feature (1)..(276): Homolog of NCBI NO: 629550 NR Description: phosphoprotein phosphatase (EC 3.1.3.16) X-2 EP128) - Arabidopsis thaliana >gi|397590|emb|CAA80312.1| protein
  misc_feature (1)..(276): Homolog of NCBI NO: 15236841 NR Description: phosphoprotein phosphatase (PPX-1); protein id: [Arabidopsis thaliana] >gi|1346782|sp|P48529|PPX1_ARATH
  misc_feature (1)..(276): Homolog of NCBI NO: 5410609 NR Description: protein phosphatase 4 catalytic subunit discoideum] >gi|28829486|gb|AAO52019.1| similar to Dictyostelium (Slime mold). Protein phosphatase 4 catalytic subunit (EC
  misc_feature (1)..(276): Homolog of NCBI NO: 4506027 NR Description: protein phosphatase 4 (formerly X), catalytic Protein phosphatase 4, catalytic subunit [Homo sapiens] protein phosphatase 4, catalytic subunit; protein phosphatase X
  misc_feature (1)..(276): Homolog of NCBI NO: 130788 NR Description: SERINE/THREONINE PROTEIN PHOSPHATASE 4 (PP4)
  misc_feature (1)..(276): Homolog of NCBI NO: 346323 NR Description: phosphoprotein phosphatase (EC 3.1.3.16) X
  misc_feature (1)..(276): Homolog of NCBI NO: 4101701 NR Description: serine/threonine phosphatase [Takifugu rubripes]
  misc_feature (1)..(276): Homolog of NCBI NO: 17864424 NR Description: Protein phosphatase 19C CG32505-PA
  misc_feature (1)..(276): Homolog of NCBI NO: 17554396 NR Description: Protein phosphatase PPH-4.1 (37.4 kD) (pph-4.1)
MEILVEESNVQRVDAPVTICGDIHGQFYDMKELFKVGGDCPKTNYLFLGDFVDRGFYSVETFLLLLALKVRYPDRITLIRGNHESRQITQVYGFYDECLRKYGSVNVWRYCTDIFDYLSLSALVENKIFCVHGGLSPAIMTLDQIRAIDRKQEVPHDGAMCDLLWSDPEDIVDGWGLSPRGAGFLFGGSVVTSFNHSNNIDYICRAHQLVMEGYKWMFNSQIVTVWSAPNYCYRCGNVAAILELDENLNKEFRVFDAAPQESRGALAKKPAPDYFL

SEQ ID NO: 90714 - DNA, 1231 bp, Arabidopsis thaliana
  misc_feature (1)..(1231): Ceres Seq. ID no. 12724977
  misc_feature: MA Experiment ID: 20000184 Result: Up-regulated in Transcription
  misc_feature: MA Experiment 20000184 PARAMETER Experiment Name: At_Shoots__P Parameter: Age (day) Value: 7
  misc_feature: MA Experiment 20000184 PARAMETER Experiment Name: At_Shoots__P Parameter: Tissue Value: Shoots vs. Whole Plant
  misc_feature: MA Experiment ID: 20000438 Result: Up-regulated in Transcription
  misc_feature: MA Experiment 20000438 PARAMETER Experiment Name: At_Shoots__P Parameter: Age (day) Value: 14
  misc_feature: MA Experiment 20000438 PARAMETER Experiment Name: At_Shoots__P Parameter: Tissue Value: Shoots vs. Whole Plant
  misc_feature: MA Experiment ID: 20001248 Result: Down-regulated in Transcription
  misc_feature: MA Experiment 20001248 PARAMETER Experiment Name: At_Far-red-induction_P Parameter: Age (day) Value: 7
  misc_feature: MA Experiment 20001248 PARAMETER Experiment Name: At_Far-red-induction_P Parameter: Light Value: Far-red vs. White
  misc_feature: MA Experiment 20001248 PARAMETER Experiment Name: At_Far-red-induction_P Parameter: Organism Value: A. thaliana
  misc_feature: MA Experiment 20001248 PARAMETER Experiment Name: At_Far-red-induction_P Parameter: Plant Line Value: Columbia
  misc_feature: MA Experiment 20001248 PARAMETER Experiment Name: At_Far-red-induction_P Parameter: Timepoint (hr) Value: 4
  misc_feature: MA Experiment 20001248 PARAMETER Experiment Name: At_Far-red-induction_P Parameter: Tissue Value: Whole Plant
agaattagcaaacgacagatctgagaaatggaagaaaagtttagaaacttaatcgaggtatggatctctgctttaatctctctatcttactgttattacatatcgtctaaactctccaaaggtgttcttcgtctcctctctattcttccagtctgcattctgtttcttgttcttcctctgttcctctcttgtgtgcacttttgcgccatttcagttctttttctttcatggcttgcaaactttaagcttcttctatttgcctttgatgagggacctttgttcccacttcctccaaaactctcccgtttcatctgcttcgcttgtttacccatcaaaatcagacaagacccttctccaaatgcgataccaaatcttcatcctaaacctatgcctaaatgggttttggctgttaaaattttggtcttgggcgtcttgttacatgtttatgaatacagggatggtttgcctcggtttgttgtcttggctctctattgtctccatatttaccttgaggtagaacttgtcttggtctttgttggagccgtggtatctactcttcttgggtgtaacatcgagccggtgttcaatgagccctacctagctacctccctacaagacttctggagccgcagatggaacctcatggtttcagccgtcctacgctcaaccgttcacattccggttcagcgttttttcaaacgcatactcagtccagacggggctatgtttgctggggtcatggcatcgttctttgtctcaggcttgatgcatgagctgctctacttttacatgatccgtaagcctccaacttgggaagtcacttgtttctttgtgttgcatggtgctgccactgccactgagatagcggtgaagagaacacaatggttgaggccaccgcaccgggctgtctctggtcttgtagttctgacgtttgtgagtgtgacgggcgtttggctattcctcgctcaagtgctgagaaacaatgtccatgagaaagcgattggagaatgtttattggttcttgacctagccaagttattcacttcttcatgattctttattaaaggcaaagagcggtagcagagcaaccaaactttgtttctcttcattgtttgaaaacgtatatagaagtgtgagacacgtcgtctagtgtgaaacattcttgacatgctattaaattgaatcaagctcaacaaattcaataaatatggcgtaaatgttttctaagttc

SEQ ID NO: 90715 - protein, 341 aa, Arabidopsis thaliana
  peptide (1)..(341): Ceres Seq. ID no. 12724978
  misc_feature (50)..(317): Pfam Name: MBOAT family Pfam Description: MBOAT family
  misc_feature (1)..(341): Homolog of NCBI NO: 15240500 NR Description: wax synthase-like protein; protein id:
  misc_feature (1)..(336): Homolog of NCBI NO: 15240499 NR Description: wax synthase-like protein; protein id: At5g55370.1
  misc_feature (1)..(336): Homolog of NCBI NO: 15240497 NR Description: wax synthase-like protein; protein id: At5g55350.1
  misc_feature (1)..(336): Homolog of NCBI NO: 15240496 NR Description: putative protein; protein id: At5g55340.1, by cDNA: 115917. [Arabidopsis thaliana] contains similarity to wax synthase~gene_id:MTE17.5 [Arabidopsis
  misc_feature (1)..(336): Homolog of NCBI NO: 15240498 NR Description: wax synthase-like protein; protein id: At5g55360.1
  misc_feature (1)..(336): Homolog of NCBI NO: 15218662 NR Description: hypothetical protein; protein id: At1g34500.1
  misc_feature (1)..(336): Homolog of NCBI NO: 8778260 NR Description: F12K21.17 [Arabidopsis thaliana]
  misc_feature (1)..(333): Homolog of NCBI NO: 15240495 NR Description: wax synthase-like protein; protein id: At5g55330.1
  misc_feature (1)..(336): Homolog of NCBI NO: 15218659 NR Description: hypothetical protein; protein id: At1g34490.1
  misc_feature (11)..(336): Homolog of NCBI NO: 27728714 NR Description: wax synthase isoform 1 [Vitis vinifera]
MEEKFRNLIEVWISALISLSYCYYISSKLSKGVLRLLSILPVCILFLVLPLFLSCVHFCAISVLFLSWLANFKLLLFAFDEGPLFPLPPKLSRFICFACLPIKIRQDPSPNAIPNLHPKPMPKWVLAVKILVLGVLLHVYEYRDGLPRFVVLALYCLHIYLEVELVLVFVGAVVSTLLGCNIEPVFNEPYLATSLQDFWSRRWNLMVSAVLRSTVHIPVQRFFKRILSPDGAMFAGVMASFFVSGLMHELLYFYMIRKPPTWEVTCFFVLHGAATATEIAVKRTQWLRPPHRAVSGLVVLTFVSVTGVWLFLAQVLRNNVHEKAIGECLLVLDLAKLFTSS

SEQ ID NO: 90716 - protein, 221 aa, Arabidopsis thaliana
  peptide (1)..(221): Ceres Seq. ID no. 12724979
  misc_feature (1)..(197): Pfam Name: MBOAT family Pfam Description: MBOAT family
  misc_feature (1)..(221): Homolog of NCBI NO: 15240500 NR Description: wax synthase-like protein; protein id:
  misc_feature (1)..(216): Homolog of NCBI NO: 15240499 NR Description: wax synthase-like protein; protein id: At5g55370.1
  misc_feature (1)..(216): Homolog of NCBI NO: 15240497 NR Description: wax synthase-like protein; protein id: At5g55350.1
  misc_feature (1)..(216): Homolog of NCBI NO: 15240496 NR Description: putative protein; protein id: At5g55340.1, by cDNA: 115917. [Arabidopsis thaliana] contains similarity to wax synthase~gene_id:MTE17.5 [Arabidopsis
  misc_feature (1)..(216): Homolog of NCBI NO: 15240498 NR Description: wax synthase-like protein; protein id: At5g55360.1
  misc_feature (1)..(216): Homolog of NCBI NO: 15218662 NR Description: hypothetical protein; protein id: At1g34500.1
  misc_feature (1)..(216): Homolog of NCBI NO: 8778260 NR Description: F12K21.17 [Arabidopsis thaliana]
  misc_feature (1)..(213): Homolog of NCBI NO: 15240495 NR Description: wax synthase-like protein; protein id: At5g55330.1
  misc_feature (1)..(216): Homolog of NCBI NO: 15218659 NR Description: hypothetical protein; protein id: At1g34490.1
  misc_feature (1)..(216): Homolog of NCBI NO: 27728714 NR Description: wax synthase isoform 1 [Vitis vinifera]
MPKWVLAVKILVLGVLLHVYEYRDGLPRFVVLALYCLHIYLEVELVLVFVGAVVSTLLGCNIEPVFNEPYLATSLQDFWSRRWNLMVSAVLRSTVHIPVQRFFKRILSPDGAMFAGVMASFFVSGLMHELLYFYMIRKPPTWEVTCFFVLHGAATATEIAVKRTQWLRPPHRAVSGLVVLTFVSVTGVWLFLAQVLRNNVHEKAIGECLLVLDLAKLFTSS

SEQ ID NO: 90717 - DNA, 1804 bp, Arabidopsis thaliana
  misc_feature (1)..(1804): Ceres Seq. ID no. 12724996
  misc_feature: MA Experiment ID: 108461 Result: Up-regulated in Transcription
  misc_feature: MA Experiment 108461 PARAMETER Experiment Name: At_Germinating_Seeds_cDNA_P Parameter: Age (day) Value: 1 vs. 0
  misc_feature: MA Experiment 108461 PARAMETER Experiment Name: At_Germinating_Seeds_cDNA_P Parameter: Tissue Value: Germinating Seeds
  misc_feature: MA Experiment ID: 108463 Result: Up-regulated in Transcription
  misc_feature: MA Experiment 108463 PARAMETER Experiment Name: At_Germinating_Seeds_cDNA_P Parameter: Age (day) Value: 3 vs. 0
  misc_feature: MA Experiment 108463 PARAMETER Experiment Name: At_Germinating_Seeds_cDNA_P Parameter: Tissue Value: Germinating Seeds
  misc_feature: MA Experiment ID: 108464 Result: Up-regulated in Transcription
  misc_feature: MA Experiment 108464 PARAMETER Experiment Name: At_Germinating_Seeds_cDNA_P Parameter: Age (day) Value: 4 vs. 0
  misc_feature: MA Experiment 108464 PARAMETER Experiment Name: At_Germinating_Seeds_cDNA_P Parameter: Tissue Value: Germinating Seeds
  misc_feature: MA Experiment ID: 108573 Result: Up-regulated in Transcription
  misc_feature: MA Experiment 108573 PARAMETER Experiment Name: At_Drought_cDNA_P Parameter: Timepoint (hr) Value: 6
  misc_feature: MA Experiment 108573 PARAMETER Experiment Name: At_Drought_cDNA_P Parameter: Tissue Value: Aerial
  misc_feature: MA Experiment 108573 PARAMETER Experiment Name: At_Drought_cDNA_P Parameter: Treatment Value: Drought vs. No Drought
  misc_feature: MA Experiment ID: 20000113 Result: Down-regulated in Transcription
  misc_feature: MA Experiment 20000113 PARAMETER Experiment Name: At_42deg_Heat_cDNA_P Parameter: Temperature (deg C) Value: 42 vs. 22
  misc_feature: MA Experiment 20000113 PARAMETER Experiment Name: At_42deg_Heat_cDNA_P Parameter: Timepoint (hr) Value: 8
  misc_feature: MA Experiment 20000113 PARAMETER Experiment Name: At_42deg_Heat_cDNA_P Parameter: Tissue Value: Aerial
  misc_feature: MA Experiment ID: 20000224 Result: Up-regulated in Transcription
ataggatgaacaaaaacatcctctgtttctctcttttcatatttttctccacatttcctcatctgggtcatctccaaaaatggtgcttttttttaataattcttcacgtttctgggtttttggttttgtgatttgatgatgctttttttttgtttttttcagatttgatgataacccaaattcgcaatttgattaggacaacaacaacaactttatttatctgattccgtctttgattttcagacaagaaaagtatgttgtttctaagtcttttgatttttttcaatttcatctccttactcgatttttttttttttgggtttctctgaattggagcagaaaaaaaaaagatggaatcggatctggggaagctcttcattggtgggatttcgtgggatacagacgaagaaaggttaagagactactttagcaactatggtgatgttgttgaagctgtgatcatgagagatcgtgccacaggtcgtgcacgtggcttcggcttcattgtctttgcagacccctgtgtctcagagagagtgatcatggataaacacatcatcgatggccgcacggttgaggcgaagaaggctgtgcctcgagatgatcagcaggtgctaaagcgacacgctagtcctatccaccttatgtcacctgtccatggtggtggtggaaggacaaagaagatcttcgttggaggtttaccgtctagcattaccgaggaggagttcaagaactactttgatcagtttggtactattgctgatgttgttgtaatgtatgatcataacacgcagaggccaagaggttttggcttcatcacatttgattcagatgatgctgttgatagagttcttcacaagaccttccatgagctcaatgggaaactagttgaggtcaaaagagctgtacctaaggagatttcccctgtttctaatatccgaagcccgcttgctagcggtgttaactatggaggcgggtctaataggatgcctgctaatagctactttaacaactttgctcctggtcctggtttttataacagtctaggtcctgttggtcgtcggtttagtcctgttattggtagtggtagaaatgcggtttctgcttttggcctcggtttgaatcatgacttgagtttgaatttgaatccaagctgcgatgggacaagttctacgtttggttataaccgtattccaagcaacccttacttcaacggtgcttccccgaaccgttacacctctccaatcgggcacaatagaactgagtctccttacaattcgaacaatagagacttatggggaaacagaaccgacactgcaggtcccggttggaacttgaatgtctcgaatggaaacaacagaggaaattggggacttccttcttcttctgctgttagtaatgataacaatggctttggaaggaactatgggacaagttctggactttcctcgtccccatttaatggttttgaaggttctataggggaactgtacagaggcggctcagtctacagcgactcaacgtggcagcaacagcagctaccatctcagtcttctcacgagctagacaatttgtctcgcgcttacggttatgatattgacaatgtaggttcagacccatctgcaaatgacccagaaacttacaatggaagctacaatgttggaaatagacaaactaatagaggtaacaaaaaaattcatctcaataaaacttgtaacttggatacattttgatcgcaatcgaaatgttctgatctgtgttttatttacttgttgaggtattgctgcataggttatcaaaaacc

SEQ ID NO: 90718 - protein, 460 aa, Arabidopsis thaliana
  peptide (1)..(460): Ceres Seq. ID no. 12724997
  misc_feature (112)..(182): Pfam Name: RNA recognition motif. (a.k.a. RRM, RBD, or RNP domain) Pfam Description: RNA recognition motif. (a.k.a. RRM, RBD, or RNP
  misc_feature (1)..(460): Homolog of NCBI NO: 18423760 NR Description: heterogeneous nuclear ribonucleoprotein (hnRNP), protein id: At5g55550.1, supported by cDNA: gi_15292724,
  misc_feature (1)..(445): Homolog of NCBI NO: 30696616 NR Description: RNA recognition motif (RRM)-containing protein
  misc_feature (1)..(444): Homolog of NCBI NO: 9758187 NR Description: RNA-binding protein-like [Arabidopsis thaliana]
  misc_feature (1)..(445): Homolog of NCBI NO: 22531168 NR Description: RNA-binding protein-like [Arabidopsis thaliana]
  misc_feature (1)..(445): Homolog of NCBI NO: 18416794 NR Description: heterogeneous nuclear ribonucleoprotein (hnRNP), protein id: At4g26650.1, supported by cDNA: gi_16930502, by cDNA: gi_20453244 [Arabidopsis thaliana]
  misc_feature (3)..(445): Homolog of NCBI NO: 7487039 NR Description: hypothetical protein T15N24.100 - Arabidopsis
  misc_feature (65)..(420): Homolog of NCBI NO: 2582639 NR Description: hnRNP-like protein [Arabidopsis thaliana]
  misc_feature (1)..(415): Homolog of NCBI NO: 6648193 NR Description: putative RNA-binding protein [Arabidopsis
  misc_feature (1)..(415): Homolog of NCBI NO: 18398061 NR Description: heterogeneous nuclear ribonucleoprotein (hnRNP), protein id: At3g07810.1, supported by cDNA: gi_15292696, by cDNA: gi_16930692 [Arabidopsis thaliana]
  misc_feature (1)..(415): Homolog of NCBI NO: 30680456 NR Description: heterogeneous nuclear ribonucleoprotein (hnRNP),
MESDLGKLFIGGISWDTDEERLRDYFSNYGDVVEAVIMRDRATGRARGFGFIVFADPCVSERVIMDKHIIDGRTVEAKKAVPRDDQQVLKRHASPIHLMSPVHGGGGRTKKIFVGGLPSSITEEEFKNYFDQFGTIADVVVMYDHNTQRPRGFGFITFDSDDAVDRVLHKTFHELNGKLVEVKRAVPKEISPVSNIRSPLASGVNYGGGSNRMPANSYFNNFAPGPGFYNSLGPVGRRFSPVIGSGRNAVSAFGLGLNHDLSLNLNPSCDGTSSTFGYNRIPSNPYFNGASPNRYTSPIGHNRTESPYNSNNRDLWGNRTDTAGPGWNLNVSNGNNRGNWGLPSSSAVSNDNNGFGRNYGTSSGLSSSPFNGFEGSIGELYRGGSVYSDSTWQQQQLPSQSSHELDNLSRAYGYDIDNVGSDPSANDPETYNGSYNVGNRQTNRGNKKIHLNKTCNLDTF

SEQ ID NO: 90719 - protein, 423 aa, Arabidopsis thaliana
  peptide (1)..(423): Ceres Seq. ID no. 12724998
  misc_feature (75)..(145): Pfam Name: RNA recognition motif. (a.k.a. RRM, RBD, or RNP domain) Pfam Description: RNA recognition motif. (a.k.a. RRM, RBD, or RNP
  misc_feature (1)..(423): Homolog of NCBI NO: 18423760 NR Description: heterogeneous nuclear ribonucleoprotein (hnRNP), protein id: At5g55550.1, supported by cDNA: gi_15292724,
  misc_feature (1)..(408): Homolog of NCBI NO: 30696616 NR Description: RNA recognition motif (RRM)-containing protein
  misc_feature (1)..(407): Homolog of NCBI NO: 9758187 NR Description: RNA-binding protein-like [Arabidopsis thaliana]
  misc_feature (1)..(408): Homolog of NCBI NO: 22531168 NR Description: RNA-binding protein-like [Arabidopsis thaliana]
  misc_feature (1)..(408): Homolog of NCBI NO: 18416794 NR Description: heterogeneous nuclear ribonucleoprotein (hnRNP), protein id: At4g26650.1, supported by cDNA: gi_16930502, by cDNA: gi_20453244 [Arabidopsis thaliana]
  misc_feature (1)..(408): Homolog of NCBI NO: 7487039 NR Description: hypothetical protein T15N24.100 - Arabidopsis
  misc_feature (28)..(383): Homolog of NCBI NO: 2582639 NR Description: hnRNP-like protein [Arabidopsis thaliana]
  misc_feature (1)..(378): Homolog of NCBI NO: 6648193 NR Description: putative RNA-binding protein [Arabidopsis
  misc_feature (1)..(378): Homolog of NCBI NO: 18398061 NR Description: heterogeneous nuclear ribonucleoprotein (hnRNP), protein id: At3g07810.1, supported by cDNA: gi_15292696, by cDNA: gi_16930692 [Arabidopsis thaliana]
  misc_feature (1)..(378): Homolog of NCBI NO: 30680456 NR Description: heterogeneous nuclear ribonucleoprotein (hnRNP),
MRDRATGRARGFGFIVFADPCVSERVIMDKHIIDGRTVEAKKAVPRDDQQVLKRHASPIHLMSPVHGGGGRTKKIFVGGLPSSITEEEFKNYFDQFGTIADVVVMYDHNTQRPRGFGFITFDSDDAVDRVLHKTFHELNGKLVEVKRAVPKEISPVSNIRSPLASGVNYGGGSNRMPANSYFNNFAPGPGFYNSLGPVGRRFSPVIGSGRNAVSAFGLGLNHDLSLNLNPSCDGTSSTFGYNRIPSNPYFNGASPNRYTSPIGHNRTESPYNSNNRDLWGNRTDTAGPGWNLNVSNGNNRGNWGLPSSSAVSNDNNGFGRNYGTSSGLSSSPFNGFEGSIGELYRGGSVYSDSTWQQQQLPSQSSHELDNLSRAYGYDIDNVGSDPSANDPETYNGSYNVGNRQTNRGNKKIHLNKTCNLDTF

SEQ ID NO: 90720 - protein, 396 aa, Arabidopsis thaliana
  peptide (1)..(396): Ceres Seq. ID no. 12724999
  misc_feature (48)..(118): Pfam Name: RNA recognition motif. (a.k.a. RRM, RBD, or RNP domain) Pfam Description: RNA recognition motif. (a.k.a. RRM, RBD, or RNP
  misc_feature (1)..(396): Homolog of NCBI NO: 18423760 NR Description: heterogeneous nuclear ribonucleoprotein (hnRNP), protein id: At5g55550.1, supported by cDNA: gi_15292724,
  misc_feature (1)..(381): Homolog of NCBI NO: 30696616 NR Description: RNA recognition motif (RRM)-containing protein
  misc_feature (1)..(380): Homolog of NCBI NO: 9758187 NR Description: RNA-binding protein-like [Arabidopsis thaliana]
  misc_feature (1)..(381): Homolog of NCBI NO: 22531168 NR Description: RNA-binding protein-like [Arabidopsis thaliana]
  misc_feature (1)..(381): Homolog of NCBI NO: 18416794 NR Description: heterogeneous nuclear ribonucleoprotein (hnRNP), protein id: At4g26650.1, supported by cDNA: gi_16930502, by cDNA: gi_20453244 [Arabidopsis thaliana]
  misc_feature (1)..(381): Homolog of NCBI NO: 7487039 NR Description: hypothetical protein T15N24.100 - Arabidopsis
  misc_feature (1)..(356): Homolog of NCBI NO: 2582639 NR Description: hnRNP-like protein [Arabidopsis thaliana]
  misc_feature (1)..(351): Homolog of NCBI NO: 6648193 NR Description: putative RNA-binding protein [Arabidopsis
  misc_feature (1)..(351): Homolog of NCBI NO: 18398061 NR Description: heterogeneous nuclear ribonucleoprotein (hnRNP), protein id: At3g07810.1, supported by cDNA: gi_15292696, by cDNA: gi_16930692 [Arabidopsis thaliana]
  misc_feature (1)..(351): Homolog of NCBI NO: 30680456 NR Description: heterogeneous nuclear ribonucleoprotein (hnRNP),
MDKHIIDGRTVEAKKAVPRDDQQVLKRHASPIHLMSPVHGGGGRTKKIFVGGLPSSITEEEFKNYFDQFGTIADVVVMYDHNTQRPRGFGFITFDSDDAVDRVLHKTFHELNGKLVEVKRAVPKEISPVSNIRSPLASGVNYGGGSNRMPANSYFNNFAPGPGFYNSLGPVGRRFSPVIGSGRNAVSAFGLGLNHDLSLNLNPSCDGTSSTFGYNRIPSNPYFNGASPNRYTSPIGHNRTESPYNSNNRDLWGNRTDTAGPGWNLNVSNGNNRGNWGLPSSSAVSNDNNGFGRNYGTSSGLSSSPFNGFEGSIGELYRGGSVYSDSTWQQQQLPSQSSHELDNLSRAYGYDIDNVGSDPSANDPETYNGSYNVGNRQTNRGNKKIHLNKTCNLDTF

SEQ ID NO: 90721 - DNA, 1251 bp, Arabidopsis thaliana
  misc_feature (1)..(1251): Ceres Seq. ID no. 12725038
  misc_feature: MA Experiment ID: 108464 Result: Down-regulated in Transcription
  misc_feature: MA Experiment 108464 PARAMETER Experiment Name: At_Germinating_Seeds_cDNA_P Parameter: Age (day) Value: 4 vs. 0
  misc_feature: MA Experiment 108464 PARAMETER Experiment Name: At_Germinating_Seeds_cDNA_P Parameter: Tissue Value: Germinating Seeds
  misc_feature: MA Experiment ID: 108573 Result: Up-regulated in Transcription
  misc_feature: MA Experiment 108573 PARAMETER Experiment Name: At_Drought_cDNA_P Parameter: Timepoint (hr) Value: 6
  misc_feature: MA Experiment 108573 PARAMETER Experiment Name: At_Drought_cDNA_P Parameter: Tissue Value: Aerial
  misc_feature: MA Experiment 108573 PARAMETER Experiment Name: At_Drought_cDNA_P Parameter: Treatment Value: Drought vs. No Drought
  misc_feature: MA Experiment ID: 108576 Result: Down-regulated in Transcription
  misc_feature: MA Experiment 108576 PARAMETER Experiment Name: At_42deg_Heat_cDNA_P Parameter: Temperature (deg C) Value: 42 vs. 22
  misc_feature: MA Experiment 108576 PARAMETER Experiment Name: At_42deg_Heat_cDNA_P Parameter: Timepoint (hr) Value: 1
  misc_feature: MA Experiment 108576 PARAMETER Experiment Name: At_42deg_Heat_cDNA_P Parameter: Tissue Value: Aerial
  misc_feature: MA Experiment ID: 108577 Result: Down-regulated in Transcription
  misc_feature: MA Experiment 108577 PARAMETER Experiment Name: At_42deg_Heat_cDNA_P Parameter: Temperature (deg C) Value: 42 vs. 22
  misc_feature: MA Experiment 108577 PARAMETER Experiment Name: At_42deg_Heat_cDNA_P Parameter: Timepoint (hr) Value: 6
  misc_feature: MA Experiment 108577 PARAMETER Experiment Name: At_42deg_Heat_cDNA_P Parameter: Tissue Value: Aerial
  misc_feature: MA Experiment ID: 108595 Result: Down-regulated in Transcription
  misc_feature: MA Experiment 108595 PARAMETER Experiment Name: At_Ler-pi_Ovule_cDNA_P Parameter: Plant Line Value: null
  misc_feature: MA Experiment ID: 20000224 Result: Down-regulated in Transcription
  misc_feature: MA Experiment ID: 20000286 Result: Up-regulated in Transcription
  misc_feature: MA Experiment 20000286 PARAMETER Experiment Name: At_Open_Flower_P Parameter: Age (day) Value: 21
  misc_feature: MA Experiment 20000286 PARAMETER Experiment Name: At_Open_Flower_P Parameter: Plant Line Value: WS
  misc_feature: MA Experiment 20000286 PARAMETER Experiment Name: At_Open_Flower_P Parameter: Tissue Value: Half Open vs. Whole Plant
  misc_feature: MA Experiment ID: 20000573 Result: Up-regulated in Transcription
  misc_feature: MA Experiment 20000573 PARAMETER Experiment Name: At_100uM_ABA_Mutants__P Parameter: Organism Value: A. thaliana
  misc_feature: MA Experiment 20000573 PARAMETER Experiment Name: At_100uM_ABA_Mutants__P Parameter: Plant Line Value: CS22 vs. Ler wt
  misc_feature: MA Experiment 20000573 PARAMETER Experiment Name: At_100uM_ABA_Mutants__P Parameter: Timepoint (hr) Value: N/A
  misc_feature: MA Experiment 20000573 PARAMETER Experiment Name: At_100uM_ABA_Mutants__P Parameter: Tissue Value: Whole Plant
  misc_feature: MA Experiment 20000573 PARAMETER Experiment Name: At_100uM_ABA_Mutants__P Parameter: Treatment Value: None
atctttgaaatggatgacgatgggtttcgtaattggggttactatgaaccagctgctgctacctttaaaggtaatctcggtttgcagctaatgtctaccattgatcggaacactaaaccgtttttacctgggcgggatccgaatctaatgatggggcctaacgggtcatatcaccaccaagagcctcctatccacatgagctacaattggattaaccaacagaaggataagttcttcaatatgttgcctgttacaacagccactcctaactacggtaatgtccttcccgaaacttcgtctgctccgtcgatgcagatgaatctccatcatcatcttcaaaccgaggagaatccggttaagttggaagaagagattgttgttcagactaagaagagaaagaccaatgcaaaagctggctcgactccaaaggctaagaagccaaggaaaccaaaggatgagaacagtaacaacaacaacaacaacaacacgaatgttactcgagttaaacccgctaagaaaagtgttgacttggtgatcaatggagtgagtatggacatttcgggtcttcctgttcctatctgcacttgcactggagctcctcagcaatgctaccgttggggatgtggcggttggcagtctgcttgttgtaccacaaacatctcaatgcatccattaccaatgagtactaaacgccgtggagcgaggatctcgggaaggaagatgagtcaaggcgcgtttaagaaggttcttgagaaacttgcttctgatgggtttaactttgggaatccgattgatcttaagagccattgggcaagacatggaactaacaagttcgtcacaatcagatgattagttgcttgattagtaaaacagaacaagtgagtgtttctcttccgggatggaatctctcaatgatggtgtatgtatatacaacaaatctgaaatctgtgaccttttcaaaaattctgtctgcaatctgagttcgattctgttttcaggtaaaccatcttcgttgtagggtttggaagcagagttctctgttttctttaccacttttttttatcacacttttgctttgttttttgtttgtttgtctatctgtgtgtctgaggaagaagaaggtgtctgagaaaaaatctgcagggaaatttatttttttgtactttttttttttcttccttttgttatctttttataaacattttactgacttgtaacagatattcttttaattaaatgtttttatttttc

SEQ ID NO: 90722 - protein, 282 aa, Arabidopsis thaliana
  peptide (1)..(282): Ceres Seq. ID no. 12725039
  misc_feature (4)..(282): Homolog of NCBI NO: 18394147 NR Description: expressed protein; protein id: At1g14685.1, by cDNA: gi_16604349 [Arabidopsis thaliana] T5E21.17 [Arabidopsis thaliana]
  misc_feature (4)..(282): Homolog of NCBI NO: 18391534 NR Description: expressed protein; protein id: At2g01930.1, by cDNA: 6899., supported by cDNA: gi_17528981, supported by gi_20465480 [Arabidopsis thaliana] >gi|25410944|pir||H84430
  misc_feature (4)..(282): Homolog of NCBI NO: 21594368 NR Description: unknown [Arabidopsis thaliana]
IFEMDDDGFRNWGYYEPAAATFKGNLGLQLMSTIDRNTKPFLPGRDPNLMMGPNGSYHHQEPPIHMSYNWINQQKDKFFNMLPVTTATPNYGNVLPETSSAPSMQMNLHHHLQTEENPVKLEEEIVVQTKKRKTNAKAGSTPKAKKPRKPKDENSNNNNNNNTNVTRVKPAKKSVDLVINGVSMDISGLPVPICTCTGAPQQCYRWGCGGWQSACCTTNISMHPLPMSTKRRGARISGRKMSQGAFKKVLEKLASDGFNFGNPIDLKSHWARHGTNKFVTIR

SEQ ID NO: 90723 - protein, 279 aa, Arabidopsis thaliana; identical to SEQ ID NO: 44176
  peptide (1)..(279): Ceres Seq. ID no. 12725040
  misc_feature (1)..(279): Homolog of NCBI NO: 18394147 NR Description: expressed protein; protein id: At1g14685.1, by cDNA: gi_16604349 [Arabidopsis thaliana] T5E21.17 [Arabidopsis thaliana]
  misc_feature (1)..(279): Homolog of NCBI NO: 18391534 NR Description: expressed protein; protein id: At2g01930.1, by cDNA: 6899., supported by cDNA: gi_17528981, supported by gi_20465480 [Arabidopsis thaliana] >gi|25410944|pir||H84430
  misc_feature (1)..(279): Homolog of NCBI NO: 21594368 NR Description: unknown [Arabidopsis thaliana]

SEQ ID NO: 90724 - protein, 252 aa, Arabidopsis thaliana; identical to SEQ ID NO: 44177
  peptide (1)..(252): Ceres Seq. ID no. 12725041
  misc_feature (1)..(252): Homolog of NCBI NO: 18394147 NR Description: expressed protein; protein id: At1g14685.1, by cDNA: gi_16604349 [Arabidopsis thaliana] T5E21.17 [Arabidopsis thaliana]
  misc_feature (1)..(252): Homolog of NCBI NO: 18391534 NR Description: expressed protein; protein id: At2g01930.1, by cDNA: 6899., supported by cDNA: gi_17528981, supported by gi_20465480 [Arabidopsis thaliana] >gi|25410944|pir||H84430
  misc_feature (1)..(252): Homolog of NCBI NO: 21594368 NR Description: unknown [Arabidopsis thaliana]

SEQ ID NO: 90725 - DNA, 1706 bp, Arabidopsis thaliana
  misc_feature (1)..(1706): Ceres Seq. ID no. 12725045
  misc_feature: MA Experiment ID: 108461 Result: Up-regulated in Transcription
  misc_feature: MA Experiment 108461 PARAMETER Experiment Name: At_Germinating_Seeds_cDNA_P Parameter: Age (day) Value: 1 vs. 0
  misc_feature: MA Experiment 108461 PARAMETER Experiment Name: At_Germinating_Seeds_cDNA_P Parameter: Tissue Value: Germinating Seeds
  misc_feature: MA Experiment ID: 108573 Result: Up-regulated in Transcription
  misc_feature: MA Experiment 108573 PARAMETER Experiment Name: At_Drought_cDNA_P Parameter: Timepoint (hr) Value: 6
  misc_feature: MA Experiment 108573 PARAMETER Experiment Name: At_Drought_cDNA_P Parameter: Tissue Value: Aerial
  misc_feature: MA Experiment 108573 PARAMETER Experiment Name: At_Drought_cDNA_P Parameter: Treatment Value: Drought vs. No Drought
  misc_feature: MA Experiment ID: 108585 Result: Up-regulated in Transcription
  misc_feature: MA Experiment 108585 PARAMETER Experiment Name: At_5mM_NaNP_cDNA_P Parameter: Timepoint (hr) Value: 6
  misc_feature: MA Experiment 108585 PARAMETER Experiment Name: At_5mM_NaNP_cDNA_P Parameter: Tissue Value: Aerial
  misc_feature: MA Experiment 108585 PARAMETER Experiment Name: At_5mM_NaNP_cDNA_P Parameter: Treatment Value: null
  misc_feature: MA Experiment ID: 20000113 Result: Down-regulated in Transcription
  misc_feature: MA Experiment 20000113 PARAMETER Experiment Name: At_42deg_Heat_cDNA_P Parameter: Temperature (deg C) Value: 42 vs. 22
  misc_feature: MA Experiment 20000113 PARAMETER Experiment Name: At_42deg_Heat_cDNA_P Parameter: Timepoint (hr) Value: 8
  misc_feature: MA Experiment 20000113 PARAMETER Experiment Name: At_42deg_Heat_cDNA_P Parameter: Tissue Value: Aerial
  misc_feature: MA Experiment ID: 20000224 Result: Up-regulated in Transcription
acacacacctctctttcctcaaaaaccctagatctctccctctctctctctctctctctccatctcttgtctttgccttttacgaagcttcccttcccttagtttatacattactctcagctctctttatttcactcagcttcacgttgaagacgagtttctctatttgccagatctgttatctttcacatttctggtgattgcttctctaatttcgttctgggttttactgtttccatctgaaatttacctcatttcttcgtgggttttatctgaattccgttaattcccaagttctagtgtatgatctcgttgaaatcgagttaaaaatctgatctttactcttgattctgcagatctgtttgaagaaagctatgacttgtgtttgataaagagagaagcaaaaaaaggaacagtttttatataaagatatttgctttatttgtttgttcttaattgttgccacgaaaatggcaatgccaccacctggaaatgttactactccgtctgagaaattgcagtttcctcctccggcaaattggatcccagacgagcgagatgggtttatctcctggcttcgtgcggagttcgctgcggctaacgcgatcatcgattcgctttgtcagcatctacaagcggttggggatcacaacgagtacgaatccgtgatcggaagcattcatcatcgtcgcttagcctggtctcaagtgcttactatgcagcagtttttcccagttgcagatgtttcttacaatcttcagcagattgcttggaaaaggcaacagcaaatgccacctcaaaggcattacaattctgatcaagttgggaaatttggagcaaggagatcagggcctgggtttaacaagcatcatggtggtggtgggggttacagaggagctgattcgatggcgagaaatgggcataatttcaatggcgttaacagtgatcgtgttgagcatcgggaggaagctaagttggcaagtgatgttaaggcattgtctgttgcagaagagaagagagatggtagcgagaaaccgaggagtgatagtaaagttgagaaaaaattggaagaatctgaaactcaagaggagatagtgaagaaccataagtgtaactcgggttctaaagataacagtctcatttctgagcaaaagcaggaggagaacgataaagagtgtcctgcaagcatggcaaagacttttgtggttcaagagatgtatgatgcaaaaatggttaatgttgtcgaaggattgaagctatacgacaaaatgcttgacgcaaacgaagtttctcaactcgtttctcttgtaaccaatctgagacttgctggaagaagaggtcaacttcaaagtgaggcatatgtgggttataaacggccaaatagaggacatggacgtgagatgatccaactcggtcttcctatagctgatacgccgcctgatgatgatagtatcaaagatcgaagaatagagccaatcccatcagctctttcagacatcattgaacgtttggtctcaaagcaaatcatacctgtgaaaccagacgcatgcatcattgatttcttcagcgagggagatcactcgcagcctcatatgtttgttccctggtttggacgacccatcagtgtcttgtccttgtctgaatgtgattatacatttggaagagtcattgtctctgaaaatcccggcgactacaaaggctctctc

SEQ ID NO: 90726 - protein, 412 aa, Arabidopsis thaliana
  peptide (1)..(412): Ceres Seq. ID no. 12725046
  misc_feature (356)..(411): Pfam Name: 2OG-Fe(II) oxygenase superfamily Pfam Description: 2OG-Fe(II) oxygenase superfamily
  misc_feature (1)..(411): Homolog of NCBI NO: 18394153 NR Description: expressed protein; protein id: At1g14710.1
  misc_feature (1)..(331): Homolog of NCBI NO: 8778238 NR Description: F10B6.11 [Arabidopsis thaliana]
  misc_feature (330)..(411): Homolog of NCBI NO: 8778238 NR Description: F10B6.11 [Arabidopsis thaliana]
  misc_feature (1)..(177): Homolog of NCBI NO: 37530586 NR Description: unknown protein [Oryza sativa (japonica
  misc_feature (244)..(411): Homolog of NCBI NO: 37530586 NR Description: unknown protein [Oryza sativa (japonica
  misc_feature (178)..(411): Homolog of NCBI NO: 15236223 NR Description: hypothetical protein; protein id: At4g02940.1, by cDNA: gi_20260287 [Arabidopsis thaliana]
  misc_feature (6)..(111): Homolog of NCBI NO: 15236223 NR Description: hypothetical protein; protein id: At4g02940.1, by cDNA: gi_20260287 [Arabidopsis thaliana]
  misc_feature (122)..(411): Homolog of NCBI NO: 29367427 NR Description: unknown [Oryza sativa (japonica cultivar-group)]
  misc_feature (215)..(411): Homolog of NCBI NO: 25409091 NR Description: hypothetical protein At2g48080 [imported] - thaliana >gi|4249414|gb|AAD13711.1| unknown protein [Arabidopsis
  misc_feature (20)..(98): Homolog of NCBI NO: 25409091 NR Description: hypothetical protein At2g48080 [imported] - thaliana >gi|4249414|gb|AAD13711.1| unknown protein [Arabidopsis
MAMPPPGNVTTPSEKLQFPPPANWIPDERDGFISWLRAEFAAANAIIDSLCQHLQAVGDHNEYESVIGSIHHRRLAWSQVLTMQQFFPVADVSYNLQQIAWKRQQQMPPQRHYNSDQVGKFGARRSGPGFNKHHGGGGGYRGADSMARNGHNFNGVNSDRVEHREEAKLASDVKALSVAEEKRDGSEKPRSDSKVEKKLEESETQEEIVKNHKCNSGSKDNSLISEQKQEENDKECPASMAKTFVVQEMYDAKMVNVVEGLKLYDKMLDANEVSQLVSLVTNLRLAGRRGQLQSEAYVGYKRPNRGHGREMIQLGLPIADTPPDDDSIKDRRIEPIPSALSDIIERLVSKQIIPVKPDACIIDFFSEGDHSQPHMFVPWFGRPISVLSLSECDYTFGRVIVSENPGDYKGSL

SEQ ID NO: 90727 - protein, 410 aa, Arabidopsis thaliana
  peptide (1)..(410): Ceres Seq. ID no. 12725047
  misc_feature (354)..(409): Pfam Name: 2OG-Fe(II) oxygenase superfamily Pfam Description: 2OG-Fe(II) oxygenase superfamily
  misc_feature (1)..(409): Homolog of NCBI NO: 18394153 NR Description: expressed protein; protein id: At1g14710.1
  misc_feature (1)..(329): Homolog of NCBI NO: 8778238 NR Description: F10B6.11 [Arabidopsis thaliana]
  misc_feature (328)..(409): Homolog of NCBI NO: 8778238 NR Description: F10B6.11 [Arabidopsis thaliana]
  misc_feature (1)..(175): Homolog of NCBI NO: 37530586 NR Description: unknown protein [Oryza sativa (japonica
  misc_feature (242)..(409): Homolog of NCBI NO: 37530586 NR Description: unknown protein [Oryza sativa (japonica
  misc_feature (176)..(409): Homolog of NCBI NO: 15236223 NR Description: hypothetical protein; protein id: At4g02940.1, by cDNA: gi_20260287 [Arabidopsis thaliana]
  misc_feature (4)..(109): Homolog of NCBI NO: 15236223 NR Description: hypothetical protein; protein id: At4g02940.1, by cDNA: gi_20260287 [Arabidopsis thaliana]
  misc_feature (120)..(409): Homolog of NCBI NO: 29367427 NR Description: unknown [Oryza sativa (japonica cultivar-group)]
  misc_feature (213)..(409): Homolog of NCBI NO: 25409091 NR Description: hypothetical protein At2g48080 [imported] - thaliana >gi|4249414|gb|AAD13711.1| unknown protein [Arabidopsis
  misc_feature (18)..(96): Homolog of NCBI NO: 25409091 NR Description: hypothetical protein At2g48080 [imported] - thaliana >gi|4249414|gb|AAD13711.1| unknown protein [Arabidopsis
MPPPGNVTTPSEKLQFPPPANWIPDERDGFISWLRAEFAAANAIIDSLCQHLQAVGDHNEYESVIGSIHHRRLAWSQVLTMQQFFPVADVSYNLQQIAWKRQQQMPPQRHYNSDQVGKFGARRSGPGFNKHHGGGGGYRGADSMARNGHNFNGVNSDRVEHREEAKLASDVKALSVAEEKRDGSEKPRSDSKVEKKLEESETQEEIVKNHKCNSGSKDNSLISEQKQEENDKECPASMAKTFVVQEMYDAKMVNVVEGLKLYDKMLDANEVSQLVSLVTNLRLAGRRGQLQSEAYVGYKRPNRGHGREMIQLGLPIADTPPDDDSIKDRRIEPIPSALSDIIERLVSKQIIPVKPDACIIDFFSEGDHSQPHMFVPWFGRPISVLSLSECDYTFGRVIVSENPGDYKGSL

SEQ ID NO: 90728 - protein, 330 aa, Arabidopsis thaliana
  peptide (1)..(330): Ceres Seq. ID no. 12725048
  misc_feature (274)..(329): Pfam Name: 2OG-Fe(II) oxygenase superfamily Pfam Description: 2OG-Fe(II) oxygenase superfamily
  misc_feature (1)..(329): Homolog of NCBI NO: 18394153 NR Description: expressed protein; protein id: At1g14710.1
  misc_feature (1)..(249): Homolog of NCBI NO: 8778238 NR Description: F10B6.11 [Arabidopsis thaliana]
  misc_feature (248)..(329): Homolog of NCBI NO: 8778238 NR Description: F10B6.11 [Arabidopsis thaliana]
  misc_feature (1)..(95): Homolog of NCBI NO: 37530586 NR Description: unknown protein [Oryza sativa (japonica
  misc_feature (162)..(329): Homolog of NCBI NO: 37530586 NR Description: unknown protein [Oryza sativa (japonica
  misc_feature (96)..(329): Homolog of NCBI NO: 15236223 NR Description: hypothetical protein; protein id: At4g02940.1, by cDNA: gi_20260287 [Arabidopsis thaliana]
  misc_feature (1)..(29): Homolog of NCBI NO: 15236223 NR Description: hypothetical protein; protein id: At4g02940.1, by cDNA: gi_20260287 [Arabidopsis thaliana]
  misc_feature (40)..(329): Homolog of NCBI NO: 29367427 NR Description: unknown [Oryza sativa (japonica cultivar-group)]
  misc_feature (133)..(329): Homolog of NCBI NO: 25409091 NR Description: hypothetical protein At2g48080 [imported] - thaliana >gi|4249414|gb|AAD13711.1| unknown protein [Arabidopsis
  misc_feature (1)..(16): Homolog of NCBI NO: 25409091 NR Description: hypothetical protein At2g48080 [imported] - thaliana >gi|4249414|gb|AAD13711.1| unknown protein [Arabidopsis
MQQFFPVADVSYNLQQIAWKRQQQMPPQRHYNSDQVGKFGARRSGPGFNKHHGGGGGYRGADSMARNGHNFNGVNSDRVEHREEAKLASDVKALSVAEEKRDGSEKPRSDSKVEKKLEESETQEEIVKNHKCNSGSKDNSLISEQKQEENDKECPASMAKTFVVQEMYDAKMVNVVEGLKLYDKMLDANEVSQLVSLVTNLRLAGRRGQLQSEAYVGYKRPNRGHGREMIQLGLPIADTPPDDDSIKDRRIEPIPSALSDIIERLVSKQIIPVKPDACIIDFFSEGDHSQPHMFVPWFGRPISVLSLSECDYTFGRVIVSENPGDYKGSL

SEQ ID NO: 90729 - DNA, 811 bp, Arabidopsis thaliana
  misc_feature (1)..(811): Ceres Seq. ID no. 12725049
  misc_feature: MA Experiment ID: 108433 Result: Up-regulated in Transcription
  misc_feature: MA Experiment 108433 PARAMETER Experiment Name: At_rhl_Mutant2_cDNA_P Parameter: Age (day) Value: 7
  misc_feature: MA Experiment 108433 PARAMETER Experiment Name: At_rhl_Mutant2_cDNA_P Parameter: Organism Value: A. thaliana
  misc_feature: MA Experiment 108433 PARAMETER Experiment Name: At_rhl_Mutant2_cDNA_P Parameter: Plant Line Value: rhl Mutant vs. wt landsburg
  misc_feature: MA Experiment 108433 PARAMETER Experiment Name: At_rhl_Mutant2_cDNA_P Parameter: Tissue Value: Roots
  misc_feature: MA Experiment ID: 108434 Result: Down-regulated in Transcription
  misc_feature: MA Experiment 108434 PARAMETER Experiment Name: At_Root_Tips_cDNA_P Parameter: Tissue Value: Root Tips
  misc_feature: MA Experiment ID: 108462 Result: Up-regulated in Transcription
  misc_feature: MA Experiment 108462 PARAMETER Experiment Name: At_Germinating_Seeds_cDNA_P Parameter: Age (day) Value: 2 vs. 0
  misc_feature: MA Experiment 108462 PARAMETER Experiment Name: At_Germinating_Seeds_cDNA_P Parameter: Tissue Value: Germinating Seeds
  misc_feature: MA Experiment ID: 108463 Result: Up-regulated in Transcription
  misc_feature: MA Experiment 108463 PARAMETER Experiment Name: At_Germinating_Seeds_cDNA_P Parameter: Age (day) Value: 3 vs. 0
  misc_feature: MA Experiment 108463 PARAMETER Experiment Name: At_Germinating_Seeds_cDNA_P Parameter: Tissue Value: Germinating Seeds
  misc_feature: MA Experiment ID: 108464 Result: Up-regulated in Transcription
  misc_feature: MA Experiment 108464 PARAMETER Experiment Name: At_Germinating_Seeds_cDNA_P Parameter: Age (day) Value: 4 vs. 0
  misc_feature: MA Experiment 108464 PARAMETER Experiment Name: At_Germinating_Seeds_cDNA_P Parameter: Tissue Value: Germinating Seeds
  misc_feature: MA Experiment ID: 108501 Result: Up-regulated in Transcription
  misc_feature: MA Experiment 108501 PARAMETER Experiment Name: At_ap2_floral_buds_cDNA_P Parameter: Plant Line Value: ap2 (Ler.)
  misc_feature: MA Experiment 108501 PARAMETER Experiment Name: At_ap2_floral_buds_cDNA_P Parameter: Tissue Value: Closed Flower
  misc_feature: MA Experiment ID: 20000112 Result: Down-regulated in Transcription
  misc_feature: MA Experiment 20000112 PARAMETER Experiment Name: At_42deg_Heat_cDNA_P Parameter: Temperature (deg C) Value: 42 vs. 22
  misc_feature: MA Experiment 20000112 PARAMETER Experiment Name: At_42deg_Heat_cDNA_P Parameter: Timepoint (hr) Value: 2
  misc_feature: MA Experiment 20000112 PARAMETER Experiment Name: At_42deg_Heat_cDNA_P Parameter: Tissue Value: Aerial
  misc_feature: MA Experiment ID: 20000182 Result: Up-regulated in Transcription
  misc_feature: MA Experiment 20000182 PARAMETER Experiment Name: At_2mM_SA_P Parameter: Age (day) Value: 14
  misc_feature: MA Experiment 20000182 PARAMETER Experiment Name: At_2mM_SA_P Parameter: Organism Value: A. thaliana
  misc_feature: MA Experiment 20000182 PARAMETER Experiment Name: At_2mM_SA_P Parameter: Plant Line Value: WS
  misc_feature: MA Experiment 20000182 PARAMETER Experiment Name: At_2mM_SA_P Parameter: Timepoint (hr) Value: 6
  misc_feature: MA Experiment 20000182 PARAMETER Experiment Name: At_2mM_SA_P Parameter: Tissue Value: Aerial
  misc_feature: MA Experiment 20000182 PARAMETER Experiment Name: At_2mM_SA_P Parameter: Treatment Value: 2mM SA vs. No Treatment
  misc_feature: MA Experiment ID: 20000185 Result: Down-regulated in Transcription
  misc_feature: MA Experiment 20000185 PARAMETER Experiment Name: At_Roots__P Parameter: Age (day) Value: 7 vs. 21
  misc_feature: MA Experiment 20000185 PARAMETER Experiment Name: At_Roots__P Parameter: Organism Value: A. thaliana
  misc_feature: MA Experiment 20000185 PARAMETER Experiment Name: At_Roots__P Parameter: Tissue Value: Roots vs. Whole Plant
  misc_feature: MA Experiment ID: 20000441 Result: Up-regulated in Transcription
  misc_feature: MA Experiment 20000441 PARAMETER Experiment Name: At_1uM_BR-BRZ__P Parameter: Tissue Value: Shoot Apices
  misc_feature: MA Experiment 20000441 PARAMETER Experiment Name: At_1uM_BR-BRZ__P Parameter: Treatment Value: 1uM BR vs. No Treatment
  misc_feature: MA Experiment ID: 20000495 Result: Up-regulated in Transcription
  misc_feature: MA Experiment 20000495 PARAMETER Experiment Name: At_Guard_Cells_P Parameter: Harvest Date Value: 8/2/2002
  misc_feature: MA Experiment 20000495 PARAMETER Experiment Name: At_Guard_Cells_P Parameter: Organism Value: A. thaliana
  misc_feature: MA Experiment 20000495 PARAMETER Experiment Name: At_Guard_Cells_P Parameter: Tissue Value: Guard Cells vs. Leaves
  misc_feature: MA Experiment ID: 20001248 Result: Up-regulated in Transcription
  misc_feature: MA Experiment 20001248 PARAMETER Experiment Name: At_Far-red-induction_P Parameter: Age (day) Value: 7
  misc_feature: MA Experiment 20001248 PARAMETER Experiment Name: At_Far-red-induction_P Parameter: Light Value: Far-red vs. White
  misc_feature: MA Experiment 20001248 PARAMETER Experiment Name: At_Far-red-induction_P Parameter: Organism Value: A. thaliana
  misc_feature: MA Experiment 20001248 PARAMETER Experiment Name: At_Far-red-induction_P Parameter: Plant Line Value: Columbia
  misc_feature: MA Experiment 20001248 PARAMETER Experiment Name: At_Far-red-induction_P Parameter: Timepoint (hr) Value: 4
  misc_feature: MA Experiment 20001248 PARAMETER Experiment Name: At_Far-red-induction_P Parameter: Tissue Value: Whole Plant
  misc_feature: MA Experiment ID: 20001450 Result: Up-regulated in Transcription
  misc_feature: MA Experiment 20001450 PARAMETER Experiment Name: At_Far-red-induction_P Parameter: Age (day) Value: 7
  misc_feature: MA Experiment 20001450 PARAMETER Experiment Name: At_Far-red-induction_P Parameter: Light Value: Far-red vs. White
  misc_feature: MA Experiment 20001450 PARAMETER Experiment Name: At_Far-red-induction_P Parameter: Organism Value: A. thaliana
  misc_feature: MA Experiment 20001450 PARAMETER Experiment Name: At_Far-red-induction_P Parameter: Plant Line Value: Columbia
  misc_feature: MA Experiment 20001450 PARAMETER Experiment Name: At_Far-red-induction_P Parameter: Timepoint (hr) Value: 8
  misc_feature: MA Experiment 20001450 PARAMETER Experiment Name: At_Far-red-induction_P Parameter: Tissue Value: Whole Plant
  misc_feature: MA Experiment ID: 20001906 Result: Down-regulated in Transcription
  misc_feature: MA Experiment 20001906 PARAMETER Experiment Name: At_Drought_Reproduction_P Parameter: Age (day) Value: 35
  misc_feature: MA Experiment 20001906 PARAMETER Experiment Name: At_Drought_Reproduction_P Parameter: Organism Value: A. thaliana
  misc_feature: MA Experiment 20001906 PARAMETER Experiment Name: At_Drought_Reproduction_P Parameter: Plant Line Value: WS
  misc_feature: MA Experiment 20001906 PARAMETER Experiment Name: At_Drought_Reproduction_P Parameter: Timepoint (day) Value: 5
  misc_feature: MA Experiment 20001906 PARAMETER Experiment Name: At_Drought_Reproduction_P Parameter: Tissue Value: Siliques
  misc_feature: MA Experiment 20001906 PARAMETER Experiment Name: At_Drought_Reproduction_P Parameter: Treatment Value: Drought vs. No Drought
aaagaagaaataaacagagtaaaaaacttaaagcttaaaatggggaggcagctttatacgacgacggttctctacttagtcaccctactcttcatttgccggacaatctcagccgtccgtttccctccggaacaaccaacaaccgatgatctagatttcatccgtacgagctgcaacacaacgctgtatccagacgtatgttacacgtctctagctggatacgcctccgccgtccaagataatccggcaaggctagctaaactcgcaatcggcgtttctctctcccgcgcaaaatacacggcggcttacctctccaaactctcacgtcgcgctgcctcagctgctgtccacgactgcgtttcgaacgtgggagatgccgtggatcagatgcgtggctccctaaggcagctccgagagatgaaccaccgtcgtcccggagatccggcgtttaggtttcagatgagtaacgtgcagacgtggatgagcgcggcgttgacggacgaggagacgtgtacggatggggtcacggaggagatggaagacggagagacgaagacggctatttgcgatagagtcgccgacgtcaagaggttcacgagtaatgcgctcgctctcgttaatacctacgccaacaatggagcctaactaactaagctaggtcttgaaattcctaaagttataaaaacacttgtatatatatatgtgttaagttgtgtgcttagtttataatgtgtattcgaggctttgaaaccgagttagaactctgagtttgggtgttcaaattatacattaatctatgtttgattgtatt

SEQ ID NO: 90730 - protein, 214 aa, Arabidopsis thaliana; identical to SEQ ID NO: 22357
  peptide (1)..(214): Ceres Seq. ID no. 12725050
  misc_feature (14)..(214): Homolog of NCBI NO: 18394174 NR Description: expressed protein; protein id: At1g14890.1, by cDNA: 33355., supported by cDNA: gi_17529115 [Arabidopsis
  misc_feature (17)..(214): Homolog of NCBI NO: 15226321 NR Description: unknown protein; protein id: At2g01610.1
  misc_feature (26)..(211): Homolog of NCBI NO: 21554277 NR Description: unknown [Arabidopsis thaliana]
  misc_feature (22)..(211): Homolog of NCBI NO: 18409660 NR Description: expressed protein; protein id: At1g70720.1,
  misc_feature (22)..(211): Homolog of NCBI NO: 25406069 NR Description: hypothetical protein F5A18.10 [imported] -
  misc_feature (48)..(207): Homolog of NCBI NO: 15220674 NR Description: Unknown protein; protein id: At1g23205.1, by cDNA: 28033. [Arabidopsis thaliana] >gi|25402977|pir||D86366
  misc_feature (48)..(207): Homolog of NCBI NO: 21555465 NR Description: unknown [Arabidopsis thaliana]
  misc_feature (53)..(210): Homolog of NCBI NO: 112717 NR Description: 21 KD PROTEIN PRECURSOR (1.2 PROTEIN)
  misc_feature (14)..(210): Homolog of NCBI NO: 15232790 NR Description: putative protein; protein id: At3g47380.1
  misc_feature (14)..(211): Homolog of NCBI NO: 15234982 NR Description: putative protein; protein id: At4g25260.1, by cDNA: gi_16604469, supported by cDNA: gi_18958029 [Arabidopsis

SEQ ID NO: 90731 - protein, 201 aa, Arabidopsis thaliana; identical to SEQ ID NO: 22358
  peptide (1)..(201): Ceres Seq. ID no. 12725051
  misc_feature (1)..(201): Homolog of NCBI NO: 18394174 NR Description: expressed protein; protein id: At1g14890.1, by cDNA: 33355., supported by cDNA: gi_17529115 [Arabidopsis
  misc_feature (4)..(201): Homolog of NCBI NO: 15226321 NR Description: unknown protein; protein id: At2g01610.1
  misc_feature (13)..(198): Homolog of NCBI NO: 21554277 NR Description: unknown [Arabidopsis thaliana]
  misc_feature (9)..(198): Homolog of NCBI NO: 18409660 NR Description: expressed protein; protein id: At1g70720.1,
  misc_feature (9)..(198): Homolog of NCBI NO: 25406069 NR Description: hypothetical protein F5A18.10 [imported] -
  misc_feature (35)..(194): Homolog of NCBI NO: 15220674 NR Description: Unknown protein; protein id: At1g23205.1, by cDNA: 28033. [Arabidopsis thaliana] >gi|25402977|pir||D86366
  misc_feature (35)..(194): Homolog of NCBI NO: 21555465 NR Description: unknown [Arabidopsis thaliana]
  misc_feature (40)..(197): Homolog of NCBI NO: 112717 NR Description: 21 KD PROTEIN PRECURSOR (1.2 PROTEIN)
  misc_feature (1)..(197): Homolog of NCBI NO: 15232790 NR Description: putative protein; protein id: At3g47380.1
  misc_feature (1)..(198): Homolog of NCBI NO: 15234982 NR Description: putative protein; protein id: At4g25260.1, by cDNA: gi_16604469, supported by cDNA: gi_18958029 [Arabidopsis

SEQ ID NO: 90732 - DNA, 1189 bp, Arabidopsis thaliana
  misc_feature (1)..(1189): Ceres Seq. ID no. 12725056
  misc_feature: MA Experiment ID: 108434 Result: Down-regulated in Transcription
  misc_feature: MA Experiment 108434 PARAMETER Experiment Name: At_Root_Tips_cDNA_P Parameter: Tissue Value: Root Tips
  misc_feature: MA Experiment ID: 108579 Result: Up-regulated in Transcription
  misc_feature: MA Experiment 108579 PARAMETER Experiment Name: At_4deg_Cold_cDNA_P Parameter: Temperature (deg C) Value: 4 vs. 22
  misc_feature: MA Experiment 108579 PARAMETER Experiment Name: At_4deg_Cold_cDNA_P Parameter: Timepoint (hr) Value: 6
  misc_feature: MA Experiment 108579 PARAMETER Experiment Name: At_4deg_Cold_cDNA_P Parameter: Tissue Value: Aerial
  misc_feature: MA Experiment ID: 108595 Result: Down-regulated in Transcription
  misc_feature: MA Experiment 108595 PARAMETER Experiment Name: At_Ler-pi_Ovule_cDNA_P Parameter: Plant Line Value: null
  misc_feature: MA Experiment ID: 108668 Result: Down-regulated in Transcription
  misc_feature: MA Experiment 108668 PARAMETER Experiment Name: At_2mM_SA_cDNA_P Parameter: Plant Line Value: WS
  misc_feature: MA Experiment 108668 PARAMETER Experiment Name: At_2mM_SA_cDNA_P Parameter: Timepoint (hr) Value: 6
  misc_feature: MA Experiment 108668 PARAMETER Experiment Name: At_2mM_SA_cDNA_P Parameter: Treatment Value: 2mM SA vs. No Treatment
  misc_feature: MA Experiment ID: 20000071 Result: Up-regulated in Transcription
  misc_feature: MA Experiment 20000071 PARAMETER Experiment Name: At_100uM_ABA_Mutants_cDNA_P Parameter: Plant Line Value: CS8104
  misc_feature: MA Experiment 20000071 PARAMETER Experiment Name: At_100uM_ABA_Mutants_cDNA_P Parameter: Timepoint (hr) Value: 6
  misc_feature: MA Experiment 20000071 PARAMETER Experiment Name: At_100uM_ABA_Mutants_cDNA_P Parameter: Tissue Value: Aerial
  misc_feature: MA Experiment 20000071 PARAMETER Experiment Name: At_100uM_ABA_Mutants_cDNA_P Parameter: Treatment Value: 100uM ABA vs. No Treatment
  misc_feature: MA Experiment ID: 20000093 Result: Down-regulated in Transcription
  misc_feature: MA Experiment 20000093 PARAMETER Experiment Name: At_42deg_Heat_cDNA_P Parameter: Temperature (deg C) Value: 42 vs. 22
  misc_feature: MA Experiment 20000093 PARAMETER Experiment Name: At_42deg_Heat_cDNA_P Parameter: Timepoint (hr) Value: 0.5
  misc_feature: MA Experiment 20000093 PARAMETER Experiment Name: At_42deg_Heat_cDNA_P Parameter: Tissue Value: Aerial
  misc_feature: MA Experiment ID: 20000111 Result: Down-regulated in Transcription
  misc_feature: MA Experiment 20000111 PARAMETER Experiment Name: At_42deg_Heat_cDNA_P Parameter: Temperature (deg C) Value: 42 vs. 22
  misc_feature: MA Experiment 20000111 PARAMETER Experiment Name: At_42deg_Heat_cDNA_P Parameter: Timepoint (hr) Value: 6
  misc_feature: MA Experiment 20000111 PARAMETER Experiment Name: At_42deg_Heat_cDNA_P Parameter: Tissue Value: Aerial
  misc_feature: MA Experiment ID: 20000112 Result: Down-regulated in Transcription
  misc_feature: MA Experiment 20000112 PARAMETER Experiment Name: At_42deg_Heat_cDNA_P Parameter: Temperature (deg C) Value: 42 vs. 22
  misc_feature: MA Experiment 20000112 PARAMETER Experiment Name: At_42deg_Heat_cDNA_P Parameter: Timepoint (hr) Value: 2
  misc_feature: MA Experiment 20000112 PARAMETER Experiment Name: At_42deg_Heat_cDNA_P Parameter: Tissue Value: Aerial
  misc_feature: MA Experiment ID: 20000144 Result: Down-regulated in Transcription
  misc_feature: MA Experiment 20000144 PARAMETER Experiment Name: At_42deg_Heat_cDNA_P Parameter: Temperature (deg C) Value: 42 vs. 22
  misc_feature: MA Experiment 20000144 PARAMETER Experiment Name: At_42deg_Heat_cDNA_P Parameter: Timepoint (hr) Value: 1
  misc_feature: MA Experiment 20000144 PARAMETER Experiment Name: At_42deg_Heat_cDNA_P Parameter: Tissue Value: Aerial
  misc_feature: MA Experiment ID: 20000171 Result: Down-regulated in Transcription
  misc_feature: MA Experiment 20000171 PARAMETER Experiment Name: At_42deg_Heat_P Parameter: Age (day) Value: 14
  misc_feature: MA Experiment 20000171 PARAMETER Experiment Name: At_42deg_Heat_P Parameter: Organism Value: A. thaliana
  misc_feature: MA Experiment 20000171 PARAMETER Experiment Name: At_42deg_Heat_P Parameter: Plant Line Value: WS
  misc_feature: MA Experiment 20000171 PARAMETER Experiment Name: At_42deg_Heat_P Parameter: Temperature (deg C) Value: 42 vs. 22
  misc_feature: MA Experiment 20000171 PARAMETER Experiment Name: At_42deg_Heat_P Parameter: Timepoint (hr) Value: 1
  misc_feature: MA Experiment 20000171 PARAMETER Experiment Name: At_42deg_Heat_P Parameter: Tissue Value: Aerial
  misc_feature: MA Experiment ID: 20000182 Result: Down-regulated in Transcription
  misc_feature: MA Experiment 20000182 PARAMETER Experiment Name: At_2mM_SA_P Parameter: Age (day) Value: 14
  misc_feature: MA Experiment 20000182 PARAMETER Experiment Name: At_2mM_SA_P Parameter: Organism Value: A. thaliana
  misc_feature: MA Experiment 20000182 PARAMETER Experiment Name: At_2mM_SA_P Parameter: Plant Line Value: WS
  misc_feature: MA Experiment 20000182 PARAMETER Experiment Name: At_2mM_SA_P Parameter: Timepoint (hr) Value: 6
  misc_feature: MA Experiment 20000182 PARAMETER Experiment Name: At_2mM_SA_P Parameter: Tissue Value: Aerial
  misc_feature: MA Experiment 20000182 PARAMETER Experiment Name: At_2mM_SA_P Parameter: Treatment Value: 2mM SA vs. No Treatment
  misc_feature: MA Experiment ID: 20000437 Result: Up-regulated in Transcription
  misc_feature: MA Experiment 20000437 PARAMETER Experiment Name: At_Drought_P Parameter: Age (day) Value: 8
  misc_feature: MA Experiment 20000437 PARAMETER Experiment Name: At_Drought_P Parameter: Organism Value: A. thaliana
  misc_feature: MA Experiment 20000437 PARAMETER Experiment Name: At_Drought_P Parameter: Plant Line Value: WS
  misc_feature: MA Experiment 20000437 PARAMETER Experiment Name: At_Drought_P Parameter: Timepoint (hr) Value: 24
  misc_feature: MA Experiment 20000437 PARAMETER Experiment Name: At_Drought_P Parameter: Tissue Value: Whole Plant
  misc_feature: MA Experiment 20000437 PARAMETER Experiment Name: At_Drought_P Parameter: Treatment Value: Drought vs. No Drought
  misc_feature: MA Experiment ID: 20000794 Result: Down-regulated in Transcription
  misc_feature: MA Experiment 20000794 PARAMETER Experiment Name: At_Petals_P Parameter: Age (day) Value: 23-25 days
  misc_feature: MA Experiment 20000794 PARAMETER Experiment Name: At_Petals_P Parameter: Plant Line Value: WS
  misc_feature: MA Experiment 20000794 PARAMETER Experiment Name: At_Petals_P Parameter: Tissue Value: Petals vs. Whole plant
  misc_feature: MA Experiment ID: 20001556 Result: Up-regulated in Transcription
  misc_feature: MA Experiment 20001556 PARAMETER Experiment Name: At_Drought_Soil_Dry_P Parameter: Age (day) Value: 26
  misc_feature: MA Experiment 20001556 PARAMETER Experiment Name: At_Drought_Soil_Dry_P Parameter: Organism Value: A. thaliana
  misc_feature: MA Experiment 20001556 PARAMETER Experiment Name: At_Drought_Soil_Dry_P Parameter: Plant Line Value: WS
  misc_feature: MA Experiment 20001556 PARAMETER Experiment Name: At_Drought_Soil_Dry_P Parameter: Post Timepoint (hr) Value: None
  misc_feature: MA Experiment 20001556 PARAMETER Experiment Name: At_Drought_Soil_Dry_P Parameter: Post-Treatment Value: None
  misc_feature: MA Experiment 20001556 PARAMETER Experiment Name: At_Drought_Soil_Dry_P Parameter: Timepoint (day) Value: 12
  misc_feature: MA Experiment 20001556 PARAMETER Experiment Name: At_Drought_Soil_Dry_P Parameter: Treatment Value: Drought vs. No Drought
  misc_feature: MA Experiment ID: 20001905 Result: Up-regulated in Transcription
  misc_feature: MA Experiment 20001905 PARAMETER Experiment Name: At_Drought_Reproduction_P Parameter: Age (day) Value: 40
  misc_feature: MA Experiment 20001905 PARAMETER Experiment Name: At_Drought_Reproduction_P Parameter: Organism Value: A. thaliana
  misc_feature: MA Experiment 20001905 PARAMETER Experiment Name: At_Drought_Reproduction_P Parameter: Plant Line Value: WS
  misc_feature: MA Experiment 20001905 PARAMETER Experiment Name: At_Drought_Reproduction_P Parameter: Timepoint (day) Value: 10
  misc_feature: MA Experiment 20001905 PARAMETER Experiment Name: At_Drought_Reproduction_P Parameter: Tissue Value: Rosettes
  misc_feature: MA Experiment 20001905 PARAMETER Experiment Name: At_Drought_Reproduction_P Parameter: Treatment Value: Drought vs. No Drought
  misc_feature: MA Experiment ID: 20001908 Result: Up-regulated in Transcription
  misc_feature: MA Experiment 20001908 PARAMETER Experiment Name: At_Drought_Reproduction_P Parameter: Age (day) Value: 40
  misc_feature: MA Experiment 20001908 PARAMETER Experiment Name: At_Drought_Reproduction_P Parameter: Organism Value: A. thaliana
  misc_feature: MA Experiment 20001908 PARAMETER Experiment Name: At_Drought_Reproduction_P Parameter: Plant Line Value: WS
  misc_feature: MA Experiment 20001908 PARAMETER Experiment Name: At_Drought_Reproduction_P Parameter: Timepoint (day) Value: 10
  misc_feature: MA Experiment 20001908 PARAMETER Experiment Name: At_Drought_Reproduction_P Parameter: Tissue Value: Siliques
  misc_feature: MA Experiment 20001908 PARAMETER Experiment Name: At_Drought_Reproduction_P Parameter: Treatment Value: Drought vs. No Drought
  misc_feature: MA Experiment ID: 20001911 Result: Up-regulated in Transcription
  misc_feature: MA Experiment 20001911 PARAMETER Experiment Name: At_Drought_Reproduction_P Parameter: Age (day) Value: 40
  misc_feature: MA Experiment 20001911 PARAMETER Experiment Name: At_Drought_Reproduction_P Parameter: Organism Value: A. thaliana
  misc_feature: MA Experiment 20001911 PARAMETER Experiment Name: At_Drought_Reproduction_P Parameter: Plant Line Value: WS
  misc_feature: MA Experiment 20001911 PARAMETER Experiment Name: At_Drought_Reproduction_P Parameter: Timepoint (day) Value: 10
  misc_feature: MA Experiment 20001911 PARAMETER Experiment Name: At_Drought_Reproduction_P Parameter: Tissue Value: Flowers
  misc_feature: MA Experiment 20001911 PARAMETER Experiment Name: At_Drought_Reproduction_P Parameter: Treatment Value: Drought vs. No Drought
gtttttcattcataacaaaaaatgggttttataactcgatttttagttttcatgtcactcttcaccagtttggtttctggatttgctctacaaaagcttcctcttatacagttcgacgaaggttacacacagctctttggtgaccagaatcttattgttcacagagatggaaaatctgtccggttaacgcttgatgaaagaaccggttctggatttgtctcaaatgatatttacttgcatggcttcttcagttcctctatcaaattgccagcagattactctgcaggagttgttatcgccttttatttatcaaatggggacttatatgagaagaatcatgacgagattgattttgagtttttggggaatattagaggcagagaatggaggattcagaccaatatatacggtaatggaagcacacacttgggcagagaagaaagatacaatctttggtttgatccaacagaggatttccatcaatacagtatcctttggtctctatctcacatcatattttatgtagacaatgttccgatcagagaagtcaaacgtacggcgtcgatgggcggtgacttcccggcgaagccaatgtctttatattcaaccatatgggatggttccaaatgggcgactgatggaggcaagtacggtgtaaattacaaatatgccccttacgtctctcaattcactgatctgatcctccacggctgcgccgttgaccccaccgagaagtttccgagctgcaaagatgaagcggttcagaatctccggctagcatcggagataacggagtctcagaggaacaagatggagattttccgacagaaacacatgacttattcgtattgttacgatcatatgaggtacaaggtggttttgtcggagtgtgttgtgaatccggctgaggctaagcgtctcagggtctatgatccggtcacgttcggtgggattcctcacggccaccgtcgtgggaagcatcggagcaggagccgattagctcgaactgagtcgatatgaatcggtgtatattgttcggctagagggcatttttggcattttctgtcttgtataggaatactatgaattatggactgaataatggaatgacaccgctatattttgatttcctccattttatgaacattatcgttttaacataataataaaatttcatttttctataagt

SEQ ID NO: 90733 - protein, 332 aa, Arabidopsis thaliana; identical to SEQ ID NO: 30747
  peptide (1)..(332): Ceres Seq. ID no. 12725057
  misc_feature (31)..(216): Pfam Name: Glycosyl hydrolases family 16 Pfam Description: Glycosyl hydrolases family 16
  misc_feature (1)..(332): Homolog of NCBI NO: 15223878 NR Description: xyloglucan endotransglycosylase (XTR2); protein At1g14720.1, supported by cDNA: 19079., supported by cDNA: supported by cDNA: gi_14326520, supported by cDNA: gi_2154610
  misc_feature (1)..(332): Homolog of NCBI NO: 5533313 NR Description: endoxyloglucan transferase [Arabidopsis thaliana]
  misc_feature (1)..(332): Homolog of NCBI NO: 15226364 NR Description: xyloglucan endotransglycosylase (EXGT-A3); id: At2g01850.1, supported by cDNA: 18876., supported by cDNA: supported by cDNA: gi_2154608 [Arabidopsis thaliana]
  misc_feature (1)..(332): Homolog of NCBI NO: 21553969 NR Description: putative xyloglucan-specific glucanase
  misc_feature (17)..(331): Homolog of NCBI NO: 6681351 NR Description: ETAG-A3 [Lycopersicon esculentum]
  misc_feature (24)..(324): Homolog of NCBI NO: 13560781 NR Description: endoxyloglucan transferase [Daucus carota]
  misc_feature (7)..(325): Homolog of NCBI NO: 2129774 NR Description: xyloglucan endo-1,4-beta-D-glucanase (EC 3.2.1.-) - Arabidopsis thaliana (fragment) >gi|1244754|gb|AAB18365.1|
  misc_feature (7)..(325): Homolog of NCBI NO: 15222593 NR Description: xyloglucan endotransglycosylase (XTR4), putative; id: At1g32170.1, supported by cDNA: 21403., supported by cDNA: [Arabidopsis thaliana] >gi|25313534|pir||B86446 probable
  misc_feature (7)..(325): Homolog of NCBI NO: 21618261 NR Description: endoxyloglucan transferase, putative [Arabidopsis
  misc_feature (26)..(329): Homolog of NCBI NO: 32470643 NR Description: putative xyloglucan endotransglycosylase-related

SEQ ID NO: 90734 - protein, 322 aa, Arabidopsis thaliana; identical to SEQ ID NO: 30748
  peptide (1)..(322): Ceres Seq. ID no. 12725058
  misc_feature (21)..(206): Pfam Name: Glycosyl hydrolases family 16 Pfam Description: Glycosyl hydrolases family 16
  misc_feature (1)..(322): Homolog of NCBI NO: 15223878 NR Description: xyloglucan endotransglycosylase (XTR2); protein At1g14720.1, supported by cDNA: 19079., supported by cDNA: supported by cDNA: gi_14326520, supported by cDNA: gi_2154610
  misc_feature (1)..(322): Homolog of NCBI NO: 5533313 NR Description: endoxyloglucan transferase [Arabidopsis thaliana]
  misc_feature (1)..(322): Homolog of NCBI NO: 15226364 NR Description: xyloglucan endotransglycosylase (EXGT-A3); id: At2g01850.1, supported by cDNA: 18876., supported by cDNA: supported by cDNA: gi_2154608 [Arabidopsis thaliana]
  misc_feature (1)..(322): Homolog of NCBI NO: 21553969 NR Description: putative xyloglucan-specific glucanase
  misc_feature (7)..(321): Homolog of NCBI NO: 6681351 NR Description: ETAG-A3 [Lycopersicon esculentum]
  misc_feature (14)..(314): Homolog of NCBI NO: 13560781 NR Description: endoxyloglucan transferase [Daucus carota]
  misc_feature (1)..(315): Homolog of NCBI NO: 2129774 NR Description: xyloglucan endo-1,4-beta-D-glucanase (EC 3.2.1.-) - Arabidopsis thaliana (fragment) >gi|1244754|gb|AAB18365.1|
  misc_feature (1)..(315): Homolog of NCBI NO: 15222593 NR Description: xyloglucan endotransglycosylase (XTR4), putative; id: At1g32170.1, supported by cDNA: 21403., supported by cDNA: [Arabidopsis thaliana] >gi|25313534|pir||B86446 probable
  misc_feature (1)..(315): Homolog of NCBI NO: 21618261 NR Description: endoxyloglucan transferase, putative [Arabidopsis
  misc_feature (16)..(319): Homolog of NCBI NO: 32470643 NR Description: putative xyloglucan endotransglycosylase-related

SEQ ID NO: 90735 - DNA, 657 bp, Arabidopsis thaliana
  misc_feature (1)..(657): Ceres Seq. ID no. 12725063
  misc_feature: MA Experiment ID: 20000314 Result: Up-regulated in Transcription
  misc_feature: MA Experiment 20000314 PARAMETER Experiment Name: At_14day_Shoots-Roots_Sub_P Parameter: Age (day) Value: 14
  misc_feature: MA Experiment 20000314 PARAMETER Experiment Name: At_14day_Shoots-Roots_Sub_P Parameter: Organism Value: A. thaliana
  misc_feature: MA Experiment 20000314 PARAMETER Experiment Name: At_14day_Shoots-Roots_Sub_P Parameter: Plant Line Value: WS
  misc_feature: MA Experiment 20000314 PARAMETER Experiment Name: At_14day_Shoots-Roots_Sub_P Parameter: Tissue Value: Roots vs. Whole Plant
  misc_feature: MA Experiment ID: 20000346 Result: Up-regulated in Transcription
  misc_feature: MA Experiment 20000346 PARAMETER Experiment Name: At_2mM_SA_Sub_P Parameter: Age (day) Value: 14
  misc_feature: MA Experiment 20000346 PARAMETER Experiment Name: At_2mM_SA_Sub_P Parameter: Organism Value: A. thaliana
  misc_feature: MA Experiment 20000346 PARAMETER Experiment Name: At_2mM_SA_Sub_P Parameter: Plant Line Value: WS
  misc_feature: MA Experiment 20000346 PARAMETER Experiment Name: At_2mM_SA_Sub_P Parameter: Timepoint (hr) Value: 1
  misc_feature: MA Experiment 20000346 PARAMETER Experiment Name: At_2mM_SA_Sub_P Parameter: Tissue Value: Aerial
  misc_feature: MA Experiment 20000346 PARAMETER Experiment Name: At_2mM_SA_Sub_P Parameter: Treatment Value: 2mM SA vs. No Treatment
  misc_feature: MA Experiment ID: 20000347 Result: Up-regulated in Transcription
  misc_feature: MA Experiment 20000347 PARAMETER Experiment Name: At_2mM_SA_Sub_P Parameter: Age (day) Value: 14
  misc_feature: MA Experiment 20000347 PARAMETER Experiment Name: At_2mM_SA_Sub_P Parameter: Organism Value: A. thaliana
  misc_feature: MA Experiment 20000347 PARAMETER Experiment Name: At_2mM_SA_Sub_P Parameter: Plant Line Value: WS
  misc_feature: MA Experiment 20000347 PARAMETER Experiment Name: At_2mM_SA_Sub_P Parameter: Timepoint (hr) Value: 6
  misc_feature: MA Experiment 20000347 PARAMETER Experiment Name: At_2mM_SA_Sub_P Parameter: Tissue Value: Aerial
  misc_feature: MA Experiment 20000347 PARAMETER Experiment Name: At_2mM_SA_Sub_P Parameter: Treatment Value: 2mM SA vs. No Treatment
  misc_feature: MA Experiment ID: 20000355 Result: Down-regulated in Transcription
  misc_feature: MA Experiment 20000355 PARAMETER Experiment Name: At_Siliques_Sub_P Parameter: Age (day) Value: 21
  misc_feature: MA Experiment 20000355 PARAMETER Experiment Name: At_Siliques_Sub_P Parameter: Organism Value: A. thaliana
  misc_feature: MA Experiment 20000355 PARAMETER Experiment Name: At_Siliques_Sub_P Parameter: Plant Line Value: WS
  misc_feature: MA Experiment 20000355 PARAMETER Experiment Name: At_Siliques_Sub_P Parameter: Tissue Value: Less Than 5mm Siliques vs. Whole Plant
  misc_feature: MA Experiment ID: 20000440 Result: Down-regulated in Transcription
  misc_feature: MA Experiment 20000440 PARAMETER Experiment Name: At_Closed-Flower__Sub_P Parameter: Tissue Value: Closed Flower vs. Whole Plant
acaaaaccttacattgctttccatttaaaactctcttcttcttttttgttctctctctctcttcatggaagctcaacaccttcatgccaagcctcatgctgaaggagaatggtccacaggcttctgtgattgcttttctgactgcaaaaattgttgtatcacattctggtgtccatgtatcacctttggccaagtcgccgagattgtagatcgaggatccacatcgtgtggtactgctggagctctatacgcgttgatagccgtagtaactggttgtgcatgtatatactcatgtttctatcgtggaaagatgagagctcaatataatattaaaggagatgattgtactgattgccttaaacatttctgctgtgagctttgttctttgacccaacaataccgtgaactcaagcaccgcggttacgatatgagtcttggatgggcggggaacgtggagagacaacagaatcaaggaggtgtggccatgggtgctccggtcttccaaggcggcatgacccgctaagaattatttctttatgtaattcatttgtcttttatatgtagtaataaaacgaggtttaatcctctgtttgtgttgttaatatgcttgttgtgatttgaacaaaaaaaaatgcttgttgtgaaagtttagacata

SEQ ID NO: 90736 - protein, 152 aa, Arabidopsis thaliana; identical to SEQ ID NO: 27254
  peptide (1)..(152): Ceres Seq. ID no. 12725064
  misc_feature (12)..(116): Pfam Name: Protein of unknown function, DUF614 Pfam Description: Protein of unknown function, DUF614
  misc_feature (1)..(152): Homolog of NCBI NO: 15223920 NR Description: unknown protein; protein id: At1g14870.1, by cDNA: gi_18252924 [Arabidopsis thaliana] F10B6.27 [Arabidopsis thaliana] >gi|18252925|gb|AAL62389.1|
  misc_feature (1)..(152): Homolog of NCBI NO: 15223921 NR Description: unknown protein; protein id: At1g14880.1 thaliana] >gi|8778224|gb|AAF79233.1|AC006917_18 F10B6.29 thaliana] >gi|26452733|dbj|BAC43448.1| unknown protein
  misc_feature (54)..(152): Homolog of NCBI NO: 22327352 NR Description: unknown protein; protein id: At5g35525.1
  misc_feature (1)..(33): Homolog of NCBI NO: 22327352 NR Description: unknown protein; protein id: At5g35525.1
  misc_feature (8)..(147): Homolog of NCBI NO: 34897268 NR Description: unknown protein [Oryza sativa (japonica
  misc_feature (10)..(137): Homolog of NCBI NO: 34897274 NR Description: hypothetical protein [Oryza sativa (japonica group)] >gi|28372695|gb|AAO39879.1| hypothetical protein [Oryza
  misc_feature (10)..(132): Homolog of NCBI NO: 34897270 NR Description: hypothetical protein [Oryza sativa (japonica group)] >gi|28372688|gb|AAO39872.1| hypothetical protein [Oryza
  misc_feature (15)..(152): Homolog of NCBI NO: 15221456 NR Description: hypothetical protein; protein id: At1g68610.1
  misc_feature (1)..(152): Homolog of NCBI NO: 8272626 NR Description: ORFX [Lycopersicon esculentum] fw2.2 [Lycopersicon esculentum] >gi|27413997|gb|AAO12186.1| fw2.2 esculentum] >gi|27413999|gb|AAO12187.1| fw2.2 [Lycopersicon
  misc_feature (1)..(152): Homolog of NCBI NO: 27414005 NR Description: fw2.2 [Lycopersicon pimpinellifolium] fw2.2 [Lycopersicon pimpinellifolium] >gi|27414009|gb|AAO12192.1| [Lycopersicon pimpinellifolium] >gi|27414011|gb|AAO12193.1| fw2.2

SEQ ID NO: 90737 - DNA, 2754 bp, Arabidopsis thaliana
  misc_feature (1)..(2754): Ceres Seq. ID no. 12725068
  misc_feature: MA Experiment ID: 20000495 Result: Down-regulated in Transcription
  misc_feature: MA Experiment 20000495 PARAMETER Experiment Name: At_Guard_Cells_P Parameter: Harvest Date Value: 8/2/2002
  misc_feature: MA Experiment 20000495 PARAMETER Experiment Name: At_Guard_Cells_P Parameter: Organism Value: A. thaliana
  misc_feature: MA Experiment 20000495 PARAMETER Experiment Name: At_Guard_Cells_P Parameter: Tissue Value: Guard Cells vs. Leaves
gaagaaaattagaaaaatcggaagagcgatcgaagaggattttgaaccgccatggcttcttcttcgctctctaatctgatgctcgccattcatgagaagaagacgagctccgttgatctctaccgtcctctccgcaactacgttactttcacctactctgagcgcgaggctcagcttatagacgacgatctcgagaccttgaagcagctccgatccgatatagaacgcgtttccgatccttctccagctgctcggcgagaccttctcatctcctattacaaagttctttgtcttgtggagacgcgatttccaatttcccctgacaaggatcatgtcaacgccgtctctttcgtatggtacgatgctttcaagcaaaagcataaagctactcagcagaacattcatttggagaaagcagctgttctattcaatcttggtgctagctacagccagattggactcggtcatgaccgcaccaccgtcgatgggcgtcgtcaggcttcacatgcgttcatggctgcagcaggggcgttcgctcacttgagggataacgagtccattaaggcgacgatcgggccgagcactaccgtggatgtgtcggttgagtgtgttggaatgttggaacggttgatggtggcgcaggcgcaggaatgtgtctttgaaaataccattgctaaaggaagtactcctggtgtctctgctaaaattgctaggcaggttggcatattttatgaggaggctttatctgcgctaatcatttcgccattgaaggatcatttcgacaaaggctggatttctcatgtgcagctgaaagcagcactcttctatggtgaagcttgctttagatatggaaaagagttgcacgagaaagaggaaattgcagaagaaattgcacggctgaggagtggagccagccgtttggcagaagcaaagaagtcttcaaggggagctcctgctcagcttatagaagcgatgaacacactagagtctagcattaatggcaatttggatagggctgtcaaggaaaacgacagagtgtacctcatgagagttccttctccttcttctttgtctccacttcccgccttctcaatggttaagccaatgaacatgactgatattttggatgcaagcaaggaaaaaatgttttcaatccttgttccagacagcagtgcaaaggctctctctagatacactgagatggtcgatgatgtaattagaactcaggcggagagattacagcaagctagcgaactaactcgagttaggctcaaagagatggatcttccagattctattctcgctgtggatggtaattcagctcttcctgttgatcttaaagaagatgtagaagctgttcagatcagtggtggtccagctggcttggaagctgaactgcagcaacttagagatttgaagagggttaatcaggaactgttggtgcacactgaagagcttttgcagaaagaagcaactgaagattctcagttcagaagtcaatttgggactcggtggactaggcctcaatctagcacactgacaaagaacttgcaggataggctaaatcggtttgcagccaatttgaaacaagctggcgaaagtgatgttaagattgagcgatcagtgagagataactccgccctcatgtctattcttgatcgacggccgatagagtctgctgtcccaactcttgctaggccaataatgtctctggacgcaacagaggatgctattgtgggaactttgaagcagagtctgaggcaactggaaaatcttggtgctcagcgggcaggtcttgaagacatgctcaaagagatgaagagaaaggatgacatactgccaaagctgatgaccataacaggctcctatgaagatatgttcaggaaagagatatcaaagtatgaccacatttgtgaagatatttcccaaaacattgaagttcaagaacaattattgatgcaaattcaggctcaaaatgaagagttttcaactattttcaatcttgaagattataaagcatccaaggagaagtgctacaagcagattcaagctgcaataatgaagtatcgagagatcaaggagaacatcaatgagggcctgaagttctatgtcactctccaagatgcaatcacgaatgtgaagcagcagtgcagtgattttgtgatgacaaggagtatccagtgccgagatatgattgaagatgtgcaacgacagatgtctggtttgagttttcaggatcatagaagctccggcccatacccatctgtgcatcaaccaacggcttcaagtccgcctcctccaccagaaactcagaatccatctcatcctcacccacatgcaccatactatagaccgcctgagcagatgtcaaggcctggctactctatcccaccctacggtccacctcccccataccatactcctcatggccaggcgccacaaccataccctcctcaggcacagcaacagcctcatccatcatggcaacaaggctcttactatgatccgcagggacagcagcctcggcctccttatcccggccagagcccataccaacctcctcaccaaggtggaggatactacaggcaatgagttactttgggagcaataaaattctggtgttatatatctattgttgtgtttcctgtgagtacttgatgtgtgtctatctctttgacatgtttctgtcatgaaattgaatatctggtttgatagtgactcaaattctttattcaaagtagagccgatgtgatg

SEQ ID NO: 90738 - protein, 846 aa, Arabidopsis thaliana; identical to SEQ ID NO: 44833
  peptide (1)..(846): Ceres Seq. ID no. 12725069
  misc_feature (9)..(168): Pfam Name: BRO1-like domain Pfam Description: BRO1-like domain
  misc_feature (4)..(839): Homolog of NCBI NO: 37535674 NR Description: putative signal tranduction protein [Oryza sativa
  misc_feature (10)..(817): Homolog of NCBI NO: 19880054 NR Description: ALG-2 interacting protein X [Dictyostelium >gi|28829646|gb|AAO52162.1| similar to Dictyostelium discoideum
  misc_feature (11)..(842): Homolog of NCBI NO: 6424942 NR Description: ALG-2 interacting protein 1 [Homo sapiens]
  misc_feature (16)..(842): Homolog of NCBI NO: 6755002 NR Description: programmed cell death 6 interacting protein [Mus
  misc_feature (16)..(842): Homolog of NCBI NO: 20071292 NR Description: programmed cell death 6 interacting protein [Mus
  misc_feature (11)..(842): Homolog of NCBI NO: 13375569 NR Description: HP95 [Homo sapiens]
  misc_feature (11)..(842): Homolog of NCBI NO: 22027538 NR Description: programmed cell death 6 interacting protein; interacting protein 1 [Homo sapiens]
  misc_feature (16)..(842): Homolog of NCBI NO: 30048422 NR Description: Pdcd6ip protein [Mus musculus]
  misc_feature (11)..(837): Homolog of NCBI NO: 31076857 NR Description: Programmed cell death 6 interacting protein transduction protein Xp95) >gi|4416376|gb|AAD20341.1| putative
  misc_feature (24)..(836): Homolog of NCBI NO: 20521926 NR Description: KIAA1471 protein [Homo sapiens]

SEQ ID NO: 90739 - protein, 837 aa, Arabidopsis thaliana; identical to SEQ ID NO: 44834
  peptide (1)..(837): Ceres Seq. ID no. 12725070
  misc_feature (1)..(159): Pfam Name: BRO1-like domain Pfam Description: BRO1-like domain
  misc_feature (1)..(830): Homolog of NCBI NO: 37535674 NR Description: putative signal tranduction protein [Oryza sativa
  misc_feature (1)..(808): Homolog of NCBI NO: 19880054 NR Description: ALG-2 interacting protein X [Dictyostelium >gi|28829646|gb|AAO52162.1| similar to Dictyostelium discoideum
  misc_feature (2)..(833): Homolog of NCBI NO: 6424942 NR Description: ALG-2 interacting protein 1 [Homo sapiens]
  misc_feature (7)..(833): Homolog of NCBI NO: 6755002 NR Description: programmed cell death 6 interacting protein [Mus
  misc_feature (7)..(833): Homolog of NCBI NO: 20071292 NR Description: programmed cell death 6 interacting protein [Mus
  misc_feature (2)..(833): Homolog of NCBI NO: 13375569 NR Description: HP95 [Homo sapiens]
  misc_feature (2)..(833): Homolog of NCBI NO: 22027538 NR Description: programmed cell death 6 interacting protein; interacting protein 1 [Homo sapiens]
  misc_feature (7)..(833): Homolog of NCBI NO: 30048422 NR Description: Pdcd6ip protein [Mus musculus]
  misc_feature (2)..(828): Homolog of NCBI NO: 31076857 NR Description: Programmed cell death 6 interacting protein transduction protein Xp95) >gi|4416376|gb|AAD20341.1| putative
  misc_feature (15)..(827): Homolog of NCBI NO: 20521926 NR Description: KIAA1471 protein [Homo sapiens]

SEQ ID NO: 90740 - protein, 692 aa, Arabidopsis thaliana; identical to SEQ ID NO: 44835
  peptide (1)..(692): Ceres Seq. ID no. 12725071
  misc_feature (569)..(683): Pfam Name: Extensin-like region Pfam Description: Extensin-like region
  misc_feature (1)..(685): Homolog of NCBI NO: 37535674 NR Description: putative signal tranduction protein [Oryza sativa
  misc_feature (1)..(663): Homolog of NCBI NO: 19880054 NR Description: ALG-2 interacting protein X [Dictyostelium >gi|28829646|gb|AAO52162.1| similar to Dictyostelium discoideum
  misc_feature (1)..(688): Homolog of NCBI NO: 6424942 NR Description: ALG-2 interacting protein 1 [Homo sapiens]
  misc_feature (1)..(688): Homolog of NCBI NO: 6755002 NR Description: programmed cell death 6 interacting protein [Mus
  misc_feature (1)..(688): Homolog of NCBI NO: 20071292 NR Description: programmed cell death 6 interacting protein [Mus
  misc_feature (1)..(688): Homolog of NCBI NO: 13375569 NR Description: HP95 [Homo sapiens]
  misc_feature (1)..(688): Homolog of NCBI NO: 22027538 NR Description: programmed cell death 6 interacting protein; interacting protein 1 [Homo sapiens]
  misc_feature (1)..(688): Homolog of NCBI NO: 30048422 NR Description: Pdcd6ip protein [Mus musculus]
  misc_feature (1)..(683): Homolog of NCBI NO: 31076857 NR Description: Programmed cell death 6 interacting protein transduction protein Xp95) >gi|4416376|gb|AAD20341.1| putative
  misc_feature (1)..(682): Homolog of NCBI NO: 20521926 NR Description: KIAA1471 protein [Homo sapiens]

SEQ ID NO: 90741 - DNA, 911 bp, Arabidopsis thaliana
  misc_feature (1)..(911): Ceres Seq. ID no. 12725072
  misc_feature: MA Experiment ID: 108433 Result: Up-regulated in Transcription
  misc_feature: MA Experiment 108433 PARAMETER Experiment Name: At_rhl_Mutant2_cDNA_P Parameter: Age (day) Value: 7
  misc_feature: MA Experiment 108433 PARAMETER Experiment Name: At_rhl_Mutant2_cDNA_P Parameter: Organism Value: A. thaliana
  misc_feature: MA Experiment 108433 PARAMETER Experiment Name: At_rhl_Mutant2_cDNA_P Parameter: Plant Line Value: rhl Mutant vs. wt landsburg
  misc_feature: MA Experiment 108433 PARAMETER Experiment Name: At_rhl_Mutant2_cDNA_P Parameter: Tissue Value: Roots
  misc_feature: MA Experiment ID: 108434 Result: Down-regulated in Transcription
  misc_feature: MA Experiment 108434 PARAMETER Experiment Name: At_Root_Tips_cDNA_P Parameter: Tissue Value: Root Tips
  misc_feature: MA Experiment ID: 108461 Result: Down-regulated in Transcription
  misc_feature: MA Experiment 108461 PARAMETER Experiment Name: At_Germinating_Seeds_cDNA_P Parameter: Age (day) Value: 1 vs. 0
  misc_feature: MA Experiment 108461 PARAMETER Experiment Name: At_Germinating_Seeds_cDNA_P Parameter: Tissue Value: Germinating Seeds
  misc_feature: MA Experiment ID: 108464 Result: Up-regulated in Transcription
  misc_feature: MA Experiment 108464 PARAMETER Experiment Name: At_Germinating_Seeds_cDNA_P Parameter: Age (day) Value: 4 vs. 0
  misc_feature: MA Experiment 108464 PARAMETER Experiment Name: At_Germinating_Seeds_cDNA_P Parameter: Tissue Value: Germinating Seeds
  misc_feature: MA Experiment ID: 108488 Result: Down-regulated in Transcription
  misc_feature: MA Experiment ID: 108489 Result: Up-regulated in Transcription
  misc_feature: MA Experiment ID: 108561 Result: Up-regulated in Transcription
  misc_feature: MA Experiment 108561 PARAMETER Experiment Name: At_100uM_ABA_cDNA_P Parameter: Timepoint (hr) Value: 6
  misc_feature: MA Experiment 108561 PARAMETER Experiment Name: At_100uM_ABA_cDNA_P Parameter: Tissue Value: Aerial
  misc_feature: MA Experiment 108561 PARAMETER Experiment Name: At_100uM_ABA_cDNA_P Parameter: Treatment Value: 100uM ABA vs. No Treatment
  misc_feature: MA Experiment ID: 108579 Result: Down-regulated in Transcription
  misc_feature: MA Experiment 108579 PARAMETER Experiment Name: At_4deg_Cold_cDNA_P Parameter: Temperature (deg C) Value: 4 vs. 22
  misc_feature: MA Experiment 108579 PARAMETER Experiment Name: At_4deg_Cold_cDNA_P Parameter: Timepoint (hr) Value: 6
  misc_feature: MA Experiment 108579 PARAMETER Experiment Name: At_4deg_Cold_cDNA_P Parameter: Tissue Value: Aerial
  misc_feature: MA Experiment ID: 108668 Result: Up-regulated in Transcription
  misc_feature: MA Experiment 108668 PARAMETER Experiment Name: At_2mM_SA_cDNA_P Parameter: Plant Line Value: WS
  misc_feature: MA Experiment 108668 PARAMETER Experiment Name: At_2mM_SA_cDNA_P Parameter: Timepoint (hr) Value: 6
  misc_feature: MA Experiment 108668 PARAMETER Experiment Name: At_2mM_SA_cDNA_P Parameter: Treatment Value: 2mM SA vs. No Treatment
  misc_feature: MA Experiment ID: 20000070 Result: Up-regulated in Transcription
  misc_feature: MA Experiment 20000070 PARAMETER Experiment Name: At_100uM_ABA_Mutants_cDNA_P Parameter: Plant Line Value: CS24
  misc_feature: MA Experiment 20000070 PARAMETER Experiment Name: At_100uM_ABA_Mutants_cDNA_P Parameter: Timepoint (hr) Value: 6
  misc_feature: MA Experiment 20000070 PARAMETER Experiment Name: At_100uM_ABA_Mutants_cDNA_P Parameter: Tissue Value: Aerial
  misc_feature: MA Experiment 20000070 PARAMETER Experiment Name: At_100uM_ABA_Mutants_cDNA_P Parameter: Treatment Value: 100uM ABA vs. No Treatment
  misc_feature: MA Experiment ID: 20000087 Result: Up-regulated in Transcription
  misc_feature: MA Experiment 20000087 PARAMETER Experiment Name: At_100uM_ABA_Mutants_cDNA_P Parameter: Plant Line Value: WS
  misc_feature: MA Experiment 20000087 PARAMETER Experiment Name: At_100uM_ABA_Mutants_cDNA_P Parameter: Timepoint (hr) Value: 6
  misc_feature: MA Experiment 20000087 PARAMETER Experiment Name: At_100uM_ABA_Mutants_cDNA_P Parameter: Tissue Value: Aerial
  misc_feature: MA Experiment 20000087 PARAMETER Experiment Name: At_100uM_ABA_Mutants_cDNA_P Parameter: Treatment Value: 100uM ABA vs. No Treatment
  misc_feature: MA Experiment ID: 20000117 Result: Up-regulated in Transcription
  misc_feature: MA Experiment 20000117 PARAMETER Experiment Name: At_100uM_ABA_Mutants_cDNA_P Parameter: Plant Line Value: Columbia
  misc_feature: MA Experiment 20000117 PARAMETER Experiment Name: At_100uM_ABA_Mutants_cDNA_P Parameter: Timepoint (hr) Value: 6
  misc_feature: MA Experiment 20000117 PARAMETER Experiment Name: At_100uM_ABA_Mutants_cDNA_P Parameter: Tissue Value: Aerial
  misc_feature: MA Experiment 20000117 PARAMETER Experiment Name: At_100uM_ABA_Mutants_cDNA_P Parameter: Treatment Value: 100uM ABA vs. No Treatment
  misc_feature: MA Experiment ID: 20000179 Result: Down-regulated in Transcription
  misc_feature: MA Experiment 20000179 PARAMETER Experiment Name: At_Germinating_Seeds_P Parameter: Age (hr) Value: 6 vs. 0
  misc_feature: MA Experiment 20000179 PARAMETER Experiment Name: At_Germinating_Seeds_P Parameter: Tissue Value: Germinating Seeds
  misc_feature: MA Experiment ID: 20000180 Result: Down-regulated in Transcription
  misc_feature: MA Experiment 20000180 PARAMETER Experiment Name: At_Germinating_Seeds_P Parameter: Age (hr) Value: 24 vs. 0
  misc_feature: MA Experiment 20000180 PARAMETER Experiment Name: At_Germinating_Seeds_P Parameter: Tissue Value: Germinating Seeds
  misc_feature: MA Experiment ID: 20000184 Result: Down-regulated in Transcription
  misc_feature: MA Experiment 20000184 PARAMETER Experiment Name: At_Shoots__P Parameter: Age (day) Value: 7
  misc_feature: MA Experiment 20000184 PARAMETER Experiment Name: At_Shoots__P Parameter: Tissue Value: Shoots vs. Whole Plant
  misc_feature: MA Experiment ID: 20000185 Result: Up-regulated in Transcription
  misc_feature: MA Experiment 20000185 PARAMETER Experiment Name: At_Roots__P Parameter: Age (day) Value: 7 vs. 21
  misc_feature: MA Experiment 20000185 PARAMETER Experiment Name: At_Roots__P Parameter: Organism Value: A. thaliana
  misc_feature: MA Experiment 20000185 PARAMETER Experiment Name: At_Roots__P Parameter: Tissue Value: Roots vs. Whole Plant
  misc_feature: MA Experiment ID: 20000224 Result: Down-regulated in Transcription
  misc_feature: MA Experiment ID: 20000227 Result: Down-regulated in Transcription
  misc_feature: MA Experiment 20000227 PARAMETER Experiment Name: At_Root-Tips-vs-Tops_P Parameter: Tissue Value: Root Tips vs. Root Tops
  misc_feature: MA Experiment ID: 20000234 Result: Down-regulated in Transcription
  misc_feature: MA Experiment 20000234 PARAMETER Experiment Name: At_Siliques_P Parameter: Age (day) Value: 21
  misc_feature: MA Experiment 20000234 PARAMETER Experiment Name: At_Siliques_P Parameter: Organism Value: A. thaliana
  misc_feature: MA Experiment 20000234 PARAMETER Experiment Name: At_Siliques_P Parameter: Plant Line Value: WS
  misc_feature: MA Experiment 20000234 PARAMETER Experiment Name: At_Siliques_P Parameter: Tissue Value: Less Than 5mm Siliques vs. Whole Plant
  misc_feature: MA Experiment ID: 20000235 Result: Down-regulated in Transcription
  misc_feature: MA Experiment 20000235 PARAMETER Experiment Name: At_Siliques_P Parameter: Age (day) Value: 21
  misc_feature: MA Experiment 20000235 PARAMETER Experiment Name: At_Siliques_P Parameter: Organism Value: A. thaliana
  misc_feature: MA Experiment 20000235 PARAMETER Experiment Name: At_Siliques_P Parameter: Plant Line Value: WS
  misc_feature: MA Experiment 20000235 PARAMETER Experiment Name: At_Siliques_P Parameter: Tissue Value: 5-10mm Siliques vs. Whole Plant
  misc_feature: MA Experiment ID: 20000264 Result: Down-regulated in Transcription
  misc_feature: MA Experiment 20000264 PARAMETER Experiment Name: At_Open_Flower_P Parameter: Age (day) Value: 21
  misc_feature: MA Experiment 20000264 PARAMETER Experiment Name: At_Open_Flower_P Parameter: Plant Line Value: WS
  misc_feature: MA Experiment 20000264 PARAMETER Experiment Name: At_Open_Flower_P Parameter: Tissue Value: Open Flower vs. Whole Plant
  misc_feature: MA Experiment ID: 20000265 Result: Down-regulated in Transcription
  misc_feature: MA Experiment 20000265 PARAMETER Experiment Name: At_Open_Flower_P Parameter: Age (day) Value: 21
  misc_feature: MA Experiment 20000265 PARAMETER Experiment Name: At_Open_Flower_P Parameter: Plant Line Value: WS
  misc_feature: MA Experiment 20000265 PARAMETER Experiment Name: At_Open_Flower_P Parameter: Tissue Value: Closed Flower vs. Whole Plant
  misc_feature: MA Experiment ID: 20000267 Result: Down-regulated in Transcription
  misc_feature: MA Experiment 20000267 PARAMETER Experiment Name: At_Drought_P Parameter: Age (day) Value: 7
  misc_feature: MA Experiment 20000267 PARAMETER Experiment Name: At_Drought_P Parameter: Organism Value: A. thaliana
  misc_feature: MA Experiment 20000267 PARAMETER Experiment Name: At_Drought_P Parameter: Plant Line Value: WS
  misc_feature: MA Experiment 20000267 PARAMETER Experiment Name: At_Drought_P Parameter: Timepoint (hr) Value: 6
  misc_feature: MA Experiment 20000267 PARAMETER Experiment Name: At_Drought_P Parameter: Tissue Value: Whole Plant
  misc_feature: MA Experiment 20000267 PARAMETER Experiment Name: At_Drought_P Parameter: Treatment Value: Drought vs. No Drought
  misc_feature: MA Experiment ID: 20000438 Result: Down-regulated in Transcription
  misc_feature: MA Experiment 20000438 PARAMETER Experiment Name: At_Shoots__P Parameter: Age (day) Value: 14
  misc_feature: MA Experiment 20000438 PARAMETER Experiment Name: At_Shoots__P Parameter: Tissue Value: Shoots vs. Whole Plant
  misc_feature: MA Experiment ID: 20000441 Result: Up-regulated in Transcription
  misc_feature: MA Experiment 20000441 PARAMETER Experiment Name: At_1uM_BR-BRZ__P Parameter: Tissue Value: Shoot Apices
  misc_feature: MA Experiment 20000441 PARAMETER Experiment Name: At_1uM_BR-BRZ__P Parameter: Treatment Value: 1uM BR vs. No Treatment
  misc_feature: MA Experiment ID: 20000443 Result: Up-regulated in Transcription
  misc_feature: MA Experiment 20000443 PARAMETER Experiment Name: At_1uM_BR-BRZ__P Parameter: Tissue Value: Shoot Apices
  misc_feature: MA Experiment 20000443 PARAMETER Experiment Name: At_1uM_BR-BRZ__P Parameter: Treatment Value: 1uM BRZ vs. No Treatment
  misc_feature: MA Experiment ID: 20000794 Result: Down-regulated in Transcription
  misc_feature: MA Experiment 20000794 PARAMETER Experiment Name: At_Petals_P Parameter: Age (day) Value: 23-25 days
  misc_feature: MA Experiment 20000794 PARAMETER Experiment Name: At_Petals_P Parameter: Plant Line Value: WS
  misc_feature: MA Experiment 20000794 PARAMETER Experiment Name: At_Petals_P Parameter: Tissue Value: Petals vs. Whole plant
  misc_feature: MA Experiment ID: 20001248 Result: Up-regulated in Transcription
  misc_feature: MA Experiment 20001248 PARAMETER Experiment Name: At_Far-red-induction_P Parameter: Age (day) Value: 7
  misc_feature: MA Experiment 20001248 PARAMETER Experiment Name: At_Far-red-induction_P Parameter: Light Value: Far-red vs. White
  misc_feature: MA Experiment 20001248 PARAMETER Experiment Name: At_Far-red-induction_P Parameter: Organism Value: A. thaliana
  misc_feature: MA Experiment 20001248 PARAMETER Experiment Name: At_Far-red-induction_P Parameter: Plant Line Value: Columbia
  misc_feature: MA Experiment 20001248 PARAMETER Experiment Name: At_Far-red-induction_P Parameter: Timepoint (hr) Value: 4
  misc_feature: MA Experiment 20001248 PARAMETER Experiment Name: At_Far-red-induction_P Parameter: Tissue Value: Whole Plant
  misc_feature: MA Experiment ID: 20001450 Result: Up-regulated in Transcription
  misc_feature: MA Experiment 20001450 PARAMETER Experiment Name: At_Far-red-induction_P Parameter: Age (day) Value: 7
  misc_feature: MA Experiment 20001450 PARAMETER Experiment Name: At_Far-red-induction_P Parameter: Light Value: Far-red vs. White
  misc_feature: MA Experiment 20001450 PARAMETER Experiment Name: At_Far-red-induction_P Parameter: Organism Value: A. thaliana
  misc_feature: MA Experiment 20001450 PARAMETER Experiment Name: At_Far-red-induction_P Parameter: Plant Line Value: Columbia
  misc_feature: MA Experiment 20001450 PARAMETER Experiment Name: At_Far-red-induction_P Parameter: Timepoint (hr) Value: 8
  misc_feature: MA Experiment 20001450 PARAMETER Experiment Name: At_Far-red-induction_P Parameter: Tissue Value: Whole Plant
  misc_feature: MA Experiment ID: 20001451 Result: Up-regulated in Transcription
  misc_feature: MA Experiment 20001451 PARAMETER Experiment Name: At_Far-red-induction_P Parameter: Age (day) Value: 7
  misc_feature: MA Experiment 20001451 PARAMETER Experiment Name: At_Far-red-induction_P Parameter: Light Value: Far-red vs. White
  misc_feature: MA Experiment 20001451 PARAMETER Experiment Name: At_Far-red-induction_P Parameter: Organism Value: A. thaliana
  misc_feature: MA Experiment 20001451 PARAMETER Experiment Name: At_Far-red-induction_P Parameter: Plant Line Value: Columbia
  misc_feature: MA Experiment 20001451 PARAMETER Experiment Name: At_Far-red-induction_P Parameter: Timepoint (hr) Value: 24
  misc_feature: MA Experiment 20001451 PARAMETER Experiment Name: At_Far-red-induction_P Parameter: Tissue Value: Whole Plant
  misc_feature: MA Experiment ID: 20001503 Result: Down-regulated in Transcription
  misc_feature: MA Experiment 20001503 PARAMETER Experiment Name: At_Far-red-enriched_P Parameter: Age (day) Value: 7
  misc_feature: MA Experiment 20001503 PARAMETER Experiment Name: At_Far-red-enriched_P Parameter: Light Value: Far-red enriched vs. White
  misc_feature: MA Experiment 20001503 PARAMETER Experiment Name: At_Far-red-enriched_P Parameter: Organism Value: A. thaliana
  misc_feature: MA Experiment 20001503 PARAMETER Experiment Name: At_Far-red-enriched_P Parameter: Plant Line Value: Columbia
  misc_feature: MA Experiment 20001503 PARAMETER Experiment Name: At_Far-red-enriched_P Parameter: Timepoint (day) Value: 3
  misc_feature: MA Experiment 20001503 PARAMETER Experiment Name: At_Far-red-enriched_P Parameter: Tissue Value: Whole Plant
  misc_feature: MA Experiment ID: 20001504 Result: Down-regulated in Transcription
  misc_feature: MA Experiment 20001504 PARAMETER Experiment Name: At_Far-red-enriched_P Parameter: Age (day) Value: 10
  misc_feature: MA Experiment 20001504 PARAMETER Experiment Name: At_Far-red-enriched_P Parameter: Light Value: Far-red enriched vs. White
  misc_feature: MA Experiment 20001504 PARAMETER Experiment Name: At_Far-red-enriched_P Parameter: Organism Value: A. thaliana
  misc_feature: MA Experiment 20001504 PARAMETER Experiment Name: At_Far-red-enriched_P Parameter: Plant Line Value: Columbia
  misc_feature: MA Experiment 20001504 PARAMETER Experiment Name: At_Far-red-enriched_P Parameter: Timepoint (day) Value: 6
  misc_feature: MA Experiment 20001504 PARAMETER Experiment Name: At_Far-red-enriched_P Parameter: Tissue Value: Whole Plant
  misc_feature: MA Experiment ID: 20001556 Result: Up-regulated in Transcription
  misc_feature: MA Experiment 20001556 PARAMETER Experiment Name: At_Drought_Soil_Dry_P Parameter: Age (day) Value: 26
  misc_feature: MA Experiment 20001556 PARAMETER Experiment Name: At_Drought_Soil_Dry_P Parameter: Organism Value: A. thaliana
  misc_feature: MA Experiment 20001556 PARAMETER Experiment Name: At_Drought_Soil_Dry_P Parameter: Plant Line Value: WS
  misc_feature: MA Experiment 20001556 PARAMETER Experiment Name: At_Drought_Soil_Dry_P Parameter: Post Timepoint (hr) Value: None
  misc_feature: MA Experiment 20001556 PARAMETER Experiment Name: At_Drought_Soil_Dry_P Parameter: Post-Treatment Value: None
  misc_feature: MA Experiment 20001556 PARAMETER Experiment Name: At_Drought_Soil_Dry_P Parameter: Timepoint (day) Value: 12
  misc_feature: MA Experiment 20001556 PARAMETER Experiment Name: At_Drought_Soil_Dry_P Parameter: Treatment Value: Drought vs. No Drought
  misc_feature: MA Experiment ID: 20001557 Result: Up-regulated in Transcription
  misc_feature: MA Experiment 20001557 PARAMETER Experiment Name: At_Drought_Soil_Dry_P Parameter: Age (day) Value: 27
  misc_feature: MA Experiment 20001557 PARAMETER Experiment Name: At_Drought_Soil_Dry_P Parameter: Organism Value: A. thaliana
  misc_feature: MA Experiment 20001557 PARAMETER Experiment Name: At_Drought_Soil_Dry_P Parameter: Plant Line Value: WS
  misc_feature: MA Experiment 20001557 PARAMETER Experiment Name: At_Drought_Soil_Dry_P Parameter: Post Timepoint (hr) Value: 3
  misc_feature: MA Experiment 20001557 PARAMETER Experiment Name: At_Drought_Soil_Dry_P Parameter: Post-Treatment Value: Re-Water vs. No Drought
  misc_feature: MA Experiment 20001557 PARAMETER Experiment Name: At_Drought_Soil_Dry_P Parameter: Timepoint (day) Value: 13
  misc_feature: MA Experiment 20001557 PARAMETER Experiment Name: At_Drought_Soil_Dry_P Parameter: Treatment Value: Drought vs. No Drought
  misc_feature: MA Experiment ID: 20001558 Result: Up-regulated in Transcription
  misc_feature: MA Experiment 20001558 PARAMETER Experiment Name: At_Drought_Soil_Dry_P Parameter: Age (day) Value: 27
  misc_feature: MA Experiment 20001558 PARAMETER Experiment Name: At_Drought_Soil_Dry_P Parameter: Organism Value: A. thaliana
  misc_feature: MA Experiment 20001558 PARAMETER Experiment Name: At_Drought_Soil_Dry_P Parameter: Plant Line Value: WS
  misc_feature: MA Experiment 20001558 PARAMETER Experiment Name: At_Drought_Soil_Dry_P Parameter: Post Timepoint (hr) Value: 6
  misc_feature: MA Experiment 20001558 PARAMETER Experiment Name: At_Drought_Soil_Dry_P Parameter: Post-Treatment Value: Re-Water vs. No Drought
  misc_feature: MA Experiment 20001558 PARAMETER Experiment Name: At_Drought_Soil_Dry_P Parameter: Timepoint (day) Value: 13
  misc_feature: MA Experiment 20001558 PARAMETER Experiment Name: At_Drought_Soil_Dry_P Parameter: Treatment Value: Drought vs. No Drought
  misc_feature: MA Experiment ID: 20001559 Result: Up-regulated in Transcription
  misc_feature: MA Experiment 20001559 PARAMETER Experiment Name: At_Drought_Soil_Dry_P Parameter: Age (day) Value: 28
  misc_feature: MA Experiment 20001559 PARAMETER Experiment Name: At_Drought_Soil_Dry_P Parameter: Organism Value: A. thaliana
  misc_feature: MA Experiment 20001559 PARAMETER Experiment Name: At_Drought_Soil_Dry_P Parameter: Plant Line Value: WS
  misc_feature: MA Experiment 20001559 PARAMETER Experiment Name: At_Drought_Soil_Dry_P Parameter: Post Timepoint (hr) Value: 29
  misc_feature: MA Experiment 20001559 PARAMETER Experiment Name: At_Drought_Soil_Dry_P Parameter: Post-Treatment Value: Re-Water vs. No Drought
  misc_feature: MA Experiment 20001559 PARAMETER Experiment Name: At_Drought_Soil_Dry_P Parameter: Timepoint (day) Value: 14
  misc_feature: MA Experiment 20001559 PARAMETER Experiment Name: At_Drought_Soil_Dry_P Parameter: Treatment Value: Drought vs. No Drought
  misc_feature: MA Experiment ID: 20001560 Result: Up-regulated in Transcription
  misc_feature: MA Experiment 20001560 PARAMETER Experiment Name: At_Drought_Soil_Dry_P Parameter: Age (day) Value: 28
  misc_feature: MA Experiment 20001560 PARAMETER Experiment Name: At_Drought_Soil_Dry_P Parameter: Organism Value: A. thaliana
  misc_feature: MA Experiment 20001560 PARAMETER Experiment Name: At_Drought_Soil_Dry_P Parameter: Plant Line Value: WS
  misc_feature: MA Experiment 20001560 PARAMETER Experiment Name: At_Drought_Soil_Dry_P Parameter: Post Timepoint (hr) Value: None
  misc_feature: MA Experiment 20001560 PARAMETER Experiment Name: At_Drought_Soil_Dry_P Parameter: Post-Treatment Value: None
  misc_feature: MA Experiment 20001560 PARAMETER Experiment Name: At_Drought_Soil_Dry_P Parameter: Timepoint (day) Value: 14
  misc_feature: MA Experiment 20001560 PARAMETER Experiment Name: At_Drought_Soil_Dry_P Parameter: Treatment Value: Drought vs. No Drought
  misc_feature: MA Experiment ID: 20001904 Result: Up-regulated in Transcription
  misc_feature: MA Experiment 20001904 PARAMETER Experiment Name: At_Drought_Reproduction_P Parameter: Age (day) Value: 37
  misc_feature: MA Experiment 20001904 PARAMETER Experiment Name: At_Drought_Reproduction_P Parameter: Organism Value: A. thaliana
  misc_feature: MA Experiment 20001904 PARAMETER Experiment Name: At_Drought_Reproduction_P Parameter: Plant Line Value: WS
  misc_feature: MA Experiment 20001904 PARAMETER Experiment Name: At_Drought_Reproduction_P Parameter: Timepoint (day) Value: 7
  misc_feature: MA Experiment 20001904 PARAMETER Experiment Name: At_Drought_Reproduction_P Parameter: Tissue Value: Rosettes
  misc_feature: MA Experiment 20001904 PARAMETER Experiment Name: At_Drought_Reproduction_P Parameter: Treatment Value: Drought vs. No Drought
  misc_feature: MA Experiment ID: 20001905 Result: Up-regulated in Transcription
  misc_feature: MA Experiment 20001905 PARAMETER Experiment Name: At_Drought_Reproduction_P Parameter: Age (day) Value: 40
  misc_feature: MA Experiment 20001905 PARAMETER Experiment Name: At_Drought_Reproduction_P Parameter: Organism Value: A. thaliana
  misc_feature: MA Experiment 20001905 PARAMETER Experiment Name: At_Drought_Reproduction_P Parameter: Plant Line Value: WS
  misc_feature: MA Experiment 20001905 PARAMETER Experiment Name: At_Drought_Reproduction_P Parameter: Timepoint (day) Value: 10
  misc_feature: MA Experiment 20001905 PARAMETER Experiment Name: At_Drought_Reproduction_P Parameter: Tissue Value: Rosettes
  misc_feature: MA Experiment 20001905 PARAMETER Experiment Name: At_Drought_Reproduction_P Parameter: Treatment Value: Drought vs. No Drought
  misc_feature: MA Experiment ID: 20001906 Result: Up-regulated in Transcription
  misc_feature: MA Experiment 20001906 PARAMETER Experiment Name: At_Drought_Reproduction_P Parameter: Age (day) Value: 35
  misc_feature: MA Experiment 20001906 PARAMETER Experiment Name: At_Drought_Reproduction_P Parameter: Organism Value: A. thaliana
  misc_feature: MA Experiment 20001906 PARAMETER Experiment Name: At_Drought_Reproduction_P Parameter: Plant Line Value: WS
  misc_feature: MA Experiment 20001906 PARAMETER Experiment Name: At_Drought_Reproduction_P Parameter: Timepoint (day) Value: 5
  misc_feature: MA Experiment 20001906 PARAMETER Experiment Name: At_Drought_Reproduction_P Parameter: Tissue Value: Siliques
  misc_feature: MA Experiment 20001906 PARAMETER Experiment Name: At_Drought_Reproduction_P Parameter: Treatment Value: Drought vs. No Drought
  misc_feature: MA Experiment ID: 20001908 Result: Up-regulated in Transcription
  misc_feature: MA Experiment 20001908 PARAMETER Experiment Name: At_Drought_Reproduction_P Parameter: Age (day) Value: 40
  misc_feature: MA Experiment 20001908 PARAMETER Experiment Name: At_Drought_Reproduction_P Parameter: Organism Value: A. thaliana
  misc_feature: MA Experiment 20001908 PARAMETER Experiment Name: At_Drought_Reproduction_P Parameter: Plant Line Value: WS
  misc_feature: MA Experiment 20001908 PARAMETER Experiment Name: At_Drought_Reproduction_P Parameter: Timepoint (day) Value: 10
  misc_feature: MA Experiment 20001908 PARAMETER Experiment Name: At_Drought_Reproduction_P Parameter: Tissue Value: Siliques
  misc_feature: MA Experiment 20001908 PARAMETER Experiment Name: At_Drought_Reproduction_P Parameter: Treatment Value: Drought vs. No Drought
  misc_feature: MA Experiment ID: 20001911 Result: Up-regulated in Transcription
  misc_feature: MA Experiment 20001911 PARAMETER Experiment Name: At_Drought_Reproduction_P Parameter: Age (day) Value: 40
  misc_feature: MA Experiment 20001911 PARAMETER Experiment Name: At_Drought_Reproduction_P Parameter: Organism Value: A. thaliana
  misc_feature: MA Experiment 20001911 PARAMETER Experiment Name: At_Drought_Reproduction_P Parameter: Plant Line Value: WS
  misc_feature: MA Experiment 20001911 PARAMETER Experiment Name: At_Drought_Reproduction_P Parameter: Timepoint (day) Value: 10
  misc_feature: MA Experiment 20001911 PARAMETER Experiment Name: At_Drought_Reproduction_P Parameter: Tissue Value: Flowers
  misc_feature: MA Experiment 20001911 PARAMETER Experiment Name: At_Drought_Reproduction_P Parameter: Treatment Value: Drought vs. No Drought
agataagttccgtggttatcccattaaccttctttctacacaacacaaaactatatataaagatcatacatgtaataacgtcctgcaactattacaatcattctcgcttgaattaacgtggacgtcattgtttttggattgttaatcaaaggcggcgttacttttttttaatataattgtttctttaggatctttgtctctggaaaatgaaggaagacgcaggaaaccctttgcatctcacgtcactgaaccatgtctctgtcttgtgccgatccgtcgacgaatctatgaatttttaccaaaaggtgttagggttcatcccgatacgaagacctgaatccttaaattttgaaggcgcttggttgtttggtcacgggattggaatacacctcctgtgtgccccagaaccagagaaacttcccaagaaaactgcgattaatcccaaggataatcacatctctttccagtgtgagagtatgggagtagtggagaagaagctggaggaaatggggatagattatgtaagggcattagtagaagaaggagggatccaagtggaccagctcttcttccatgaccctgatggcttcatgatcgagatttgcaactgcgatagcctccccgtagtccccctcgtaggagaaatggctcggtcctgctcaagagtcaaactccaccagatggtgcagccacaaccgcagactcagatccaccaagtggtctacccttaattataaacagctcacttcttctttatattgtgtgtgtttgtgtattggtgtgcttggttttgggtgtaatatacaataagagaccgatgtgaatcagcgaatgtgattcccttcgaggaaatgaccattctctttgctccacaagcttatataatataatcaagggaaatcatgttttac

SEQ ID NO: 90742 - protein, 174 aa, Arabidopsis thaliana; identical to SEQ ID NO: 27087
  peptide (1)..(174): Ceres Seq. ID no. 12725073
  misc_feature (1)..(174): Homolog of NCBI NO: 18394235 NR Description: expressed protein; protein id: At1g15380.1, by cDNA: 5364., supported by cDNA: gi_18252884 [Arabidopsis
  misc_feature (1)..(169): Homolog of NCBI NO: 25406639 NR Description: hypothetical protein F18B13.24 [imported] - thaliana >gi|5902371|gb|AAD55473.1|AC009322_13 Hypothetical
  misc_feature (1)..(169): Homolog of NCBI NO: 18412683 NR Description: expressed protein; protein id: At1g80160.1, by cDNA: 21663. [Arabidopsis thaliana]
  misc_feature (6)..(150): Homolog of NCBI NO: 34910246 NR Description: OSJNBa0089K24.9 [Oryza sativa (japonica
  misc_feature (1)..(149): Homolog of NCBI NO: 34395261 NR Description: glyoxalase family-like protein [Oryza sativa
  misc_feature (1)..(149): Homolog of NCBI NO: 34899038 NR Description: hypothetical protein~similar to Arabidopsis
  misc_feature (11)..(142): Homolog of NCBI NO: 15529260 NR Description: At2g28420/T1B3.6 [Arabidopsis thaliana]
  misc_feature (11)..(142): Homolog of NCBI NO: 18401734 NR Description: expressed protein; protein id: At2g28420.1, by cDNA: gi_15529259, supported by cDNA: gi_16974406 [Arabidopsis >gi|25407983|pir||F84684 hypothetical protein At2g28420
  misc_feature (2)..(131): Homolog of NCBI NO: 33146737 NR Description: unknown protein [Oryza sativa (japonica
  misc_feature (11)..(131): Homolog of NCBI NO: 34899880 NR Description: OJ1714_H10.23 [Oryza sativa (japonica

SEQ ID NO: 90743 - protein, 147 aa, Arabidopsis thaliana; identical to SEQ ID NO: 27088
  peptide (1)..(147): Ceres Seq. ID no. 12725074
  misc_feature (1)..(147): Homolog of NCBI NO: 18394235 NR Description: expressed protein; protein id: At1g15380.1, by cDNA: 5364., supported by cDNA: gi_18252884 [Arabidopsis
  misc_feature (1)..(142): Homolog of NCBI NO: 25406639 NR Description: hypothetical protein F18B13.24 [imported] - thaliana >gi|5902371|gb|AAD55473.1|AC009322_13 Hypothetical
  misc_feature (1)..(142): Homolog of NCBI NO: 18412683 NR Description: expressed protein; protein id: At1g80160.1, by cDNA: 21663. [Arabidopsis thaliana]
  misc_feature (1)..(123): Homolog of NCBI NO: 34910246 NR Description: OSJNBa0089K24.9 [Oryza sativa (japonica
  misc_feature (1)..(122): Homolog of NCBI NO: 34395261 NR Description: glyoxalase family-like protein [Oryza sativa
  misc_feature (1)..(122): Homolog of NCBI NO: 34899038 NR Description: hypothetical protein~similar to Arabidopsis
  misc_feature (1)..(115): Homolog of NCBI NO: 15529260 NR Description: At2g28420/T1B3.6 [Arabidopsis thaliana]
  misc_feature (1)..(115): Homolog of NCBI NO: 18401734 NR Description: expressed protein; protein id: At2g28420.1, by cDNA: gi_15529259, supported by cDNA: gi_16974406 [Arabidopsis >gi|25407983|pir||F84684 hypothetical protein At2g28420
  misc_feature (1)..(104): Homolog of NCBI NO: 33146737 NR Description: unknown protein [Oryza sativa (japonica
  misc_feature (1)..(104): Homolog of NCBI NO: 34899880 NR Description: OJ1714_H10.23 [Oryza sativa (japonica

SEQ ID NO: 90744 - DNA, 1865 bp, Arabidopsis thaliana
  misc_feature (1)..(1865): Ceres Seq. ID no. 12725096
  misc_feature: MA Experiment ID: 20000182 Result: Down-regulated in Transcription
  misc_feature: MA Experiment 20000182 PARAMETER Experiment Name: At_2mM_SA_P Parameter: Age (day) Value: 14
  misc_feature: MA Experiment 20000182 PARAMETER Experiment Name: At_2mM_SA_P Parameter: Organism Value: A. thaliana
  misc_feature: MA Experiment 20000182 PARAMETER Experiment Name: At_2mM_SA_P Parameter: Plant Line Value: WS
  misc_feature: MA Experiment 20000182 PARAMETER Experiment Name: At_2mM_SA_P Parameter: Timepoint (hr) Value: 6
  misc_feature: MA Experiment 20000182 PARAMETER Experiment Name: At_2mM_SA_P Parameter: Tissue Value: Aerial
  misc_feature: MA Experiment 20000182 PARAMETER Experiment Name: At_2mM_SA_P Parameter: Treatment Value: 2mM SA vs. No Treatment
  misc_feature: MA Experiment ID: 20000185 Result: Down-regulated in Transcription
  misc_feature: MA Experiment 20000185 PARAMETER Experiment Name: At_Roots__P Parameter: Age (day) Value: 7 vs. 21
  misc_feature: MA Experiment 20000185 PARAMETER Experiment Name: At_Roots__P Parameter: Organism Value: A. thaliana
  misc_feature: MA Experiment 20000185 PARAMETER Experiment Name: At_Roots__P Parameter: Tissue Value: Roots vs. Whole Plant
  misc_feature: MA Experiment ID: 20000234 Result: Down-regulated in Transcription
  misc_feature: MA Experiment 20000234 PARAMETER Experiment Name: At_Siliques_P Parameter: Age (day) Value: 21
  misc_feature: MA Experiment 20000234 PARAMETER Experiment Name: At_Siliques_P Parameter: Organism Value: A. thaliana
  misc_feature: MA Experiment 20000234 PARAMETER Experiment Name: At_Siliques_P Parameter: Plant Line Value: WS
  misc_feature: MA Experiment 20000234 PARAMETER Experiment Name: At_Siliques_P Parameter: Tissue Value: Less Than 5mm Siliques vs. Whole Plant
  misc_feature: MA Experiment ID: 20000264 Result: Down-regulated in Transcription
  misc_feature: MA Experiment 20000264 PARAMETER Experiment Name: At_Open_Flower_P Parameter: Age (day) Value: 21
  misc_feature: MA Experiment 20000264 PARAMETER Experiment Name: At_Open_Flower_P Parameter: Plant Line Value: WS
  misc_feature: MA Experiment 20000264 PARAMETER Experiment Name: At_Open_Flower_P Parameter: Tissue Value: Open Flower vs. Whole Plant
  misc_feature: MA Experiment ID: 20000265 Result: Down-regulated in Transcription
  misc_feature: MA Experiment 20000265 PARAMETER Experiment Name: At_Open_Flower_P Parameter: Age (day) Value: 21
  misc_feature: MA Experiment 20000265 PARAMETER Experiment Name: At_Open_Flower_P Parameter: Plant Line Value: WS
  misc_feature: MA Experiment 20000265 PARAMETER Experiment Name: At_Open_Flower_P Parameter: Tissue Value: Closed Flower vs. Whole Plant
  misc_feature: MA Experiment ID: 20000286 Result: Down-regulated in Transcription
  misc_feature: MA Experiment 20000286 PARAMETER Experiment Name: At_Open_Flower_P Parameter: Age (day) Value: 21
  misc_feature: MA Experiment 20000286 PARAMETER Experiment Name: At_Open_Flower_P Parameter: Plant Line Value: WS
  misc_feature: MA Experiment 20000286 PARAMETER Experiment Name: At_Open_Flower_P Parameter: Tissue Value: Half Open vs. Whole Plant
  misc_feature: MA Experiment ID: 20000439 Result: Down-regulated in Transcription
  misc_feature: MA Experiment 20000439 PARAMETER Experiment Name: At_Roots__P Parameter: Age (day) Value: 14 vs. 21
  misc_feature: MA Experiment 20000439 PARAMETER Experiment Name: At_Roots__P Parameter: Organism Value: A. thaliana
  misc_feature: MA Experiment 20000439 PARAMETER Experiment Name: At_Roots__P Parameter: Tissue Value: Roots vs. Whole Plant
  misc_feature: MA Experiment ID: 20000495 Result: Up-regulated in Transcription
  misc_feature: MA Experiment 20000495 PARAMETER Experiment Name: At_Guard_Cells_P Parameter: Harvest Date Value: 8/2/2002
  misc_feature: MA Experiment 20000495 PARAMETER Experiment Name: At_Guard_Cells_P Parameter: Organism Value: A. thaliana
  misc_feature: MA Experiment 20000495 PARAMETER Experiment Name: At_Guard_Cells_P Parameter: Tissue Value: Guard Cells vs. Leaves
  misc_feature: MA Experiment ID: 20000527 Result: Up-regulated in Transcription
  misc_feature: MA Experiment 20000527 PARAMETER Experiment Name: At_10percent_PEG_P Parameter: Age (day) Value: 20
  misc_feature: MA Experiment 20000527 PARAMETER Experiment Name: At_10percent_PEG_P Parameter: Organism Value: A. thaliana
  misc_feature: MA Experiment 20000527 PARAMETER Experiment Name: At_10percent_PEG_P Parameter: Plant Line Value: WS
  misc_feature: MA Experiment 20000527 PARAMETER Experiment Name: At_10percent_PEG_P Parameter: Timepoint (day) Value: 20
  misc_feature: MA Experiment 20000527 PARAMETER Experiment Name: At_10percent_PEG_P Parameter: Tissue Value: Whole Plant
  misc_feature: MA Experiment 20000527 PARAMETER Experiment Name: At_10percent_PEG_P Parameter: Treatment Value: 10percent PEG vs. No Treatment
  misc_feature: MA Experiment ID: 20000794 Result: Down-regulated in Transcription
  misc_feature: MA Experiment 20000794 PARAMETER Experiment Name: At_Petals_P Parameter: Age (day) Value: 23-25 days
  misc_feature: MA Experiment 20000794 PARAMETER Experiment Name: At_Petals_P Parameter: Plant Line Value: WS
  misc_feature: MA Experiment 20000794 PARAMETER Experiment Name: At_Petals_P Parameter: Tissue Value: Petals vs. Whole plant
  misc_feature: MA Experiment ID: 20001247 Result: Down-regulated in Transcription
  misc_feature: MA Experiment 20001247 PARAMETER Experiment Name: At_Far-red-induction_P Parameter: Age (day) Value: 7
  misc_feature: MA Experiment 20001247 PARAMETER Experiment Name: At_Far-red-induction_P Parameter: Light Value: Far-red vs. White
  misc_feature: MA Experiment 20001247 PARAMETER Experiment Name: At_Far-red-induction_P Parameter: Organism Value: A. thaliana
  misc_feature: MA Experiment 20001247 PARAMETER Experiment Name: At_Far-red-induction_P Parameter: Plant Line Value: Columbia
  misc_feature: MA Experiment 20001247 PARAMETER Experiment Name: At_Far-red-induction_P Parameter: Timepoint (hr) Value: 1
  misc_feature: MA Experiment 20001247 PARAMETER Experiment Name: At_Far-red-induction_P Parameter: Tissue Value: Whole Plant
  misc_feature: MA Experiment ID: 20001248 Result: Down-regulated in Transcription
  misc_feature: MA Experiment 20001248 PARAMETER Experiment Name: At_Far-red-induction_P Parameter: Age (day) Value: 7
  misc_feature: MA Experiment 20001248 PARAMETER Experiment Name: At_Far-red-induction_P Parameter: Light Value: Far-red vs. White
  misc_feature: MA Experiment 20001248 PARAMETER Experiment Name: At_Far-red-induction_P Parameter: Organism Value: A. thaliana
  misc_feature: MA Experiment 20001248 PARAMETER Experiment Name: At_Far-red-induction_P Parameter: Plant Line Value: Columbia
  misc_feature: MA Experiment 20001248 PARAMETER Experiment Name: At_Far-red-induction_P Parameter: Timepoint (hr) Value: 4
  misc_feature: MA Experiment 20001248 PARAMETER Experiment Name: At_Far-red-induction_P Parameter: Tissue Value: Whole Plant
  misc_feature: MA Experiment ID: 20001450 Result: Down-regulated in Transcription
  misc_feature: MA Experiment 20001450 PARAMETER Experiment Name: At_Far-red-induction_P Parameter: Age (day) Value: 7
  misc_feature: MA Experiment 20001450 PARAMETER Experiment Name: At_Far-red-induction_P Parameter: Light Value: Far-red vs. White
  misc_feature: MA Experiment 20001450 PARAMETER Experiment Name: At_Far-red-induction_P Parameter: Organism Value: A. thaliana
  misc_feature: MA Experiment 20001450 PARAMETER Experiment Name: At_Far-red-induction_P Parameter: Plant Line Value: Columbia
  misc_feature: MA Experiment 20001450 PARAMETER Experiment Name: At_Far-red-induction_P Parameter: Timepoint (hr) Value: 8
  misc_feature: MA Experiment 20001450 PARAMETER Experiment Name: At_Far-red-induction_P Parameter: Tissue Value: Whole Plant
  misc_feature: MA Experiment ID: 20001451 Result: Down-regulated in Transcription
  misc_feature: MA Experiment 20001451 PARAMETER Experiment Name: At_Far-red-induction_P Parameter: Age (day) Value: 7
  misc_feature: MA Experiment 20001451 PARAMETER Experiment Name: At_Far-red-induction_P Parameter: Light Value: Far-red vs. White
  misc_feature: MA Experiment 20001451 PARAMETER Experiment Name: At_Far-red-induction_P Parameter: Organism Value: A. thaliana
  misc_feature: MA Experiment 20001451 PARAMETER Experiment Name: At_Far-red-induction_P Parameter: Plant Line Value: Columbia
  misc_feature: MA Experiment 20001451 PARAMETER Experiment Name: At_Far-red-induction_P Parameter: Timepoint (hr) Value: 24
  misc_feature: MA Experiment 20001451 PARAMETER Experiment Name: At_Far-red-induction_P Parameter: Tissue Value: Whole Plant
  misc_feature: MA Experiment ID: 20001457 Result: Down-regulated in Transcription
  misc_feature: MA Experiment 20001457 PARAMETER Experiment Name: At_50mM_NH4NO3_L-to-H_P Parameter: Age (day) Value: Undefined
  misc_feature: MA Experiment 20001457 PARAMETER Experiment Name: At_50mM_NH4NO3_L-to-H_P Parameter: Organism Value: Undefined
  misc_feature: MA Experiment 20001457 PARAMETER Experiment Name: At_50mM_NH4NO3_L-to-H_P Parameter: Plant Line Value: Undefined
  misc_feature: MA Experiment 20001457 PARAMETER Experiment Name: At_50mM_NH4NO3_L-to-H_P Parameter: Timepoint (hr) Value: 0.5
  misc_feature: MA Experiment 20001457 PARAMETER Experiment Name: At_50mM_NH4NO3_L-to-H_P Parameter: Tissue Value: Siliques
  misc_feature: MA Experiment 20001457 PARAMETER Experiment Name: At_50mM_NH4NO3_L-to-H_P Parameter: Treatment Value: 50mM NH4NO3 vs. 100mM Manitol
  misc_feature: MA Experiment ID: 20001756 Result: Up-regulated in Transcription
  misc_feature: MA Experiment 20001756 PARAMETER Experiment Name: At_50mM_NH4NO3_L-to-H_P Parameter: Timepoint (hr) Value: 4
  misc_feature: MA Experiment 20001756 PARAMETER Experiment Name: At_50mM_NH4NO3_L-to-H_P Parameter: Tissue Value: Leaf
  misc_feature: MA Experiment 20001756 PARAMETER Experiment Name: At_50mM_NH4NO3_L-to-H_P Parameter: Treatment Value: 50mM NH4NO3 vs 100mM Mannitol
  misc_feature: MA Experiment ID: 20001772 Result: Down-regulated in Transcription
  misc_feature: MA Experiment 20001772 PARAMETER Experiment Name: At_Far-red-enriched-adult_P Parameter: Age (day) Value: 29
  misc_feature: MA Experiment 20001772 PARAMETER Experiment Name: At_Far-red-enriched-adult_P Parameter: Light Value: Far-red enriched vs. White
  misc_feature: MA Experiment 20001772 PARAMETER Experiment Name: At_Far-red-enriched-adult_P Parameter: Organism Value: A. thaliana
  misc_feature: MA Experiment 20001772 PARAMETER Experiment Name: At_Far-red-enriched-adult_P Parameter: Plant Line Value: Columbia
  misc_feature: MA Experiment 20001772 PARAMETER Experiment Name: At_Far-red-enriched-adult_P Parameter: Timepoint (hr) Value: 24
  misc_feature: MA Experiment 20001772 PARAMETER Experiment Name: At_Far-red-enriched-adult_P Parameter: Tissue Value: Aerial
  misc_feature: MA Experiment ID: 20001908 Result: Up-regulated in Transcription
  misc_feature: MA Experiment 20001908 PARAMETER Experiment Name: At_Drought_Reproduction_P Parameter: Age (day) Value: 40
  misc_feature: MA Experiment 20001908 PARAMETER Experiment Name: At_Drought_Reproduction_P Parameter: Organism Value: A. thaliana
  misc_feature: MA Experiment 20001908 PARAMETER Experiment Name: At_Drought_Reproduction_P Parameter: Plant Line Value: WS
  misc_feature: MA Experiment 20001908 PARAMETER Experiment Name: At_Drought_Reproduction_P Parameter: Timepoint (day) Value: 10
  misc_feature: MA Experiment 20001908 PARAMETER Experiment Name: At_Drought_Reproduction_P Parameter: Tissue Value: Siliques
  misc_feature: MA Experiment 20001908 PARAMETER Experiment Name: At_Drought_Reproduction_P Parameter: Treatment Value: Drought vs. No Drought
atcgctagtgttcatttctaacaaatgcacacctcactacacgcatacatacatcatgatgagctttaccacatcattaccatacccttttcacatcctactagtctttatcctctccatggcatcaatcactctactgggtcgaatactctcaaggcccaccaaaaccaaagaccgatcttgccagcttcctcctggcccaccaggatggcccatcctcggcaatctacccgaactattcatgactcgtcctaggtccaaatatttccgccttgccatgaaagagctaaaaacagatatagcatgtttcaactttgccggcatccgtgccatcaccataaactccgacgagatcgctagagaagcgtttagagagcgagacgcagatttggcagaccggcctcaacttttcatcatggagacaatcggagacaattacaaatcaatgggaatttcaccgtacggtgaacaattcatgaagatgaaaagagtgatcacaacggaaattatgtccgttaagacgttgaaaatgttggaggctgcaagaaccatcgaagcggataatctcatagcttacgttcactccatgtatcaacggtccgagacggtcgatgttagagagctctcgagggtttatggttacgcagtgaccatgcgaatgttgtttggaaggagacatgttacgaaagaaaacgtgttttctgatgatggaagactaggaaacgccgaaaaacatcatcttgaggtgattttcaacactcttaactgtttaccgagttttagtccagcggattacgtggaacgatggttgagaggttggaatgttgatggtcaagagaagagggtgacagagaactgtaacattgttcgtagttacaacaatcccataatcgacgagagggtccagttgtggagggaagaaggtggtaaggctgctgttgaagattggcttgatacgttcattaccctaaaagatcaaaacggaaagtacttggtcacaccagacgaaatcaaagctcaatgcgtagaattttgtatagcagcgattgataatccggcaaataacatggagtggacacttggggaaatgttaaagaacccggagattcttagaaaagctctgaaggagttggatgaagtagttggaagagacaggcttgtgcaagaatcagacataccaaatctaaactacttaaaagcttgttgtagagaaacattcagaattcacccaagtgctcattatgtcccttcccatcttgcgcgtcaagataccacccttgggggttatttcattcccaaaggtagccacattcatgtatgccgccctggactaggtcgtaaccctaaaatatggaaagatccattggtatacaaaccggagcgtcacctccaaggagacggaatcacaaaagaggttactctggtggaaacagagatgcgttttgtctcgtttagcaccggtcgacgtggctgcatcggtgttaaagtcgggacgatcatgatggttatgttgttggctaggtttcttcaagggtttaactggaaactccatcaagattttggaccgttaagcctcgaggaagatgatgcatcattgcttatggctaaacctcttcacttgtccgttgagccacgcttggcaccaaacctttatccaaagttccgtccttaagaagaagaaaacaagatggtgtctaaaaaaaaaaaacgccttgtttctttctctgttatcttcttcaacgcttagtcgtttctatgttatgttactactcttagtcgtttatgttttttaacttttacttgacgtactgtcgtttgttgttgtccttttcttttgaatctccgtcacttcataataaacaccg

SEQ ID NO: 90745 - protein, 556 aa, Arabidopsis thaliana
  peptide (1)..(556): Ceres Seq. ID no. 12725097
  misc_feature (64)..(542): Pfam Name: Cytochrome P450 Pfam Description: Cytochrome P450
  misc_feature (19)..(556): Homolog of NCBI NO: 30684842 NR Description: cytochrome P450, putative [Arabidopsis thaliana] putative cytochrome P450 protein [Arabidopsis thaliana]
  misc_feature (20)..(556): Homolog of NCBI NO: 25518479 NR Description: hypothetical protein F3O9.21 - Arabidopsis >gi|4966362|gb|AAD34693.1|AC006341_21 Similar to gb|AF069494 P450 from Sinapis alba and is a member of the PF|00067 Cytochrome
  misc_feature (30)..(556): Homolog of NCBI NO: 10946208 NR Description: cytochrome P450 CYP79F2 [Arabidopsis thaliana]
  misc_feature (30)..(556): Homolog of NCBI NO: 30684835 NR Description: cytochrome P450 family [Arabidopsis thaliana]
  misc_feature (30)..(556): Homolog of NCBI NO: 25518051 NR Description: F3O9.20 protein - Arabidopsis thaliana Similar to gb|AF069494 cytochrome P450 from Sinapis alba and is a
  misc_feature (36)..(555): Homolog of NCBI NO: 30696238 NR Description: cytochrome P450 family [Arabidopsis thaliana]
  misc_feature (30)..(553): Homolog of NCBI NO: 22330739 NR Description: cytochrome p450 family; protein id: At1g79370.1
  misc_feature (33)..(552): Homolog of NCBI NO: 5915822 NR Description: CYTOCHROME P450 79A1 (CYTOCHROME P450TYR)
  misc_feature (35)..(552): Homolog of NCBI NO: 6739527 NR Description: N-hydroxylating cytochrome P450 [Manihot
  misc_feature (4)..(552): Homolog of NCBI NO: 15236088 NR Description: cytochrome P450 - like protein; protein id: supported by cDNA: gi_15028134, supported by cDNA: gi_20259280
SLVFISNKCTPHYTHTYIMMSFTTSLPYPFHILLVFILSMASITLLGRILSRPTKTKDRSCQLPPGPPGWPILGNLPELFMTRPRSKYFRLAMKELKTDIACFNFAGIRAITINSDEIAREAFRERDADLADRPQLFIMETIGDNYKSMGISPYGEQFMKMKRVITTEIMSVKTLKMLEAARTIEADNLIAYVHSMYQRSETVDVRELSRVYGYAVTMRMLFGRRHVTKENVFSDDGRLGNAEKHHLEVIFNTLNCLPSFSPADYVERWLRGWNVDGQEKRVTENCNIVRSYNNPIIDERVQLWREEGGKAAVEDWLDTFITLKDQNGKYLVTPDEIKAQCVEFCIAAIDNPANNMEWTLGEMLKNPEILRKALKELDEVVGRDRLVQESDIPNLNYLKACCRETFRIHPSAHYVPSHLARQDTTLGGYFIPKGSHIHVCRPGLGRNPKIWKDPLVYKPERHLQGDGITKEVTLVETEMRFVSFSTGRRGCIGVKVGTIMMVMLLARFLQGFNWKLHQDFGPLSLEEDDASLLMAKPLHLSVEPRLAPNLYPKFRP

SEQ ID NO: 90746 - protein, 538 aa, Arabidopsis thaliana
  peptide (1)..(538): Ceres Seq. ID no. 12725098
  misc_feature (46)..(524): Pfam Name: Cytochrome P450 Pfam Description: Cytochrome P450
  misc_feature (1)..(538): Homolog of NCBI NO: 30684842 NR Description: cytochrome P450, putative [Arabidopsis thaliana] putative cytochrome P450 protein [Arabidopsis thaliana]
  misc_feature (2)..(538): Homolog of NCBI NO: 25518479 NR Description: hypothetical protein F3O9.21 - Arabidopsis >gi|4966362|gb|AAD34693.1|AC006341_21 Similar to gb|AF069494 P450 from Sinapis alba and is a member of the PF|00067 Cytochrome
  misc_feature (12)..(538): Homolog of NCBI NO: 10946208 NR Description: cytochrome P450 CYP79F2 [Arabidopsis thaliana]
  misc_feature (12)..(538): Homolog of NCBI NO: 30684835 NR Description: cytochrome P450 family [Arabidopsis thaliana]
  misc_feature (12)..(538): Homolog of NCBI NO: 25518051 NR Description: F3O9.20 protein - Arabidopsis thaliana Similar to gb|AF069494 cytochrome P450 from Sinapis alba and is a
  misc_feature (18)..(537): Homolog of NCBI NO: 30696238 NR Description: cytochrome P450 family [Arabidopsis thaliana]
  misc_feature (12)..(535): Homolog of NCBI NO: 22330739 NR Description: cytochrome p450 family; protein id: At1g79370.1
  misc_feature (15)..(534): Homolog of NCBI NO: 5915822 NR Description: CYTOCHROME P450 79A1 (CYTOCHROME P450TYR)
  misc_feature (17)..(534): Homolog of NCBI NO: 6739527 NR Description: N-hydroxylating cytochrome P450 [Manihot
  misc_feature (1)..(534): Homolog of NCBI NO: 15236088 NR Description: cytochrome P450 - like protein; protein id: supported by cDNA: gi_15028134, supported by cDNA: gi_20259280
MMSFTTSLPYPFHILLVFILSMASITLLGRILSRPTKTKDRSCQLPPGPPGWPILGNLPELFMTRPRSKYFRLAMKELKTDIACFNFAGIRAITINSDEIAREAFRERDADLADRPQLFIMETIGDNYKSMGISPYGEQFMKMKRVITTEIMSVKTLKMLEAARTIEADNLIAYVHSMYQRSETVDVRELSRVYGYAVTMRMLFGRRHVTKENVFSDDGRLGNAEKHHLEVIFNTLNCLPSFSPADYVERWLRGWNVDGQEKRVTENCNIVRSYNNPIIDERVQLWREEGGKAAVEDWLDTFITLKDQNGKYLVTPDEIKAQCVEFCIAAIDNPANNMEWTLGEMLKNPEILRKALKELDEVVGRDRLVQESDIPNLNYLKACCRETFRIHPSAHYVPSHLARQDTTLGGYFIPKGSHIHVCRPGLGRNPKIWKDPLVYKPERHLQGDGITKEVTLVETEMRFVSFSTGRRGCIGVKVGTIMMVMLLARFLQGFNWKLHQDFGPLSLEEDDASLLMAKPLHLSVEPRLAPNLYPKFRP

SEQ ID NO: 90747 - protein, 537 aa, Arabidopsis thaliana
  peptide (1)..(537): Ceres Seq. ID no. 12725099
  misc_feature (45)..(523): Pfam Name: Cytochrome P450 Pfam Description: Cytochrome P450
  misc_feature (1)..(537): Homolog of NCBI NO: 30684842 NR Description: cytochrome P450, putative [Arabidopsis thaliana] putative cytochrome P450 protein [Arabidopsis thaliana]
  misc_feature (1)..(537): Homolog of NCBI NO: 25518479 NR Description: hypothetical protein F3O9.21 - Arabidopsis >gi|4966362|gb|AAD34693.1|AC006341_21 Similar to gb|AF069494 P450 from Sinapis alba and is a member of the PF|00067 Cytochrome
  misc_feature (11)..(537): Homolog of NCBI NO: 10946208 NR Description: cytochrome P450 CYP79F2 [Arabidopsis thaliana]
  misc_feature (11)..(537): Homolog of NCBI NO: 30684835 NR Description: cytochrome P450 family [Arabidopsis thaliana]
  misc_feature (11)..(537): Homolog of NCBI NO: 25518051 NR Description: F3O9.20 protein - Arabidopsis thaliana Similar to gb|AF069494 cytochrome P450 from Sinapis alba and is a
  misc_feature (17)..(536): Homolog of NCBI NO: 30696238 NR Description: cytochrome P450 family [Arabidopsis thaliana]
  misc_feature (11)..(534): Homolog of NCBI NO: 22330739 NR Description: cytochrome p450 family; protein id: At1g79370.1
  misc_feature (14)..(533): Homolog of NCBI NO: 5915822 NR Description: CYTOCHROME P450 79A1 (CYTOCHROME P450TYR)
  misc_feature (16)..(533): Homolog of NCBI NO: 6739527 NR Description: N-hydroxylating cytochrome P450 [Manihot
  misc_feature (1)..(533): Homolog of NCBI NO: 15236088 NR Description: cytochrome P450 - like protein; protein id: supported by cDNA: gi_15028134, supported by cDNA: gi_20259280
MSFTTSLPYPFHILLVFILSMASITLLGRILSRPTKTKDRSCQLPPGPPGWPILGNLPELFMTRPRSKYFRLAMKELKTDIACFNFAGIRAITINSDEIAREAFRERDADLADRPQLFIMETIGDNYKSMGISPYGEQFMKMKRVITTEIMSVKTLKMLEAARTIEADNLIAYVHSMYQRSETVDVRELSRVYGYAVTMRMLFGRRHVTKENVFSDDGRLGNAEKHHLEVIFNTLNCLPSFSPADYVERWLRGWNVDGQEKRVTENCNIVRSYNNPIIDERVQLWREEGGKAAVEDWLDTFITLKDQNGKYLVTPDEIKAQCVEFCIAAIDNPANNMEWTLGEMLKNPEILRKALKELDEVVGRDRLVQESDIPNLNYLKACCRETFRIHPSAHYVPSHLARQDTTLGGYFIPKGSHIHVCRPGLGRNPKIWKDPLVYKPERHLQGDGITKEVTLVETEMRFVSFSTGRRGCIGVKVGTIMMVMLLARFLQGFNWKLHQDFGPLSLEEDDASLLMAKPLHLSVEPRLAPNLYPKFRP

SEQ ID NO: 90748 - DNA, 2126 bp, Arabidopsis thaliana
  misc_feature (1)..(2126): Ceres Seq. ID no. 12725137
  misc_feature: MA Experiment ID: 20000307 Result: Up-regulated in Transcription
  misc_feature: MA Experiment 20000307 PARAMETER Experiment Name: At_Germinating_Seeds_Sub_P Parameter: Age (hr) Value: 24 vs. 0
  misc_feature: MA Experiment 20000307 PARAMETER Experiment Name: At_Germinating_Seeds_Sub_P Parameter: Organism Value: A. thaliana
  misc_feature: MA Experiment 20000307 PARAMETER Experiment Name: At_Germinating_Seeds_Sub_P Parameter: Plant Line Value: WS
  misc_feature: MA Experiment 20000307 PARAMETER Experiment Name: At_Germinating_Seeds_Sub_P Parameter: Tissue Value: Germinating Seeds
  misc_feature: MA Experiment ID: 20000315 Result: Down-regulated in Transcription
  misc_feature: MA Experiment 20000315 PARAMETER Experiment Name: At_14day_Shoots-Roots_Sub_P Parameter: Age (day) Value: 14
  misc_feature: MA Experiment 20000315 PARAMETER Experiment Name: At_14day_Shoots-Roots_Sub_P Parameter: Organism Value: A. thaliana
  misc_feature: MA Experiment 20000315 PARAMETER Experiment Name: At_14day_Shoots-Roots_Sub_P Parameter: Plant Line Value: WS
  misc_feature: MA Experiment 20000315 PARAMETER Experiment Name: At_14day_Shoots-Roots_Sub_P Parameter: Tissue Value: Shoots vs. Whole Plant
  misc_feature: MA Experiment ID: 20000327 Result: Up-regulated in Transcription
  misc_feature: MA Experiment 20000327 PARAMETER Experiment Name: At_42deg_Heat_Sub_P Parameter: Age (day) Value: 14
  misc_feature: MA Experiment 20000327 PARAMETER Experiment Name: At_42deg_Heat_Sub_P Parameter: Organism Value: A. thaliana
  misc_feature: MA Experiment 20000327 PARAMETER Experiment Name: At_42deg_Heat_Sub_P Parameter: Plant Line Value: WS
  misc_feature: MA Experiment 20000327 PARAMETER Experiment Name: At_42deg_Heat_Sub_P Parameter: Temperature (deg C) Value: 42 vs. 22
  misc_feature: MA Experiment 20000327 PARAMETER Experiment Name: At_42deg_Heat_Sub_P Parameter: Timepoint (hr) Value: 1
  misc_feature: MA Experiment 20000327 PARAMETER Experiment Name: At_42deg_Heat_Sub_P Parameter: Tissue Value: Aerial
  misc_feature: MA Experiment ID: 20000328 Result: Up-regulated in Transcription
  misc_feature: MA Experiment 20000328 PARAMETER Experiment Name: At_42deg_Heat_Sub_P Parameter: Age (day) Value: 14
  misc_feature: MA Experiment 20000328 PARAMETER Experiment Name: At_42deg_Heat_Sub_P Parameter: Organism Value: A. thaliana
  misc_feature: MA Experiment 20000328 PARAMETER Experiment Name: At_42deg_Heat_Sub_P Parameter: Plant Line Value: WS
  misc_feature: MA Experiment 20000328 PARAMETER Experiment Name: At_42deg_Heat_Sub_P Parameter: Temperature (deg C) Value: 42 vs. 22
  misc_feature: MA Experiment 20000328 PARAMETER Experiment Name: At_42deg_Heat_Sub_P Parameter: Timepoint (hr) Value: 6
  misc_feature: MA Experiment 20000328 PARAMETER Experiment Name: At_42deg_Heat_Sub_P Parameter: Tissue Value: Aerial
  misc_feature: MA Experiment ID: 20000329 Result: Down-regulated in Transcription
  misc_feature: MA Experiment 20000329 PARAMETER Experiment Name: At_4deg_Cold_Sub_P Parameter: Age (day) Value: 14
  misc_feature: MA Experiment 20000329 PARAMETER Experiment Name: At_4deg_Cold_Sub_P Parameter: Organism Value: A. thaliana
  misc_feature: MA Experiment 20000329 PARAMETER Experiment Name: At_4deg_Cold_Sub_P Parameter: Plant Line Value: WS
  misc_feature: MA Experiment 20000329 PARAMETER Experiment Name: At_4deg_Cold_Sub_P Parameter: Temperature (deg C) Value: 4 vs. 22
  misc_feature: MA Experiment 20000329 PARAMETER Experiment Name: At_4deg_Cold_Sub_P Parameter: Timepoint (hr) Value: 6
  misc_feature: MA Experiment 20000329 PARAMETER Experiment Name: At_4deg_Cold_Sub_P Parameter: Tissue Value: Aerial
  misc_feature: MA Experiment ID: 20000332 Result: Down-regulated in Transcription
  misc_feature: MA Experiment 20000332 PARAMETER Experiment Name: At_4deg_Cold_Sub_P Parameter: Age (day) Value: 14
  misc_feature: MA Experiment 20000332 PARAMETER Experiment Name: At_4deg_Cold_Sub_P Parameter: Organism Value: A. thaliana
  misc_feature: MA Experiment 20000332 PARAMETER Experiment Name: At_4deg_Cold_Sub_P Parameter: Plant Line Value: WS
  misc_feature: MA Experiment 20000332 PARAMETER Experiment Name: At_4deg_Cold_Sub_P Parameter: Temperature (deg C) Value: 4 vs. 22
  misc_feature: MA Experiment 20000332 PARAMETER Experiment Name: At_4deg_Cold_Sub_P Parameter: Timepoint (hr) Value: 2
  misc_feature: MA Experiment 20000332 PARAMETER Experiment Name: At_4deg_Cold_Sub_P Parameter: Tissue Value: Aerial
  misc_feature: MA Experiment ID: 20000355 Result: Down-regulated in Transcription
  misc_feature: MA Experiment 20000355 PARAMETER Experiment Name: At_Siliques_Sub_P Parameter: Age (day) Value: 21
  misc_feature: MA Experiment 20000355 PARAMETER Experiment Name: At_Siliques_Sub_P Parameter: Organism Value: A. thaliana
  misc_feature: MA Experiment 20000355 PARAMETER Experiment Name: At_Siliques_Sub_P Parameter: Plant Line Value: WS
  misc_feature: MA Experiment 20000355 PARAMETER Experiment Name: At_Siliques_Sub_P Parameter: Tissue Value: Less Than 5mm Siliques vs. Whole Plant
  misc_feature: MA Experiment ID: 20000440 Result: Down-regulated in Transcription
  misc_feature: MA Experiment 20000440 PARAMETER Experiment Name: At_Closed-Flower__Sub_P Parameter: Tissue Value: Closed Flower vs. Whole Plant
agtgcgactttgcctcttttcaatgcccaatttcttgagattctggctgttctgcatccaaatattaaacaatcaattccttttataaaaagcaaaagacagaaatatttattattaagctaaagaattgatcaaaaaactcgattcacttttctcaaaaacccgaatataatctcattcccaatagcttccacttccatcgagagattttctttctttgtttttttctgtgattttctccaatggctaactccaagaagcaagcatggtttttttataccacaggcttaccaagtgacatagaaatcgaagttgatgatataacatttcatcttcataagtttcctctaatgtcaaaaagcaaaaaacttcaccaactaataacagagcaagaacagagtaaagtttattctcacatcaagctcgagaattttccaggaggttcagagattttcgagatggtgataaagataagctacggtttcaaagtcgacatctctgtttccacagctgttccactccgttgcgccgccgagtatctagaaatgacggaagagtactcaccggagaatctcatttcaaaaacagagaagtttctttcagagttcgtcttcactaacgtacaagaatccatcaaagcgttgaaagcttgtgaatcagtctcgtctttagctgaatcactctgtataacggaacagtgtatagactccatcgtcttccaagcttcctcaaccgatccgtcgtcgttttacggttggccaataaacaacggaggtatattcaccgttgaccggaagaaacagagcaaagattcgaaaacagagctttggttcgaagatctaacggagttgagttttccaatcttcagacgtgtgatcttatccatgaagtcgagtgtcctgagtcctgagattgtagagagatctctacttacttacgcgaagaaacacattccaggaatctcgcgttcatcgtcagcatcttcatcttcttcttcttcttccaccaccatagcttccgagaatcaacaaagagaattattagagacgataacttcagatcttccattaactgcgacgactacgagatctctcttcggtttgttacgagccgcgatcattctcaacgcctccgagaattgcaggaagtttctagagaaaaaaatcggatcgaatcttgagaaagctacgcttgatgatcttctcattccaagttactcgtatctcaacgaaacgttatacgatattgatttggtggagagactcttacgtcgttttctcgaaaacgtcgccgtgtcgtcgtcgtcattgacggtggttgggagattgatcgacggagttctcggtgaaattgcatcggacgctaatcttaaaccggaacagttttataatctggcggttttgcttccggttcaagcacgggtttacgatgatggactatacagagccgtcgatatatatttcaagactcattcatggatattggaggaagagaaggagaagatttgtagcgtgatggattgtagaaaactgactgttgaaggatgcacacacgcggcacaaaacgagcgtttaccactacgagccgtcgtacaagttctgtttttggagcagctacagctccggcaagtaatcactgggactttactgacggaggaagacggtgataaaacggtggtggacttgggtagatggaaggaagcggtgaaggagaatcaggtgcttcgtttggatatggatacgatgaggacacgagtgaaccagctagagaaagaatgcttgtacttgaagaaagtgatcgcgaagatcgacaaagaaagtttgttgaaggcgaagcatggggcggggaaatggtcaatcgggaagaagttcggatgcaaattttcggctcaagtttgtgattcacaggaggcaacgatggtcgatagaagatcacgacgttttcttagttagtacataaatcagaatcatcttgtgcttctaaaaattgtatttttacttcttctgtatatcttaaagaaaaagattgatactttagattgaatggaactctaaaacacaccctgatggacttgttattcagagaatcatagtataatgatttagagattatgaatgtaaatttgt

SEQ ID NO: 90749 - protein, 569 aa, Arabidopsis thaliana
  peptide (1)..(569): Ceres Seq. ID no. 12725138
  misc_feature (193)..(435): Pfam Name: NPH3 family Pfam Description: NPH3 family
  misc_feature (1)..(569): Homolog of NCBI NO: 22331730 NR Description: putative protein; protein id: At3g50840.1,
  misc_feature (1)..(569): Homolog of NCBI NO: 20453203 NR Description: AT3g50840/F18B3_120 [Arabidopsis thaliana]
  misc_feature (5)..(569): Homolog of NCBI NO: 7459616 NR Description: hypothetical protein F18B3.120 - Arabidopsis >gi|4835235|emb|CAB42913.1| putative protein [Arabidopsis
  misc_feature (42)..(359): Homolog of NCBI NO: 15240012 NR Description: photoreceptor-interacting protein-like; protein At5g66560.1, supported by cDNA: gi_15146317 [Arabidopsis
  misc_feature (464)..(566): Homolog of NCBI NO: 15240012 NR Description: photoreceptor-interacting protein-like; protein At5g66560.1, supported by cDNA: gi_15146317 [Arabidopsis
  misc_feature (1)..(51): Homolog of NCBI NO: 15240012 NR Description: photoreceptor-interacting protein-like; protein At5g66560.1, supported by cDNA: gi_15146317 [Arabidopsis
  misc_feature (42)..(359): Homolog of NCBI NO: 15146318 NR Description: AT5g66560/K1F13_23 [Arabidopsis thaliana]
  misc_feature (464)..(566): Homolog of NCBI NO: 15146318 NR Description: AT5g66560/K1F13_23 [Arabidopsis thaliana]
  misc_feature (1)..(51): Homolog of NCBI NO: 15146318 NR Description: AT5g66560/K1F13_23 [Arabidopsis thaliana]
  misc_feature (184)..(566): Homolog of NCBI NO: 10177537 NR Description: photoreceptor-interacting protein-like
MANSKKQAWFFYTTGLPSDIEIEVDDITFHLHKFPLMSKSKKLHQLITEQEQSKVYSHIKLENFPGGSEIFEMVIKISYGFKVDISVSTAVPLRCAAEYLEMTEEYSPENLISKTEKFLSEFVFTNVQESIKALKACESVSSLAESLCITEQCIDSIVFQASSTDPSSFYGWPINNGGIFTVDRKKQSKDSKTELWFEDLTELSFPIFRRVILSMKSSVLSPEIVERSLLTYAKKHIPGISRSSSASSSSSSSSTTIASENQQRELLETITSDLPLTATTTRSLFGLLRAAIILNASENCRKFLEKKIGSNLEKATLDDLLIPSYSYLNETLYDIDLVERLLRRFLENVAVSSSSLTVVGRLIDGVLGEIASDANLKPEQFYNLAVLLPVQARVYDDGLYRAVDIYFKTHSWILEEEKEKICSVMDCRKLTVEGCTHAAQNERLPLRAVVQVLFLEQLQLRQVITGTLLTEEDGDKTVVDLGRWKEAVKENQVLRLDMDTMRTRVNQLEKECLYLKKVIAKIDKESLLKAKHGAGKWSIGKKFGCKFSAQVCDSQEATMVDRRSRRFLS

SEQ ID NO: 90750 - protein, 533 aa, Arabidopsis thaliana
  peptide (1)..(533): Ceres Seq. ID no. 12725139
  misc_feature (157)..(399): Pfam Name: NPH3 family Pfam Description: NPH3 family
  misc_feature (1)..(533): Homolog of NCBI NO: 22331730 NR Description: putative protein; protein id: At3g50840.1,
  misc_feature (1)..(533): Homolog of NCBI NO: 20453203 NR Description: AT3g50840/F18B3_120 [Arabidopsis thaliana]
  misc_feature (1)..(533): Homolog of NCBI NO: 7459616 NR Description: hypothetical protein F18B3.120 - Arabidopsis >gi|4835235|emb|CAB42913.1| putative protein [Arabidopsis
  misc_feature (6)..(323): Homolog of NCBI NO: 15240012 NR Description: photoreceptor-interacting protein-like; protein At5g66560.1, supported by cDNA: gi_15146317 [Arabidopsis
  misc_feature (428)..(530): Homolog of NCBI NO: 15240012 NR Description: photoreceptor-interacting protein-like; protein At5g66560.1, supported by cDNA: gi_15146317 [Arabidopsis
  misc_feature (1)..(15): Homolog of NCBI NO: 15240012 NR Description: photoreceptor-interacting protein-like; protein At5g66560.1, supported by cDNA: gi_15146317 [Arabidopsis
  misc_feature (6)..(323): Homolog of NCBI NO: 15146318 NR Description: AT5g66560/K1F13_23 [Arabidopsis thaliana]
  misc_feature (428)..(530): Homolog of NCBI NO: 15146318 NR Description: AT5g66560/K1F13_23 [Arabidopsis thaliana]
  misc_feature (1)..(15): Homolog of NCBI NO: 15146318 NR Description: AT5g66560/K1F13_23 [Arabidopsis thaliana]
  misc_feature (148)..(530): Homolog of NCBI NO: 10177537 NR Description: photoreceptor-interacting protein-like
MSKSKKLHQLITEQEQSKVYSHIKLENFPGGSEIFEMVIKISYGFKVDISVSTAVPLRCAAEYLEMTEEYSPENLISKTEKFLSEFVFTNVQESIKALKACESVSSLAESLCITEQCIDSIVFQASSTDPSSFYGWPINNGGIFTVDRKKQSKDSKTELWFEDLTELSFPIFRRVILSMKSSVLSPEIVERSLLTYAKKHIPGISRSSSASSSSSSSSTTIASENQQRELLETITSDLPLTATTTRSLFGLLRAAIILNASENCRKFLEKKIGSNLEKATLDDLLIPSYSYLNETLYDIDLVERLLRRFLENVAVSSSSLTVVGRLIDGVLGEIASDANLKPEQFYNLAVLLPVQARVYDDGLYRAVDIYFKTHSWILEEEKEKICSVMDCRKLTVEGCTHAAQNERLPLRAVVQVLFLEQLQLRQVITGTLLTEEDGDKTVVDLGRWKEAVKENQVLRLDMDTMRTRVNQLEKECLYLKKVIAKIDKESLLKAKHGAGKWSIGKKFGCKFSAQVCDSQEATMVDRRSRRFLS

SEQ ID NO: 90751 - protein, 497 aa, Arabidopsis thaliana
  peptide (1)..(497): Ceres Seq. ID no. 12725140
  misc_feature (121)..(363): Pfam Name: NPH3 family Pfam Description: NPH3 family
  misc_feature (1)..(497): Homolog of NCBI NO: 22331730 NR Description: putative protein; protein id: At3g50840.1,
  misc_feature (1)..(497): Homolog of NCBI NO: 20453203 NR Description: AT3g50840/F18B3_120 [Arabidopsis thaliana]
  misc_feature (1)..(497): Homolog of NCBI NO: 7459616 NR Description: hypothetical protein F18B3.120 - Arabidopsis >gi|4835235|emb|CAB42913.1| putative protein [Arabidopsis
  misc_feature (1)..(287): Homolog of NCBI NO: 15240012 NR Description: photoreceptor-interacting protein-like; protein At5g66560.1, supported by cDNA: gi_15146317 [Arabidopsis
  misc_feature (392)..(494): Homolog of NCBI NO: 15240012 NR Description: photoreceptor-interacting protein-like; protein At5g66560.1, supported by cDNA: gi_15146317 [Arabidopsis
  misc_feature (1)..(287): Homolog of NCBI NO: 15146318 NR Description: AT5g66560/K1F13_23 [Arabidopsis thaliana]
  misc_feature (392)..(494): Homolog of NCBI NO: 15146318 NR Description: AT5g66560/K1F13_23 [Arabidopsis thaliana]
  misc_feature (112)..(494): Homolog of NCBI NO: 10177537 NR Description: photoreceptor-interacting protein-like
  misc_feature (1)..(287): Homolog of NCBI NO: 10177537 NR Description: photoreceptor-interacting protein-like
  misc_feature (112)..(490): Homolog of NCBI NO: 15240012 NR Description: photoreceptor-interacting protein-like; protein At5g66560.1, supported by cDNA: gi_15146317 [Arabidopsis
MVIKISYGFKVDISVSTAVPLRCAAEYLEMTEEYSPENLISKTEKFLSEFVFTNVQESIKALKACESVSSLAESLCITEQCIDSIVFQASSTDPSSFYGWPINNGGIFTVDRKKQSKDSKTELWFEDLTELSFPIFRRVILSMKSSVLSPEIVERSLLTYAKKHIPGISRSSSASSSSSSSSTTIASENQQRELLETITSDLPLTATTTRSLFGLLRAAIILNASENCRKFLEKKIGSNLEKATLDDLLIPSYSYLNETLYDIDLVERLLRRFLENVAVSSSSLTVVGRLIDGVLGEIASDANLKPEQFYNLAVLLPVQARVYDDGLYRAVDIYFKTHSWILEEEKEKICSVMDCRKLTVEGCTHAAQNERLPLRAVVQVLFLEQLQLRQVITGTLLTEEDGDKTVVDLGRWKEAVKENQVLRLDMDTMRTRVNQLEKECLYLKKVIAKIDKESLLKAKHGAGKWSIGKKFGCKFSAQVCDSQEATMVDRRSRRFLS

SEQ ID NO: 90752 - DNA, 1605 bp, Arabidopsis thaliana
  misc_feature (1)..(1605): Ceres Seq. ID no. 12725144
  misc_feature: MA Experiment ID: 108434 Result: Down-regulated in Transcription
  misc_feature: MA Experiment 108434 PARAMETER Experiment Name: At_Root_Tips_cDNA_P Parameter: Tissue Value: Root Tips
  misc_feature: MA Experiment ID: 108435 Result: Up-regulated in Transcription
  misc_feature: MA Experiment 108435 PARAMETER Experiment Name: At_stm_Mutants_cDNA_P Parameter: Plant Line Value: wt Landsburg vs stm
  misc_feature: MA Experiment 108435 PARAMETER Experiment Name: At_stm_Mutants_cDNA_P Parameter: Tissue Value: Shoot Apical Meristem Region
  misc_feature: MA Experiment ID: 108461 Result: Up-regulated in Transcription
  misc_feature: MA Experiment 108461 PARAMETER Experiment Name: At_Germinating_Seeds_cDNA_P Parameter: Age (day) Value: 1 vs. 0
  misc_feature: MA Experiment 108461 PARAMETER Experiment Name: At_Germinating_Seeds_cDNA_P Parameter: Tissue Value: Germinating Seeds
  misc_feature: MA Experiment ID: 108462 Result: Up-regulated in Transcription
  misc_feature: MA Experiment 108462 PARAMETER Experiment Name: At_Germinating_Seeds_cDNA_P Parameter: Age (day) Value: 2 vs. 0
  misc_feature: MA Experiment 108462 PARAMETER Experiment Name: At_Germinating_Seeds_cDNA_P Parameter: Tissue Value: Germinating Seeds
  misc_feature: MA Experiment ID: 108463 Result: Up-regulated in Transcription
  misc_feature: MA Experiment 108463 PARAMETER Experiment Name: At_Germinating_Seeds_cDNA_P Parameter: Age (day) Value: 3 vs. 0
  misc_feature: MA Experiment 108463 PARAMETER Experiment Name: At_Germinating_Seeds_cDNA_P Parameter: Tissue Value: Germinating Seeds
  misc_feature: MA Experiment ID: 108464 Result: Up-regulated in Transcription
  misc_feature: MA Experiment 108464 PARAMETER Experiment Name: At_Germinating_Seeds_cDNA_P Parameter: Age (day) Value: 4 vs. 0
  misc_feature: MA Experiment 108464 PARAMETER Experiment Name: At_Germinating_Seeds_cDNA_P Parameter: Tissue Value: Germinating Seeds
  misc_feature: MA Experiment ID: 108488 Result: Down-regulated in Transcription
  misc_feature: MA Experiment ID: 108585 Result: Up-regulated in Transcription
  misc_feature: MA Experiment 108585 PARAMETER Experiment Name: At_5mM_NaNP_cDNA_P Parameter: Timepoint (hr) Value: 6
  misc_feature: MA Experiment 108585 PARAMETER Experiment Name: At_5mM_NaNP_cDNA_P Parameter: Tissue Value: Aerial
  misc_feature: MA Experiment 108585 PARAMETER Experiment Name: At_5mM_NaNP_cDNA_P Parameter: Treatment Value: null
  misc_feature: MA Experiment ID: 108595 Result: Up-regulated in Transcription
  misc_feature: MA Experiment 108595 PARAMETER Experiment Name: At_Ler-pi_Ovule_cDNA_P Parameter: Plant Line Value: null
  misc_feature: MA Experiment ID: 20000070 Result: Up-regulated in Transcription
  misc_feature: MA Experiment 20000070 PARAMETER Experiment Name: At_100uM_ABA_Mutants_cDNA_P Parameter: Plant Line Value: CS24
  misc_feature: MA Experiment 20000070 PARAMETER Experiment Name: At_100uM_ABA_Mutants_cDNA_P Parameter: Timepoint (hr) Value: 6
  misc_feature: MA Experiment 20000070 PARAMETER Experiment Name: At_100uM_ABA_Mutants_cDNA_P Parameter: Tissue Value: Aerial
  misc_feature: MA Experiment 20000070 PARAMETER Experiment Name: At_100uM_ABA_Mutants_cDNA_P Parameter: Treatment Value: 100uM ABA vs. No Treatment
  misc_feature: MA Experiment ID: 20000071 Result: Up-regulated in Transcription
  misc_feature: MA Experiment 20000071 PARAMETER Experiment Name: At_100uM_ABA_Mutants_cDNA_P Parameter: Plant Line Value: CS8104
  misc_feature: MA Experiment 20000071 PARAMETER Experiment Name: At_100uM_ABA_Mutants_cDNA_P Parameter: Timepoint (hr) Value: 6
  misc_feature: MA Experiment 20000071 PARAMETER Experiment Name: At_100uM_ABA_Mutants_cDNA_P Parameter: Tissue Value: Aerial
  misc_feature: MA Experiment 20000071 PARAMETER Experiment Name: At_100uM_ABA_Mutants_cDNA_P Parameter: Treatment Value: 100uM ABA vs. No Treatment
  misc_feature: MA Experiment ID: 20000072 Result: Up-regulated in Transcription
  misc_feature: MA Experiment 20000072 PARAMETER Experiment Name: At_100uM_ABA_Mutants_cDNA_P Parameter: Plant Line Value: CS8105
  misc_feature: MA Experiment 20000072 PARAMETER Experiment Name: At_100uM_ABA_Mutants_cDNA_P Parameter: Timepoint (hr) Value: 6
  misc_feature: MA Experiment 20000072 PARAMETER Experiment Name: At_100uM_ABA_Mutants_cDNA_P Parameter: Tissue Value: Aerial
  misc_feature: MA Experiment 20000072 PARAMETER Experiment Name: At_100uM_ABA_Mutants_cDNA_P Parameter: Treatment Value: 100uM ABA vs. No Treatment
  misc_feature: MA Experiment ID: 20000086 Result: Up-regulated in Transcription
  misc_feature: MA Experiment 20000086 PARAMETER Experiment Name: At_100uM_ABA_Mutants_cDNA_P Parameter: Plant Line Value: CS22
  misc_feature: MA Experiment 20000086 PARAMETER Experiment Name: At_100uM_ABA_Mutants_cDNA_P Parameter: Timepoint (hr) Value: 6
  misc_feature: MA Experiment 20000086 PARAMETER Experiment Name: At_100uM_ABA_Mutants_cDNA_P Parameter: Tissue Value: Aerial
  misc_feature: MA Experiment 20000086 PARAMETER Experiment Name: At_100uM_ABA_Mutants_cDNA_P Parameter: Treatment Value: 100uM ABA vs. No Treatment
  misc_feature: MA Experiment ID: 20000087 Result: Up-regulated in Transcription
  misc_feature: MA Experiment 20000087 PARAMETER Experiment Name: At_100uM_ABA_Mutants_cDNA_P Parameter: Plant Line Value: WS
  misc_feature: MA Experiment 20000087 PARAMETER Experiment Name: At_100uM_ABA_Mutants_cDNA_P Parameter: Timepoint (hr) Value: 6
  misc_feature: MA Experiment 20000087 PARAMETER Experiment Name: At_100uM_ABA_Mutants_cDNA_P Parameter: Tissue Value: Aerial
  misc_feature: MA Experiment 20000087 PARAMETER Experiment Name: At_100uM_ABA_Mutants_cDNA_P Parameter: Treatment Value: 100uM ABA vs. No Treatment
  misc_feature: MA Experiment ID: 20000088 Result: Up-regulated in Transcription
  misc_feature: MA Experiment 20000088 PARAMETER Experiment Name: At_100uM_ABA_Mutants_cDNA_P Parameter: Plant Line Value: Landsberg
  misc_feature: MA Experiment 20000088 PARAMETER Experiment Name: At_100uM_ABA_Mutants_cDNA_P Parameter: Timepoint (hr) Value: 6
  misc_feature: MA Experiment 20000088 PARAMETER Experiment Name: At_100uM_ABA_Mutants_cDNA_P Parameter: Tissue Value: Aerial
  misc_feature: MA Experiment 20000088 PARAMETER Experiment Name: At_100uM_ABA_Mutants_cDNA_P Parameter: Treatment Value: 100uM ABA vs. No Treatment
  misc_feature: MA Experiment ID: 20000117 Result: Up-regulated in Transcription
  misc_feature: MA Experiment 20000117 PARAMETER Experiment Name: At_100uM_ABA_Mutants_cDNA_P Parameter: Plant Line Value: Columbia
  misc_feature: MA Experiment 20000117 PARAMETER Experiment Name: At_100uM_ABA_Mutants_cDNA_P Parameter: Timepoint (hr) Value: 6
  misc_feature: MA Experiment 20000117 PARAMETER Experiment Name: At_100uM_ABA_Mutants_cDNA_P Parameter: Tissue Value: Aerial
  misc_feature: MA Experiment 20000117 PARAMETER Experiment Name: At_100uM_ABA_Mutants_cDNA_P Parameter: Treatment Value: 100uM ABA vs. No Treatment
atgagctcctctgactcttcttccgccgaatcccgtctagccacggctaagacggttctcaccaccgcggcttcggtggctgcgaccgcaatgctagctcgatctttagtccaagattatttgcctgacgaggtgcatcactacatttcctatggattccgttccatctttggttacttctcatcccaaatgacgataatcatcgaagaatttgaaggttttgctcacaatgaagtctttgaagctgcagaggcctatctagccaccaagatctctccttctaacaaaagaatcaaagtgagtaaacatgagaaagaaaacaactacaatgtcaccgtggagcgtgacgaagaagttgttgacacctacaatggcgtcaaattccagtggatcctccattgtcgtcatgtcgagtccaagcacttccacaacccacgggatctaaactccacactgagatctgaggtccgatcattcgaactcaacttccacaagaaattcaaagacgtagctcttgaatcttacttgccattcatggtgaaaagagccacgttgatgaagcaagagaagaaaacactcaagatcttcactctctccccagaaaacatgtatgggaactactctgacgcgtggacctctgttactcttgaccatccttctaccttcaaaactctagcaatggattcagatgtcaagacaagtgtgatggaagatctagacaaattcgtaaagcgaagagacttctataaaagggttggtaaagcttggaagagaggttacttgctgtacggtccaccaggcacagggaagtcaagcttgatcgcagccatggccaatcatctcaactttgatatatacgacctagagttgaccgcggttaacaacaattctgagctccggcgattattgattgccactgctaatcgttcgattcttatcgtagaagatatcgattgttcactagaattgaaagataggactagcgatgaacctcctcgggaatctgacgatatagaagatccacggtataaaaaagtgacactctctggactgttgaatttcatagatggtctatggtcaagctgcggtgacgaaaggatcataatcttcacaaccaattacaaagagaaactcgacgcggccttgctgagaccaggacgtatggatatgcacatccacatgtcgtattgcacaccaagtactttcaaagctcttgctttgaactatcttgagatcaaagagcaccgccttttcagcaagatcgaggaaggtattgaggcgacagaggtcactccagcagaagtagctgaacagcttatgagaaatgactctgtagacaaggttcttgagggtttgattgagttcttgaaagtcaagaagatcgaaaacgaacaagataaggccaaaacagagaagcaagagttggagaacaagaaaaagaccaaggagggaacagattccgtagtcaagaaagaggttgatgaacagctagtgaggaatgaccgtgttgataaggttcttgagggtttggtcgagttgttaaaagccaagaagatcgaggacgaccaagataaagccaaacatgaggaggttgaacaacattaa

SEQ ID NO: 90753 - protein, 534 aa, Arabidopsis thaliana; identical to SEQ ID NO: 22006
  peptide (1)..(534): Ceres Seq. ID no. 12725145
  misc_feature (259)..(450): Pfam Name: ATPase family associated with various cellular Pfam Description: ATPase family associated with various cellular
  misc_feature (1)..(534): Homolog of NCBI NO: 7485703 NR Description: hypothetical protein F18B3.210 - Arabidopsis >gi|4835244|emb|CAB42922.1| putative mitochondrial protein thaliana] >gi|13877697|gb|AAK43926.1|AF370607_1 putative
  misc_feature (1)..(534): Homolog of NCBI NO: 30693378 NR Description: AAA-type ATPase family [Arabidopsis thaliana] AT3g50930/F18B3_210 [Arabidopsis thaliana]
  misc_feature (1)..(534): Homolog of NCBI NO: 21592769 NR Description: BCS1 protein-like protein [Arabidopsis thaliana]
  misc_feature (6)..(465): Homolog of NCBI NO: 30693380 NR Description: AAA-type ATPase family [Arabidopsis thaliana]
  misc_feature (488)..(526): Homolog of NCBI NO: 30693380 NR Description: AAA-type ATPase family [Arabidopsis thaliana]
  misc_feature (6)..(465): Homolog of NCBI NO: 39104562 NR Description: putative BCS1 protein [Arabidopsis thaliana]
  misc_feature (488)..(526): Homolog of NCBI NO: 39104562 NR Description: putative BCS1 protein [Arabidopsis thaliana]
  misc_feature (6)..(346): Homolog of NCBI NO: 7485704 NR Description: hypothetical protein F18B3.220 - Arabidopsis >gi|4835245|emb|CAB42923.1| putative mitochondrial protein
  misc_feature (345)..(465): Homolog of NCBI NO: 7485704 NR Description: hypothetical protein F18B3.220 - Arabidopsis >gi|4835245|emb|CAB42923.1| putative mitochondrial protein
  misc_feature (488)..(526): Homolog of NCBI NO: 7485704 NR Description: hypothetical protein F18B3.220 - Arabidopsis >gi|4835245|emb|CAB42923.1| putative mitochondrial protein

SEQ ID NO: 90754 - protein, 504 aa, Arabidopsis thaliana; identical to SEQ ID NO: 22007
  peptide (1)..(504): Ceres Seq. ID no. 12725146
  misc_feature (229)..(420): Pfam Name: ATPase family associated with various cellular Pfam Description: ATPase family associated with various cellular
  misc_feature (1)..(504): Homolog of NCBI NO: 7485703 NR Description: hypothetical protein F18B3.210 - Arabidopsis >gi|4835244|emb|CAB42922.1| putative mitochondrial protein thaliana] >gi|13877697|gb|AAK43926.1|AF370607_1 putative
  misc_feature (1)..(504): Homolog of NCBI NO: 30693378 NR Description: AAA-type ATPase family [Arabidopsis thaliana] AT3g50930/F18B3_210 [Arabidopsis thaliana]
  misc_feature (1)..(504): Homolog of NCBI NO: 21592769 NR Description: BCS1 protein-like protein [Arabidopsis thaliana]
  misc_feature (1)..(435): Homolog of NCBI NO: 30693380 NR Description: AAA-type ATPase family [Arabidopsis thaliana]
  misc_feature (458)..(496): Homolog of NCBI NO: 30693380 NR Description: AAA-type ATPase family [Arabidopsis thaliana]
  misc_feature (1)..(435): Homolog of NCBI NO: 39104562 NR Description: putative BCS1 protein [Arabidopsis thaliana]
  misc_feature (458)..(496): Homolog of NCBI NO: 39104562 NR Description: putative BCS1 protein [Arabidopsis thaliana]
  misc_feature (1)..(316): Homolog of NCBI NO: 7485704 NR Description: hypothetical protein F18B3.220 - Arabidopsis >gi|4835245|emb|CAB42923.1| putative mitochondrial protein
  misc_feature (315)..(435): Homolog of NCBI NO: 7485704 NR Description: hypothetical protein F18B3.220 - Arabidopsis >gi|4835245|emb|CAB42923.1| putative mitochondrial protein
  misc_feature (458)..(496): Homolog of NCBI NO: 7485704 NR Description: hypothetical protein F18B3.220 - Arabidopsis >gi|4835245|emb|CAB42923.1| putative mitochondrial protein

SEQ ID NO: 90755 - protein, 471 aa, Arabidopsis thaliana
  peptide (1)..(471): Ceres Seq. ID no. 12725147
  misc_feature (196)..(387): Pfam Name: ATPase family associated with various cellular Pfam Description: ATPase family associated with various cellular
  misc_feature (1)..(471): Homolog of NCBI NO: 7485703 NR Description: hypothetical protein F18B3.210 - Arabidopsis >gi|4835244|emb|CAB42922.1| putative mitochondrial protein thaliana] >gi|13877697|gb|AAK43926.1|AF370607_1 putative
  misc_feature (1)..(471): Homolog of NCBI NO: 30693378 NR Description: AAA-type ATPase family [Arabidopsis thaliana] AT3g50930/F18B3_210 [Arabidopsis thaliana]
  misc_feature (1)..(471): Homolog of NCBI NO: 21592769 NR Description: BCS1 protein-like protein [Arabidopsis thaliana]
  misc_feature (1)..(402): Homolog of NCBI NO: 30693380 NR Description: AAA-type ATPase family [Arabidopsis thaliana]
  misc_feature (425)..(463): Homolog of NCBI NO: 30693380 NR Description: AAA-type ATPase family [Arabidopsis thaliana]
  misc_feature (1)..(402): Homolog of NCBI NO: 39104562 NR Description: putative BCS1 protein [Arabidopsis thaliana]
  misc_feature (425)..(463): Homolog of NCBI NO: 39104562 NR Description: putative BCS1 protein [Arabidopsis thaliana]
  misc_feature (1)..(283): Homolog of NCBI NO: 7485704 NR Description: hypothetical protein F18B3.220 - Arabidopsis >gi|4835245|emb|CAB42923.1| putative mitochondrial protein
  misc_feature (282)..(402): Homolog of NCBI NO: 7485704 NR Description: hypothetical protein F18B3.220 - Arabidopsis >gi|4835245|emb|CAB42923.1| putative mitochondrial protein
  misc_feature (425)..(463): Homolog of NCBI NO: 7485704 NR Description: hypothetical protein F18B3.220 - Arabidopsis >gi|4835245|emb|CAB42923.1| putative mitochondrial protein
MTIIIEEFEGFAHNEVFEAAEAYLATKISPSNKRIKVSKHEKENNYNVTVERDEEVVDTYNGVKFQWILHCRHVESKHFHNPRDLNSTLRSEVRSFELNFHKKFKDVALESYLPFMVKRATLMKQEKKTLKIFTLSPENMYGNYSDAWTSVTLDHPSTFKTLAMDSDVKTSVMEDLDKFVKRRDFYKRVGKAWKRGYLLYGPPGTGKSSLIAAMANHLNFDIYDLELTAVNNNSELRRLLIATANRSILIVEDIDCSLELKDRTSDEPPRESDDIEDPRYKKVTLSGLLNFIDGLWSSCGDERIIIFTTNYKEKLDAALLRPGRMDMHIHMSYCTPSTFKALALNYLEIKEHRLFSKIEEGIEATEVTPAEVAEQLMRNDSVDKVLEGLIEFLKVKKIENEQDKAKTEKQELENKKKTKEGTDSVVKKEVDEQLVRNDRVDKVLEGLVELLKAKKIEDDQDKAKHEEVEQH

SEQ ID NO: 90756 - DNA, 1011 bp, Arabidopsis thaliana
  misc_feature (1)..(1011): Ceres Seq. ID no. 12725156
  misc_feature: MA Experiment ID: 20000171 Result: Up-regulated in Transcription
  misc_feature: MA Experiment 20000171 PARAMETER Experiment Name: At_42deg_Heat_P Parameter: Age (day) Value: 14
  misc_feature: MA Experiment 20000171 PARAMETER Experiment Name: At_42deg_Heat_P Parameter: Organism Value: A. thaliana
  misc_feature: MA Experiment 20000171 PARAMETER Experiment Name: At_42deg_Heat_P Parameter: Plant Line Value: WS
  misc_feature: MA Experiment 20000171 PARAMETER Experiment Name: At_42deg_Heat_P Parameter: Temperature (deg C) Value: 42 vs. 22
  misc_feature: MA Experiment 20000171 PARAMETER Experiment Name: At_42deg_Heat_P Parameter: Timepoint (hr) Value: 1
  misc_feature: MA Experiment 20000171 PARAMETER Experiment Name: At_42deg_Heat_P Parameter: Tissue Value: Aerial
  misc_feature: MA Experiment ID: 20000173 Result: Up-regulated in Transcription
  misc_feature: MA Experiment 20000173 PARAMETER Experiment Name: At_42deg_Heat_P Parameter: Age (day) Value: 14
  misc_feature: MA Experiment 20000173 PARAMETER Experiment Name: At_42deg_Heat_P Parameter: Organism Value: A. thaliana
  misc_feature: MA Experiment 20000173 PARAMETER Experiment Name: At_42deg_Heat_P Parameter: Plant Line Value: WS
  misc_feature: MA Experiment 20000173 PARAMETER Experiment Name: At_42deg_Heat_P Parameter: Temperature (deg C) Value: 42 vs. 22
  misc_feature: MA Experiment 20000173 PARAMETER Experiment Name: At_42deg_Heat_P Parameter: Timepoint (hr) Value: 6
  misc_feature: MA Experiment 20000173 PARAMETER Experiment Name: At_42deg_Heat_P Parameter: Tissue Value: Aerial
  misc_feature: MA Experiment ID: 20000235 Result: Down-regulated in Transcription
  misc_feature: MA Experiment 20000235 PARAMETER Experiment Name: At_Siliques_P Parameter: Age (day) Value: 21
  misc_feature: MA Experiment 20000235 PARAMETER Experiment Name: At_Siliques_P Parameter: Organism Value: A. thaliana
  misc_feature: MA Experiment 20000235 PARAMETER Experiment Name: At_Siliques_P Parameter: Plant Line Value: WS
  misc_feature: MA Experiment 20000235 PARAMETER Experiment Name: At_Siliques_P Parameter: Tissue Value: 5-10mm Siliques vs. Whole Plant
atggcgggcattgttctctctcaaatctcacttgttgcgctgtttcctctatgtatttgttatcaaacacatcaaagcacgagctctgtagcctctctatcccctcagttttacgagaactcgtgcccaaacgcacaagccatcgttcaatcttacgtcgccaatgcatacttcaatgaccctcgcatggctgcctcaattcttaggctccatttccacgactgtttcgtcaatggatgtgatgcttccgtactattggacagtagtggaaccatggaaagcgagaaacgatcaaatgcaaatcgagactctgctcgagggttcgaagtcattgacgagatcaagtctgccttggaaaatgaatgtcctgaaacagtttcttgcgccgatctattggctctcgttgctagagactctattgttatttgtggtggacctagttgggaagtatatcttggaagaagagatgcaagagaagcaagcttgattggttccatggaaaacattccttctcccgagtccacgttacaaacaattctcactatgttcaactttcaaggacttgatctcaccgatcttgttgccctcttagggagtcacacgataggaaactcaaggtgtattggtttccgacaaaggttatacaaccatactggaaacaacgatcccgaccagactttgaatcaagactacgcctctatgttgcagcagggatgtccgatttcgggcaacgaccagaacctctttaatcttgactatgtgacgccgactaagtttgacaattactactacaagaatcttgtgaactttagaggactcttgagttctgatgagatattgttcacgcaaagcatagagactatggagatggtcaagtattacgcggagaatgagggagcgttctttgagcagtttgcgaagtcgatggtgaagatggggaacatctcaccgttgacggggacggatggtgagatccggaggatatgccggagggttaaccatgatgtttga

SEQ ID NO: 90757 - protein, 336 aa, Arabidopsis thaliana
  peptide (1)..(336): Ceres Seq. ID no. 12725157
  misc_feature (49)..(297): Pfam Name: Peroxidase Pfam Description: Peroxidase
  misc_feature (1)..(336): Homolog of NCBI NO: 15230365 NR Description: peroxidase, putative; protein id: At3g50990.1 thaliana] >gi|25453214|sp|Q9SD46|PE36_ARATH Peroxidase 36
  misc_feature (4)..(334): Homolog of NCBI NO: 15239370 NR Description: peroxidase, putative; protein id: At5g66390.1 thaliana] >gi|26397792|sp|Q9FJZ9|PE72_ARATH Peroxidase 72 (Atperox P72) (PRXR8) (ATP6a) >gi|10177520|dbj|BAB10915.1|
  misc_feature (4)..(334): Homolog of NCBI NO: 1402918 NR Description: peroxidase [Arabidopsis thaliana]
  misc_feature (32)..(334): Homolog of NCBI NO: 7658147 NR Description: peroxidase [Asparagus officinalis]
  misc_feature (11)..(335): Homolog of NCBI NO: 34913714 NR Description: putative peroxidase [Oryza sativa (japonica >gi|20146478|dbj|BAB89258.1| putative peroxidase [Oryza sativa
  misc_feature (9)..(333): Homolog of NCBI NO: 7453853 NR Description: peroxidase prx14 precursor [Spinacia oleracea]
  misc_feature (4)..(333): Homolog of NCBI NO: 7453855 NR Description: peroxidase prx15 precursor [Spinacia oleracea]
  misc_feature (3)..(334): Homolog of NCBI NO: 15224116 NR Description: peroxidase, putative; protein id: At2g18150.1, by cDNA: 126030., supported by cDNA: gi_19698902 [Arabidopsis >gi|25453215|sp|Q9SI16|PE15_ARATH Peroxidase 15 precursor
  misc_feature (11)..(334): Homolog of NCBI NO: 7453851 NR Description: peroxidase prx13 precursor [Spinacia oleracea]
  misc_feature (3)..(334): Homolog of NCBI NO: 21537275 NR Description: putative peroxidase [Arabidopsis thaliana]
MAGIVLSQISLVALFPLCICYQTHQSTSSVASLSPQFYENSCPNAQAIVQSYVANAYFNDPRMAASILRLHFHDCFVNGCDASVLLDSSGTMESEKRSNANRDSARGFEVIDEIKSALENECPETVSCADLLALVARDSIVICGGPSWEVYLGRRDAREASLIGSMENIPSPESTLQTILTMFNFQGLDLTDLVALLGSHTIGNSRCIGFRQRLYNHTGNNDPDQTLNQDYASMLQQGCPISGNDQNLFNLDYVTPTKFDNYYYKNLVNFRGLLSSDEILFTQSIETMEMVKYYAENEGAFFEQFAKSMVKMGNISPLTGTDGEIRRICRRVNHDV

SEQ ID NO: 90758 - protein, 274 aa, Arabidopsis thaliana
  peptide (1)..(274): Ceres Seq. ID no. 12725158
  misc_feature (1)..(235): Pfam Name: Peroxidase Pfam Description: Peroxidase
  misc_feature (1)..(274): Homolog of NCBI NO: 15230365 NR Description: peroxidase, putative; protein id: At3g50990.1 thaliana] >gi|25453214|sp|Q9SD46|PE36_ARATH Peroxidase 36
  misc_feature (1)..(272): Homolog of NCBI NO: 15239370 NR Description: peroxidase, putative; protein id: At5g66390.1 thaliana] >gi|26397792|sp|Q9FJZ9|PE72_ARATH Peroxidase 72 (Atperox P72) (PRXR8) (ATP6a) >gi|10177520|dbj|BAB10915.1|
  misc_feature (1)..(272): Homolog of NCBI NO: 1402918 NR Description: peroxidase [Arabidopsis thaliana]
  misc_feature (1)..(272): Homolog of NCBI NO: 7658147 NR Description: peroxidase [Asparagus officinalis]
  misc_feature (1)..(273): Homolog of NCBI NO: 34913714 NR Description: putative peroxidase [Oryza sativa (japonica >gi|20146478|dbj|BAB89258.1| putative peroxidase [Oryza sativa
  misc_feature (1)..(271): Homolog of NCBI NO: 7453853 NR Description: peroxidase prx14 precursor [Spinacia oleracea]
  misc_feature (1)..(271): Homolog of NCBI NO: 7453855 NR Description: peroxidase prx15 precursor [Spinacia oleracea]
  misc_feature (1)..(272): Homolog of NCBI NO: 15224116 NR Description: peroxidase, putative; protein id: At2g18150.1, by cDNA: 126030., supported by cDNA: gi_19698902 [Arabidopsis >gi|25453215|sp|Q9SI16|PE15_ARATH Peroxidase 15 precursor
  misc_feature (1)..(272): Homolog of NCBI NO: 7453851 NR Description: peroxidase prx13 precursor [Spinacia oleracea]
  misc_feature (1)..(272): Homolog of NCBI NO: 21537275 NR Description: putative peroxidase [Arabidopsis thaliana]
MAASILRLHFHDCFVNGCDASVLLDSSGTMESEKRSNANRDSARGFEVIDEIKSALENECPETVSCADLLALVARDSIVICGGPSWEVYLGRRDAREASLIGSMENIPSPESTLQTILTMFNFQGLDLTDLVALLGSHTIGNSRCIGFRQRLYNHTGNNDPDQTLNQDYASMLQQGCPISGNDQNLFNLDYVTPTKFDNYYYKNLVNFRGLLSSDEILFTQSIETMEMVKYYAENEGAFFEQFAKSMVKMGNISPLTGTDGEIRRICRRVNHDV

SEQ ID NO: 90759 - protein, 245 aa, Arabidopsis thaliana
  peptide (1)..(245): Ceres Seq. ID no. 12725159
  misc_feature (1)..(206): Pfam Name: Peroxidase Pfam Description: Peroxidase
  misc_feature (1)..(245): Homolog of NCBI NO: 15230365 NR Description: peroxidase, putative; protein id: At3g50990.1 thaliana] >gi|25453214|sp|Q9SD46|PE36_ARATH Peroxidase 36
  misc_feature (1)..(243): Homolog of NCBI NO: 15239370 NR Description: peroxidase, putative; protein id: At5g66390.1 thaliana] >gi|26397792|sp|Q9FJZ9|PE72_ARATH Peroxidase 72 (Atperox P72) (PRXR8) (ATP6a) >gi|10177520|dbj|BAB10915.1|
  misc_feature (1)..(243): Homolog of NCBI NO: 1402918 NR Description: peroxidase [Arabidopsis thaliana]
  misc_feature (1)..(243): Homolog of NCBI NO: 7658147 NR Description: peroxidase [Asparagus officinalis]
  misc_feature (1)..(244): Homolog of NCBI NO: 34913714 NR Description: putative peroxidase [Oryza sativa (japonica >gi|20146478|dbj|BAB89258.1| putative peroxidase [Oryza sativa
  misc_feature (1)..(242): Homolog of NCBI NO: 7453853 NR Description: peroxidase prx14 precursor [Spinacia oleracea]
  misc_feature (1)..(242): Homolog of NCBI NO: 7453855 NR Description: peroxidase prx15 precursor [Spinacia oleracea]
  misc_feature (1)..(243): Homolog of NCBI NO: 15224116 NR Description: peroxidase, putative; protein id: At2g18150.1, by cDNA: 126030., supported by cDNA: gi_19698902 [Arabidopsis >gi|25453215|sp|Q9SI16|PE15_ARATH Peroxidase 15 precursor
  misc_feature (1)..(243): Homolog of NCBI NO: 7453851 NR Description: peroxidase prx13 precursor [Spinacia oleracea]
  misc_feature (1)..(243): Homolog of NCBI NO: 21537275 NR Description: putative peroxidase [Arabidopsis thaliana]
MESEKRSNANRDSARGFEVIDEIKSALENECPETVSCADLLALVARDSIVICGGPSWEVYLGRRDAREASLIGSMENIPSPESTLQTILTMFNFQGLDLTDLVALLGSHTIGNSRCIGFRQRLYNHTGNNDPDQTLNQDYASMLQQGCPISGNDQNLFNLDYVTPTKFDNYYYKNLVNFRGLLSSDEILFTQSIETMEMVKYYAENEGAFFEQFAKSMVKMGNISPLTGTDGEIRRICRRVNHDV

SEQ ID NO: 90760 - DNA, 1128 bp, Arabidopsis thaliana
  misc_feature (1)..(1128): Ceres Seq. ID no. 12725164
  misc_feature: MA Experiment ID: 20000264 Result: Up-regulated in Transcription
  misc_feature: MA Experiment 20000264 PARAMETER Experiment Name: At_Open_Flower_P Parameter: Age (day) Value: 21
  misc_feature: MA Experiment 20000264 PARAMETER Experiment Name: At_Open_Flower_P Parameter: Plant Line Value: WS
  misc_feature: MA Experiment 20000264 PARAMETER Experiment Name: At_Open_Flower_P Parameter: Tissue Value: Open Flower vs. Whole Plant
  misc_feature: MA Experiment ID: 20000437 Result: Up-regulated in Transcription
  misc_feature: MA Experiment 20000437 PARAMETER Experiment Name: At_Drought_P Parameter: Age (day) Value: 8
  misc_feature: MA Experiment 20000437 PARAMETER Experiment Name: At_Drought_P Parameter: Organism Value: A. thaliana
  misc_feature: MA Experiment 20000437 PARAMETER Experiment Name: At_Drought_P Parameter: Plant Line Value: WS
  misc_feature: MA Experiment 20000437 PARAMETER Experiment Name: At_Drought_P Parameter: Timepoint (hr) Value: 24
  misc_feature: MA Experiment 20000437 PARAMETER Experiment Name: At_Drought_P Parameter: Tissue Value: Whole Plant
  misc_feature: MA Experiment 20000437 PARAMETER Experiment Name: At_Drought_P Parameter: Treatment Value: Drought vs. No Drought
  misc_feature: MA Experiment ID: 20000794 Result: Up-regulated in Transcription
  misc_feature: MA Experiment 20000794 PARAMETER Experiment Name: At_Petals_P Parameter: Age (day) Value: 23-25 days
  misc_feature: MA Experiment 20000794 PARAMETER Experiment Name: At_Petals_P Parameter: Plant Line Value: WS
  misc_feature: MA Experiment 20000794 PARAMETER Experiment Name: At_Petals_P Parameter: Tissue Value: Petals vs. Whole plant
  misc_feature: MA Experiment ID: 20001555 Result: Up-regulated in Transcription
  misc_feature: MA Experiment 20001555 PARAMETER Experiment Name: At_Drought_Soil_Dry_P Parameter: Age (day) Value: 24
  misc_feature: MA Experiment 20001555 PARAMETER Experiment Name: At_Drought_Soil_Dry_P Parameter: Organism Value: A. thaliana
  misc_feature: MA Experiment 20001555 PARAMETER Experiment Name: At_Drought_Soil_Dry_P Parameter: Plant Line Value: WS
  misc_feature: MA Experiment 20001555 PARAMETER Experiment Name: At_Drought_Soil_Dry_P Parameter: Post Timepoint (hr) Value: None
  misc_feature: MA Experiment 20001555 PARAMETER Experiment Name: At_Drought_Soil_Dry_P Parameter: Post-Treatment Value: None
  misc_feature: MA Experiment 20001555 PARAMETER Experiment Name: At_Drought_Soil_Dry_P Parameter: Timepoint (day) Value: 10
  misc_feature: MA Experiment 20001555 PARAMETER Experiment Name: At_Drought_Soil_Dry_P Parameter: Treatment Value: Drought vs. No Drought
  misc_feature: MA Experiment ID: 20001556 Result: Up-regulated in Transcription
  misc_feature: MA Experiment 20001556 PARAMETER Experiment Name: At_Drought_Soil_Dry_P Parameter: Age (day) Value: 26
  misc_feature: MA Experiment 20001556 PARAMETER Experiment Name: At_Drought_Soil_Dry_P Parameter: Organism Value: A. thaliana
  misc_feature: MA Experiment 20001556 PARAMETER Experiment Name: At_Drought_Soil_Dry_P Parameter: Plant Line Value: WS
  misc_feature: MA Experiment 20001556 PARAMETER Experiment Name: At_Drought_Soil_Dry_P Parameter: Post Timepoint (hr) Value: None
  misc_feature: MA Experiment 20001556 PARAMETER Experiment Name: At_Drought_Soil_Dry_P Parameter: Post-Treatment Value: None
  misc_feature: MA Experiment 20001556 PARAMETER Experiment Name: At_Drought_Soil_Dry_P Parameter: Timepoint (day) Value: 12
  misc_feature: MA Experiment 20001556 PARAMETER Experiment Name: At_Drought_Soil_Dry_P Parameter: Treatment Value: Drought vs. No Drought
  misc_feature: MA Experiment ID: 20001559 Result: Up-regulated in Transcription
  misc_feature: MA Experiment 20001559 PARAMETER Experiment Name: At_Drought_Soil_Dry_P Parameter: Age (day) Value: 28
  misc_feature: MA Experiment 20001559 PARAMETER Experiment Name: At_Drought_Soil_Dry_P Parameter: Organism Value: A. thaliana
  misc_feature: MA Experiment 20001559 PARAMETER Experiment Name: At_Drought_Soil_Dry_P Parameter: Plant Line Value: WS
  misc_feature: MA Experiment 20001559 PARAMETER Experiment Name: At_Drought_Soil_Dry_P Parameter: Post Timepoint (hr) Value: 29
  misc_feature: MA Experiment 20001559 PARAMETER Experiment Name: At_Drought_Soil_Dry_P Parameter: Post-Treatment Value: Re-Water vs. No Drought
  misc_feature: MA Experiment 20001559 PARAMETER Experiment Name: At_Drought_Soil_Dry_P Parameter: Timepoint (day) Value: 14
  misc_feature: MA Experiment 20001559 PARAMETER Experiment Name: At_Drought_Soil_Dry_P Parameter: Treatment Value: Drought vs. No Drought
  misc_feature: MA Experiment ID: 20001757 Result: Down-regulated in Transcription
  misc_feature: MA Experiment 20001757 PARAMETER Experiment Name: At_50mM_NH4NO3_L-to-H_P Parameter: Timepoint (hr) Value: 6
  misc_feature: MA Experiment 20001757 PARAMETER Experiment Name: At_50mM_NH4NO3_L-to-H_P Parameter: Tissue Value: Leaf
  misc_feature: MA Experiment 20001757 PARAMETER Experiment Name: At_50mM_NH4NO3_L-to-H_P Parameter: Treatment Value: 50mM NH4NO3 vs 100mM Mannitol
  misc_feature: MA Experiment ID: 20001904 Result: Up-regulated in Transcription
  misc_feature: MA Experiment 20001904 PARAMETER Experiment Name: At_Drought_Reproduction_P Parameter: Age (day) Value: 37
  misc_feature: MA Experiment 20001904 PARAMETER Experiment Name: At_Drought_Reproduction_P Parameter: Organism Value: A. thaliana
  misc_feature: MA Experiment 20001904 PARAMETER Experiment Name: At_Drought_Reproduction_P Parameter: Plant Line Value: WS
  misc_feature: MA Experiment 20001904 PARAMETER Experiment Name: At_Drought_Reproduction_P Parameter: Timepoint (day) Value: 7
  misc_feature: MA Experiment 20001904 PARAMETER Experiment Name: At_Drought_Reproduction_P Parameter: Tissue Value: Rosettes
  misc_feature: MA Experiment 20001904 PARAMETER Experiment Name: At_Drought_Reproduction_P Parameter: Treatment Value: Drought vs. No Drought
  misc_feature: MA Experiment ID: 20001905 Result: Up-regulated in Transcription
  misc_feature: MA Experiment 20001905 PARAMETER Experiment Name: At_Drought_Reproduction_P Parameter: Age (day) Value: 40
  misc_feature: MA Experiment 20001905 PARAMETER Experiment Name: At_Drought_Reproduction_P Parameter: Organism Value: A. thaliana
  misc_feature: MA Experiment 20001905 PARAMETER Experiment Name: At_Drought_Reproduction_P Parameter: Plant Line Value: WS
  misc_feature: MA Experiment 20001905 PARAMETER Experiment Name: At_Drought_Reproduction_P Parameter: Timepoint (day) Value: 10
  misc_feature: MA Experiment 20001905 PARAMETER Experiment Name: At_Drought_Reproduction_P Parameter: Tissue Value: Rosettes
  misc_feature: MA Experiment 20001905 PARAMETER Experiment Name: At_Drought_Reproduction_P Parameter: Treatment Value: Drought vs. No Drought
aaatttttcttcttttgaccaccattgcatgcttacccgattgggaaactctttgttatccttattgatcttcttccaacggcgatttcccgatccaaattttgggttgattgaattcaaagtttccgtttttacaaaccaatttcgggaaagttttcatcttttttttatggctgcttacgcgaattatctccgactcgcacgacttggaggaacaagttcaggtgtaaacctgtcgactctcagatcattcggttattcaaatccagcatttgacaagactcaagagtttcgctcctcttcttcatcgttagtatcatattcttcgttcagacaattccacgccagattcatatctcagcttatcaaaaccaatgggaaacgtttgtttcttgtcgatacactagctttggttaggagcttagaagcacaaggcctgccttcaaagcaagccgaggcaataaccggtgctataactgaagttcttaacgatagcttaggagttgtttcacagttagttgtctccaagggagagatgcagaaagctgaaatgacgcaggaatcaaacttatccaagttcaaaagtgaaattaatagttcactggaccaccatttctctttgctgcaacacgagaatgagaaactccgcaatgacatagagcgaatccgctctgatataagacacgagatcgataaagtcacagcaggacaacggttggacctgaatcttgaaaaagggaggataagagatgagttacaaaatcaaaacggagaaacctctaaccttacaaacaaacttgaccgtgagattcacactttgagagctcagttagaagcagccaagtatgaggtgatcaagtactgtattggtactcttgtctccatctcagccgttggtctcgctgtcctccggatcgtcatgtaactccatctgacggtgccggttttaaagaccaactcatcaatcttccctgtcttttaattacgggatgaaaatcttggtcatgttaattatatattcgtatgtttaatgtaattgtattcccccttttttatgtgaaagaaataaagaataaccagtctagtaaatttgaacccttcatgtatatgaatatgatgatgttcttt

SEQ ID NO: 90761 - protein, 307 aa, Arabidopsis thaliana
  peptide (1)..(307): Ceres Seq. ID no. 12725165
  misc_feature (10)..(307): Homolog of NCBI NO: 18409266 NR Description: putative protein; protein id: At3g51090.1, by cDNA: gi_14423521, supported by cDNA: gi_20148346 [Arabidopsis >gi|14423522|gb|AAK62443.1|AF386998_1 putative protein
  misc_feature (57)..(307): Homolog of NCBI NO: 11357624 NR Description: hypothetical protein F24M12.130 - Arabidopsis >gi|6562261|emb|CAB62631.1| putative protein [Arabidopsis
  misc_feature (111)..(307): Homolog of NCBI NO: 18398123 NR Description: expressed protein; protein id: At2g16460.1, by cDNA: 105900., supported by cDNA: gi_17529263 [Arabidopsis >gi|17529264|gb|AAL38859.1| unknown protein [Arabidopsis
  misc_feature (111)..(200): Homolog of NCBI NO: 25411710 NR Description: hypothetical protein At2g16460 [imported] -
  misc_feature (150)..(306): Homolog of NCBI NO: 14318473 NR Description: Hypothetical ORF; Yfl046wp [Saccharomyces
  misc_feature (127)..(307): Homolog of NCBI NO: 40743676 NR Description: hypothetical protein AN5773.2 [Aspergillus
  misc_feature (107)..(307): Homolog of NCBI NO: 19115424 NR Description: hypothetical conserved protein
  misc_feature (124)..(280): Homolog of NCBI NO: 8218057 NR Description: dJ500L14.1 (novel protein) [Homo sapiens]
  misc_feature (127)..(269): Homolog of NCBI NO: 10197624 NR Description: MDS025 [Homo sapiens] MDS011 [Homo sapiens] >gi|18088483|gb|AAH20783.1|AAH20783
  misc_feature (127)..(269): Homolog of NCBI NO: 20149663 NR Description: hypothetical protein MDS025 [Homo sapiens] CUA003 [Homo sapiens] >gi|12053095|emb|CAB66725.1| hypothetical [Homo sapiens] >gi|15778994|gb|AAH14573.1|AAH14573 hypothetical
NFSSFDHHCMLTRLGNSLLSLLIFFQRRFPDPNFGLIEFKVSVFTNQFRESFHLFFMAAYANYLRLARLGGTSSGVNLSTLRSFGYSNPAFDKTQEFRSSSSSLVSYSSFRQFHARFISQLIKTNGKRLFLVDTLALVRSLEAQGLPSKQAEAITGAITEVLNDSLGVVSQLVVSKGEMQKAEMTQESNLSKFKSEINSSLDHHFSLLQHENEKLRNDIERIRSDIRHEIDKVTAGQRLDLNLEKGRIRDELQNQNGETSNLTNKLDREIHTLRAQLEAAKYEVIKYCIGTLVSISAVGLAVLRIVM

SEQ ID NO: 90762 - protein, 298 aa, Arabidopsis thaliana
  peptide (1)..(298): Ceres Seq. ID no. 12725166
  misc_feature (1)..(298): Homolog of NCBI NO: 18409266 NR Description: putative protein; protein id: At3g51090.1, by cDNA: gi_14423521, supported by cDNA: gi_20148346 [Arabidopsis >gi|14423522|gb|AAK62443.1|AF386998_1 putative protein
  misc_feature (48)..(298): Homolog of NCBI NO: 11357624 NR Description: hypothetical protein F24M12.130 - Arabidopsis >gi|6562261|emb|CAB62631.1| putative protein [Arabidopsis
  misc_feature (102)..(298): Homolog of NCBI NO: 18398123 NR Description: expressed protein; protein id: At2g16460.1, by cDNA: 105900., supported by cDNA: gi_17529263 [Arabidopsis >gi|17529264|gb|AAL38859.1| unknown protein [Arabidopsis
  misc_feature (102)..(191): Homolog of NCBI NO: 25411710 NR Description: hypothetical protein At2g16460 [imported] -
  misc_feature (141)..(297): Homolog of NCBI NO: 14318473 NR Description: Hypothetical ORF; Yfl046wp [Saccharomyces
  misc_feature (118)..(298): Homolog of NCBI NO: 40743676 NR Description: hypothetical protein AN5773.2 [Aspergillus
  misc_feature (98)..(298): Homolog of NCBI NO: 19115424 NR Description: hypothetical conserved protein
  misc_feature (115)..(271): Homolog of NCBI NO: 8218057 NR Description: dJ500L14.1 (novel protein) [Homo sapiens]
  misc_feature (118)..(260): Homolog of NCBI NO: 10197624 NR Description: MDS025 [Homo sapiens] MDS011 [Homo sapiens] >gi|18088483|gb|AAH20783.1|AAH20783
  misc_feature (118)..(260): Homolog of NCBI NO: 20149663 NR Description: hypothetical protein MDS025 [Homo sapiens] CUA003 [Homo sapiens] >gi|12053095|emb|CAB66725.1| hypothetical [Homo sapiens] >gi|15778994|gb|AAH14573.1|AAH14573 hypothetical
MLTRLGNSLLSLLIFFQRRFPDPNFGLIEFKVSVFTNQFRESFHLFFMAAYANYLRLARLGGTSSGVNLSTLRSFGYSNPAFDKTQEFRSSSSSLVSYSSFRQFHARFISQLIKTNGKRLFLVDTLALVRSLEAQGLPSKQAEAITGAITEVLNDSLGVVSQLVVSKGEMQKAEMTQESNLSKFKSEINSSLDHHFSLLQHENEKLRNDIERIRSDIRHEIDKVTAGQRLDLNLEKGRIRDELQNQNGETSNLTNKLDREIHTLRAQLEAAKYEVIKYCIGTLVSISAVGLAVLRIVM

SEQ ID NO: 90763 - protein, 251 aa, Arabidopsis thaliana
  peptide (1)..(251): Ceres Seq. ID no. 12725167
  misc_feature (1)..(251): Homolog of NCBI NO: 18409266 NR Description: putative protein; protein id: At3g51090.1, by cDNA: gi_14423521, supported by cDNA: gi_20148346 [Arabidopsis >gi|14423522|gb|AAK62443.1|AF386998_1 putative protein
  misc_feature (1)..(251): Homolog of NCBI NO: 11357624 NR Description: hypothetical protein F24M12.130 - Arabidopsis >gi|6562261|emb|CAB62631.1| putative protein [Arabidopsis
  misc_feature (55)..(251): Homolog of NCBI NO: 18398123 NR Description: expressed protein; protein id: At2g16460.1, by cDNA: 105900., supported by cDNA: gi_17529263 [Arabidopsis >gi|17529264|gb|AAL38859.1| unknown protein [Arabidopsis
  misc_feature (55)..(144): Homolog of NCBI NO: 25411710 NR Description: hypothetical protein At2g16460 [imported] -
  misc_feature (94)..(250): Homolog of NCBI NO: 14318473 NR Description: Hypothetical ORF; Yfl046wp [Saccharomyces
  misc_feature (71)..(251): Homolog of NCBI NO: 40743676 NR Description: hypothetical protein AN5773.2 [Aspergillus
  misc_feature (51)..(251): Homolog of NCBI NO: 19115424 NR Description: hypothetical conserved protein
  misc_feature (68)..(224): Homolog of NCBI NO: 8218057 NR Description: dJ500L14.1 (novel protein) [Homo sapiens]
  misc_feature (71)..(213): Homolog of NCBI NO: 10197624 NR Description: MDS025 [Homo sapiens] MDS011 [Homo sapiens] >gi|18088483|gb|AAH20783.1|AAH20783
  misc_feature (71)..(213): Homolog of NCBI NO: 20149663 NR Description: hypothetical protein MDS025 [Homo sapiens] CUA003 [Homo sapiens] >gi|12053095|emb|CAB66725.1| hypothetical [Homo sapiens] >gi|15778994|gb|AAH14573.1|AAH14573 hypothetical
MAAYANYLRLARLGGTSSGVNLSTLRSFGYSNPAFDKTQEFRSSSSSLVSYSSFRQFHARFISQLIKTNGKRLFLVDTLALVRSLEAQGLPSKQAEAITGAITEVLNDSLGVVSQLVVSKGEMQKAEMTQESNLSKFKSEINSSLDHHFSLLQHENEKLRNDIERIRSDIRHEIDKVTAGQRLDLNLEKGRIRDELQNQNGETSNLTNKLDREIHTLRAQLEAAKYEVIKYCIGTLVSISAVGLAVLRIVM

SEQ ID NO: 90764 - DNA, 1250 bp, Arabidopsis thaliana
  misc_feature (1)..(1250): Ceres Seq. ID no. 12725202
  misc_feature: MA Experiment ID: 20000180 Result: Up-regulated in Transcription
  misc_feature: MA Experiment 20000180 PARAMETER Experiment Name: At_Germinating_Seeds_P Parameter: Age (hr) Value: 24 vs. 0
  misc_feature: MA Experiment 20000180 PARAMETER Experiment Name: At_Germinating_Seeds_P Parameter: Tissue Value: Germinating Seeds
  misc_feature: MA Experiment ID: 20000182 Result: Up-regulated in Transcription
  misc_feature: MA Experiment 20000182 PARAMETER Experiment Name: At_2mM_SA_P Parameter: Age (day) Value: 14
  misc_feature: MA Experiment 20000182 PARAMETER Experiment Name: At_2mM_SA_P Parameter: Organism Value: A. thaliana
  misc_feature: MA Experiment 20000182 PARAMETER Experiment Name: At_2mM_SA_P Parameter: Plant Line Value: WS
  misc_feature: MA Experiment 20000182 PARAMETER Experiment Name: At_2mM_SA_P Parameter: Timepoint (hr) Value: 6
  misc_feature: MA Experiment 20000182 PARAMETER Experiment Name: At_2mM_SA_P Parameter: Tissue Value: Aerial
  misc_feature: MA Experiment 20000182 PARAMETER Experiment Name: At_2mM_SA_P Parameter: Treatment Value: 2mM SA vs. No Treatment
  misc_feature: MA Experiment ID: 20000211 Result: Up-regulated in Transcription
  misc_feature: MA Experiment 20000211 PARAMETER Experiment Name: At_0.001percent_MeJA__P Parameter: Age (day) Value: 14
  misc_feature: MA Experiment 20000211 PARAMETER Experiment Name: At_0.001percent_MeJA__P Parameter: Organism Value: A. thaliana
  misc_feature: MA Experiment 20000211 PARAMETER Experiment Name: At_0.001percent_MeJA__P Parameter: Plant Line Value: WS
  misc_feature: MA Experiment 20000211 PARAMETER Experiment Name: At_0.001percent_MeJA__P Parameter: Timepoint (hr) Value: 1
  misc_feature: MA Experiment 20000211 PARAMETER Experiment Name: At_0.001percent_MeJA__P Parameter: Tissue Value: Aerial
  misc_feature: MA Experiment 20000211 PARAMETER Experiment Name: At_0.001percent_MeJA__P Parameter: Treatment Value: 0.001percent MeJA vs. No Treatment
  misc_feature: MA Experiment ID: 20000234 Result: Down-regulated in Transcription
  misc_feature: MA Experiment 20000234 PARAMETER Experiment Name: At_Siliques_P Parameter: Age (day) Value: 21
  misc_feature: MA Experiment 20000234 PARAMETER Experiment Name: At_Siliques_P Parameter: Organism Value: A. thaliana
  misc_feature: MA Experiment 20000234 PARAMETER Experiment Name: At_Siliques_P Parameter: Plant Line Value: WS
  misc_feature: MA Experiment 20000234 PARAMETER Experiment Name: At_Siliques_P Parameter: Tissue Value: Less Than 5mm Siliques vs. Whole Plant
  misc_feature: MA Experiment ID: 20000235 Result: Down-regulated in Transcription
  misc_feature: MA Experiment 20000235 PARAMETER Experiment Name: At_Siliques_P Parameter: Age (day) Value: 21
  misc_feature: MA Experiment 20000235 PARAMETER Experiment Name: At_Siliques_P Parameter: Organism Value: A. thaliana
  misc_feature: MA Experiment 20000235 PARAMETER Experiment Name: At_Siliques_P Parameter: Plant Line Value: WS
  misc_feature: MA Experiment 20000235 PARAMETER Experiment Name: At_Siliques_P Parameter: Tissue Value: 5-10mm Siliques vs. Whole Plant
  misc_feature: MA Experiment ID: 20000264 Result: Down-regulated in Transcription
  misc_feature: MA Experiment 20000264 PARAMETER Experiment Name: At_Open_Flower_P Parameter: Age (day) Value: 21
  misc_feature: MA Experiment 20000264 PARAMETER Experiment Name: At_Open_Flower_P Parameter: Plant Line Value: WS
  misc_feature: MA Experiment 20000264 PARAMETER Experiment Name: At_Open_Flower_P Parameter: Tissue Value: Open Flower vs. Whole Plant
  misc_feature: MA Experiment ID: 20000794 Result: Down-regulated in Transcription
  misc_feature: MA Experiment 20000794 PARAMETER Experiment Name: At_Petals_P Parameter: Age (day) Value: 23-25 days
  misc_feature: MA Experiment 20000794 PARAMETER Experiment Name: At_Petals_P Parameter: Plant Line Value: WS
  misc_feature: MA Experiment 20000794 PARAMETER Experiment Name: At_Petals_P Parameter: Tissue Value: Petals vs. Whole plant
accatttttttccacagaaccaatccttctacaatgcctgtattcctctcttctcgttttctcttcttctgcatcatcgtccccttactcatctctatcactctctaccaactcgacacgtttgacccagctcatcatcccgctgactcactcatctcctctactgcttcaatcccgcctctaataaacgaaagatttctcaccggagctgagtttatcggagtcggtcttctcaatagccccgaagacatcgcctaccatgaagactctggtttcatctacactggttgcgttgatggatgggtcaaacgagtcaaggtcgccgagtcggttaatgactcactcgttgaagatttggtcaacaccggtggtagaccgctcggaatcgctttcggaatccacggcgaagtcatcgtcgctgacgcttacaagggactgttgaatataagcggtgacgggaagaagacggaattgttaacggaagaagcggacggcgttagatttaagctaccggatgcagttactgttgcagataacggcgttttgtatttcactgatggttcttataagtacaatctccatcagtttagttttgatatcttggaaggcaaaccacacggtcgtctcatgagctttgatcccaccacaaaagtgacacgtgtacttctcagagatctctactttgctaatggtgtctctctgtctcctgatcaaacccatctcgtcttctgcgaaacccccataagaagatgtagtaagtattacatcaatggagggcgcgtggagttatttattcaaggcttaccaggctatccagataacatccggtatgatggagatggacattactggattgcaatgccttcgggagtaacaacgttgtggaagctttcaatgaaatacccattcttgaggaaaatcacagctatggcggctaagtacggctatgaacctatgtttatggagaatgcaggagttttgcaggtggatttggatgggaaccccatcgcatactaccatgatcaggcgctctctcacataaccaccggtgtcaagattgggaactatctctattgtggaagtctctggcattcacacattctccgacttgatctcctaaaataccctgcacaaaacaagaagctttgaaacttcatgtttataaaaaaaaaagacttttacattttaggagtattcactgtcacaaaatgtaaactcattgtcctgagaatgaatcatgatgtttctct

SEQ ID NO: 90765 - protein, 382 aa, Arabidopsis thaliana
  peptide (1)..(382): Ceres Seq. ID no. 12725203
  misc_feature (19)..(367): Pfam Name: Strictosidine synthase Pfam Description: Strictosidine synthase
  misc_feature (12)..(382): Homolog of NCBI NO: 15230488 NR Description: strictosidine synthase-related; protein id: supported by cDNA: gi_13430723 [Arabidopsis thaliana]
  misc_feature (12)..(382): Homolog of NCBI NO: 18409339 NR Description: strictosidine synthase-related; protein id: supported by cDNA: 34197., supported by cDNA: gi_13122281,
  misc_feature (12)..(382): Homolog of NCBI NO: 11358518 NR Description: mucin-like protein - Arabidopsis thaliana
  misc_feature (12)..(382): Homolog of NCBI NO: 15230490 NR Description: strictosidine synthase-related; protein id: supported by cDNA: 38956., supported by cDNA: gi_18700142
  misc_feature (12)..(380): Homolog of NCBI NO: 15230477 NR Description: strictosidine synthase-related; protein id:
  misc_feature (29)..(378): Homolog of NCBI NO: 37536558 NR Description: mucin-like protein [Oryza sativa (japonica
  misc_feature (25)..(370): Homolog of NCBI NO: 15596490 NR Description: hypothetical protein [Pseudomonas aeruginosa PA01]
  misc_feature (62)..(376): Homolog of NCBI NO: 40063117 NR Description: strictosidine synthase family protein [uncultured
  misc_feature (21)..(374): Homolog of NCBI NO: 23237921 NR Description: contains ESTs
  misc_feature (19)..(372): Homolog of NCBI NO: 23059369 NR Description: hypothetical protein [Pseudomonas fluorescens
TIFFHRTNPSTMPVFLSSRFLFFCIIVPLLISITLYQLDTFDPAHHPADSLISSTASIPPLINERFLTGAEFIGVGLLNSPEDIAYHEDSGFIYTGCVDGWVKRVKVAESVNDSLVEDLVNTGGRPLGIAFGIHGEVIVADAYKGLLNISGDGKKTELLTEEADGVRFKLPDAVTVADNGVLYFTDGSYKYNLHQFSFDILEGKPHGRLMSFDPTTKVTRVLLRDLYFANGVSLSPDQTHLVFCETPIRRCSKYYINGGRVELFIQGLPGYPDNIRYDGDGHYWIAMPSGVTTLWKLSMKYPFLRKITAMAAKYGYEPMFMENAGVLQVDLDGNPIAYYHDQALSHITTGVKIGNYLYCGSLWHSHILRLDLLKYPAQNKKL

SEQ ID NO: 90766 - protein, 371 aa, Arabidopsis thaliana
  peptide (1)..(371): Ceres Seq. ID no. 12725204
  misc_feature (8)..(356): Pfam Name: Strictosidine synthase Pfam Description: Strictosidine synthase
  misc_feature (1)..(371): Homolog of NCBI NO: 15230488 NR Description: strictosidine synthase-related; protein id: supported by cDNA: gi_13430723 [Arabidopsis thaliana]
  misc_feature (1)..(371): Homolog of NCBI NO: 18409339 NR Description: strictosidine synthase-related; protein id: supported by cDNA: 34197., supported by cDNA: gi_13122281,
  misc_feature (1)..(371): Homolog of NCBI NO: 11358518 NR Description: mucin-like protein - Arabidopsis thaliana
  misc_feature (1)..(371): Homolog of NCBI NO: 15230490 NR Description: strictosidine synthase-related; protein id: supported by cDNA: 38956., supported by cDNA: gi_18700142
  misc_feature (1)..(369): Homolog of NCBI NO: 15230477 NR Description: strictosidine synthase-related; protein id:
  misc_feature (18)..(367): Homolog of NCBI NO: 37536558 NR Description: mucin-like protein [Oryza sativa (japonica
  misc_feature (14)..(359): Homolog of NCBI NO: 15596490 NR Description: hypothetical protein [Pseudomonas aeruginosa PA01]
  misc_feature (51)..(365): Homolog of NCBI NO: 40063117 NR Description: strictosidine synthase family protein [uncultured
  misc_feature (10)..(363): Homolog of NCBI NO: 23237921 NR Description: contains ESTs
  misc_feature (8)..(361): Homolog of NCBI NO: 23059369 NR Description: hypothetical protein [Pseudomonas fluorescens
MPVFLSSRFLFFCIIVPLLISITLYQLDTFDPAHHPADSLISSTASIPPLINERFLTGAEFIGVGLLNSPEDIAYHEDSGFIYTGCVDGWVKRVKVAESVNDSLVEDLVNTGGRPLGIAFGIHGEVIVADAYKGLLNISGDGKKTELLTEEADGVRFKLPDAVTVADNGVLYFTDGSYKYNLHQFSFDILEGKPHGRLMSFDPTTKVTRVLLRDLYFANGVSLSPDQTHLVFCETPIRRCSKYYINGGRVELFIQGLPGYPDNIRYDGDGHYWIAMPSGVTTLWKLSMKYPFLRKITAMAAKYGYEPMFMENAGVLQVDLDGNPIAYYHDQALSHITTGVKIGNYLYCGSLWHSHILRLDLLKYPAQNKKL

SEQ ID NO: 90767 - DNA, 1086 bp, Arabidopsis thaliana
  misc_feature (1)..(1086): Ceres Seq. ID no. 12725205
  misc_feature: MA Experiment ID: 20000180 Result: Up-regulated in Transcription
  misc_feature: MA Experiment 20000180 PARAMETER Experiment Name: At_Germinating_Seeds_P Parameter: Age (hr) Value: 24 vs. 0
  misc_feature: MA Experiment 20000180 PARAMETER Experiment Name: At_Germinating_Seeds_P Parameter: Tissue Value: Germinating Seeds
  misc_feature: MA Experiment ID: 20000227 Result: Up-regulated in Transcription
  misc_feature: MA Experiment 20000227 PARAMETER Experiment Name: At_Root-Tips-vs-Tops_P Parameter: Tissue Value: Root Tips vs. Root Tops
  misc_feature: MA Experiment ID: 20000265 Result: Up-regulated in Transcription
  misc_feature: MA Experiment 20000265 PARAMETER Experiment Name: At_Open_Flower_P Parameter: Age (day) Value: 21
  misc_feature: MA Experiment 20000265 PARAMETER Experiment Name: At_Open_Flower_P Parameter: Plant Line Value: WS
  misc_feature: MA Experiment 20000265 PARAMETER Experiment Name: At_Open_Flower_P Parameter: Tissue Value: Closed Flower vs. Whole Plant
  misc_feature: MA Experiment ID: 20000437 Result: Down-regulated in Transcription
  misc_feature: MA Experiment 20000437 PARAMETER Experiment Name: At_Drought_P Parameter: Age (day) Value: 8
  misc_feature: MA Experiment 20000437 PARAMETER Experiment Name: At_Drought_P Parameter: Organism Value: A. thaliana
  misc_feature: MA Experiment 20000437 PARAMETER Experiment Name: At_Drought_P Parameter: Plant Line Value: WS
  misc_feature: MA Experiment 20000437 PARAMETER Experiment Name: At_Drought_P Parameter: Timepoint (hr) Value: 24
  misc_feature: MA Experiment 20000437 PARAMETER Experiment Name: At_Drought_P Parameter: Tissue Value: Whole Plant
  misc_feature: MA Experiment 20000437 PARAMETER Experiment Name: At_Drought_P Parameter: Treatment Value: Drought vs. No Drought
  misc_feature: MA Experiment ID: 20001554 Result: Down-regulated in Transcription
  misc_feature: MA Experiment 20001554 PARAMETER Experiment Name: At_Drought_Soil_Dry_P Parameter: Age (day) Value: 21
  misc_feature: MA Experiment 20001554 PARAMETER Experiment Name: At_Drought_Soil_Dry_P Parameter: Organism Value: A. thaliana
  misc_feature: MA Experiment 20001554 PARAMETER Experiment Name: At_Drought_Soil_Dry_P Parameter: Plant Line Value: WS
  misc_feature: MA Experiment 20001554 PARAMETER Experiment Name: At_Drought_Soil_Dry_P Parameter: Post Timepoint (hr) Value: None
  misc_feature: MA Experiment 20001554 PARAMETER Experiment Name: At_Drought_Soil_Dry_P Parameter: Post-Treatment Value: None
  misc_feature: MA Experiment 20001554 PARAMETER Experiment Name: At_Drought_Soil_Dry_P Parameter: Timepoint (day) Value: 7
  misc_feature: MA Experiment 20001554 PARAMETER Experiment Name: At_Drought_Soil_Dry_P Parameter: Treatment Value: Drought vs. No Drought
  misc_feature: MA Experiment ID: 20001560 Result: Up-regulated in Transcription
  misc_feature: MA Experiment 20001560 PARAMETER Experiment Name: At_Drought_Soil_Dry_P Parameter: Age (day) Value: 28
  misc_feature: MA Experiment 20001560 PARAMETER Experiment Name: At_Drought_Soil_Dry_P Parameter: Organism Value: A. thaliana
  misc_feature: MA Experiment 20001560 PARAMETER Experiment Name: At_Drought_Soil_Dry_P Parameter: Plant Line Value: WS
  misc_feature: MA Experiment 20001560 PARAMETER Experiment Name: At_Drought_Soil_Dry_P Parameter: Post Timepoint (hr) Value: None
  misc_feature: MA Experiment 20001560 PARAMETER Experiment Name: At_Drought_Soil_Dry_P Parameter: Post-Treatment Value: None
  misc_feature: MA Experiment 20001560 PARAMETER Experiment Name: At_Drought_Soil_Dry_P Parameter: Timepoint (day) Value: 14
  misc_feature: MA Experiment 20001560 PARAMETER Experiment Name: At_Drought_Soil_Dry_P Parameter: Treatment Value: Drought vs. No Drought
  misc_feature: MA Experiment ID: 20001911 Result: Down-regulated in Transcription
  misc_feature: MA Experiment 20001911 PARAMETER Experiment Name: At_Drought_Reproduction_P Parameter: Age (day) Value: 40
  misc_feature: MA Experiment 20001911 PARAMETER Experiment Name: At_Drought_Reproduction_P Parameter: Organism Value: A. thaliana
  misc_feature: MA Experiment 20001911 PARAMETER Experiment Name: At_Drought_Reproduction_P Parameter: Plant Line Value: WS
  misc_feature: MA Experiment 20001911 PARAMETER Experiment Name: At_Drought_Reproduction_P Parameter: Timepoint (day) Value: 10
  misc_feature: MA Experiment 20001911 PARAMETER Experiment Name: At_Drought_Reproduction_P Parameter: Tissue Value: Flowers
  misc_feature: MA Experiment 20001911 PARAMETER Experiment Name: At_Drought_Reproduction_P Parameter: Treatment Value: Drought vs. No Drought
atggcaccggtgactgaagtttctccgatgatcaacacattggaagtcgcagatgacaaaatgacgaatctcagttcctctgggaaacctccaagaaacatctctgcaatgcgccattgcaacagcactgcctggttgaccgattacgaaggagatgagagatttggtgcaaaatctccggaaggagtaaattcaacattccagcctgtgtttagatctggaagttggtctgataaaggaccaaaacaatcaatggaagatgaattcatttgtgttgatgatctcactgagtatattggatcatccactggagctttctatggggtgtttgatggacacggaggtgttgatgctgcatcattcacaaaaaagaacattatgaagcttgtaatggaagacaaacatttcccaaccagcacaaagaaggcaacaaggagtgcttttgtgaagactgatcatgctttggctgatgcttcttctcttgatagatcctctggcactactgcactcactgctctcattttggacaagactatgttgattgcaaacgctggtgactccagagcggtgcttgggaaacgaggcagagccattgagttatcaaaggaccacaaacctaactgtacttccgagcggctacgtattgagaagcttggaggtgtgatctacgatggttaccttaacgggcagctatctgtggctcgagccttaggagattggcacattaagggaactaaaggttcactctgcccgctcagctgcgagcctgagctggaagagattgtgctgacggaagaggatgagtatcttataatgggctgtgatggactctgggatgtgatgagtagccagtgtgcagtgacgatggtgaggagggagctgatgcagcataatgatcctgagagatgctctcaagctttggttaaggaggctcttcaacgaaacagctgtgacaatcttactgtagtggttgtctgtttctcgcccgaagcgcctcctcggattgagattcccaagtcgcataagaggaggagcatctctgcagagggattggatctcctcaaaggtgttttgaacgagttgtga

SEQ ID NO: 90768 - protein, 361 aa, Arabidopsis thaliana
  peptide (1)..(361): Ceres Seq. ID no. 12725206
  misc_feature (71)..(320): Pfam Name: Protein phosphatase 2C Pfam Description: Protein phosphatase 2C
  misc_feature (1)..(361): Homolog of NCBI NO: 15230495 NR Description: protein phosphatase 2C (PP2C); protein id:
  misc_feature (28)..(359): Homolog of NCBI NO: 37536524 NR Description: putative protein phosphatase-2C [Oryza sativa
  misc_feature (5)..(359): Homolog of NCBI NO: 15226152 NR Description: protein phosphatase 2C (PP2C); protein id: supported by cDNA: gi_17979441, supported by cDNA: gi_20259092
  misc_feature (59)..(359): Homolog of NCBI NO: 10140768 NR Description: putative protein phosphatase-2C [Oryza sativa]
  misc_feature (65)..(361): Homolog of NCBI NO: 20146108 NR Description: protein phosphatase 2C [Mesembryanthemum
  misc_feature (30)..(361): Homolog of NCBI NO: 15224766 NR Description: protein phosphatase 2C (PP2C); protein id: supported by cDNA: gi_12642917, supported by cDNA: gi_14517519, by cDNA: gi_16323271 [Arabidopsis thaliana]
  misc_feature (11)..(359): Homolog of NCBI NO: 21693562 NR Description: DNA-binding protein phosphatase 2C [Nicotiana
  misc_feature (67)..(358): Homolog of NCBI NO: 25352221 NR Description: phosphoprotein phosphatase (EC 3.1.3.16) 2C
  misc_feature (64)..(358): Homolog of NCBI NO: 24413992 NR Description: putative DNA-binding protein phosphatase 2C
  misc_feature (67)..(355): Homolog of NCBI NO: 34894410 NR Description: putative protein phosphatase [Oryza sativa
MAPVTEVSPMINTLEVADDKMTNLSSSGKPPRNISAMRHCNSTAWLTDYEGDERFGAKSPEGVNSTFQPVFRSGSWSDKGPKQSMEDEFICVDDLTEYIGSSTGAFYGVFDGHGGVDAASFTKKNIMKLVMEDKHFPTSTKKATRSAFVKTDHALADASSLDRSSGTTALTALILDKTMLIANAGDSRAVLGKRGRAIELSKDHKPNCTSERLRIEKLGGVIYDGYLNGQLSVARALGDWHIKGTKGSLCPLSCEPELEEIVLTEEDEYLIMGCDGLWDVMSSQCAVTMVRRELMQHNDPERCSQALVKEALQRNSCDNLTVVVVCFSPEAPPRIEIPKSHKRRSISAEGLDLLKGVLNEL

SEQ ID NO: 90769 - protein, 352 aa, Arabidopsis thaliana
  peptide (1)..(352): Ceres Seq. ID no. 12725207
  misc_feature (62)..(311): Pfam Name: Protein phosphatase 2C Pfam Description: Protein phosphatase 2C
  misc_feature (1)..(352): Homolog of NCBI NO: 15230495 NR Description: protein phosphatase 2C (PP2C); protein id:
  misc_feature (19)..(350): Homolog of NCBI NO: 37536524 NR Description: putative protein phosphatase-2C [Oryza sativa
  misc_feature (1)..(350): Homolog of NCBI NO: 15226152 NR Description: protein phosphatase 2C (PP2C); protein id: supported by cDNA: gi_17979441, supported by cDNA: gi_20259092
  misc_feature (50)..(350): Homolog of NCBI NO: 10140768 NR Description: putative protein phosphatase-2C [Oryza sativa]
  misc_feature (56)..(352): Homolog of NCBI NO: 20146108 NR Description: protein phosphatase 2C [Mesembryanthemum
  misc_feature (21)..(352): Homolog of NCBI NO: 15224766 NR Description: protein phosphatase 2C (PP2C); protein id: supported by cDNA: gi_12642917, supported by cDNA: gi_14517519, by cDNA: gi_16323271 [Arabidopsis thaliana]
  misc_feature (2)..(350): Homolog of NCBI NO: 21693562 NR Description: DNA-binding protein phosphatase 2C [Nicotiana
  misc_feature (58)..(349): Homolog of NCBI NO: 25352221 NR Description: phosphoprotein phosphatase (EC 3.1.3.16) 2C
  misc_feature (55)..(349): Homolog of NCBI NO: 24413992 NR Description: putative DNA-binding protein phosphatase 2C
  misc_feature (58)..(346): Homolog of NCBI NO: 34894410 NR Description: putative protein phosphatase [Oryza sativa
MINTLEVADDKMTNLSSSGKPPRNISAMRHCNSTAWLTDYEGDERFGAKSPEGVNSTFQPVFRSGSWSDKGPKQSMEDEFICVDDLTEYIGSSTGAFYGVFDGHGGVDAASFTKKNIMKLVMEDKHFPTSTKKATRSAFVKTDHALADASSLDRSSGTTALTALILDKTMLIANAGDSRAVLGKRGRAIELSKDHKPNCTSERLRIEKLGGVIYDGYLNGQLSVARALGDWHIKGTKGSLCPLSCEPELEEIVLTEEDEYLIMGCDGLWDVMSSQCAVTMVRRELMQHNDPERCSQALVKEALQRNSCDNLTVVVVCFSPEAPPRIEIPKSHKRRSISAEGLDLLKGVLNEL

SEQ ID NO: 90770 - protein, 341 aa, Arabidopsis thaliana
  peptide (1)..(341): Ceres Seq. ID no. 12725208
  misc_feature (51)..(300): Pfam Name: Protein phosphatase 2C Pfam Description: Protein phosphatase 2C
  misc_feature (1)..(341): Homolog of NCBI NO: 15230495 NR Description: protein phosphatase 2C (PP2C); protein id:
  misc_feature (8)..(339): Homolog of NCBI NO: 37536524 NR Description: putative protein phosphatase-2C [Oryza sativa
  misc_feature (1)..(339): Homolog of NCBI NO: 15226152 NR Description: protein phosphatase 2C (PP2C); protein id: supported by cDNA: gi_17979441, supported by cDNA: gi_20259092
  misc_feature (39)..(339): Homolog of NCBI NO: 10140768 NR Description: putative protein phosphatase-2C [Oryza sativa]
  misc_feature (45)..(341): Homolog of NCBI NO: 20146108 NR Description: protein phosphatase 2C [Mesembryanthemum
  misc_feature (10)..(341): Homolog of NCBI NO: 15224766 NR Description: protein phosphatase 2C (PP2C); protein id: supported by cDNA: gi_12642917, supported by cDNA: gi_14517519, by cDNA: gi_16323271 [Arabidopsis thaliana]
  misc_feature (1)..(339): Homolog of NCBI NO: 21693562 NR Description: DNA-binding protein phosphatase 2C [Nicotiana
  misc_feature (47)..(338): Homolog of NCBI NO: 25352221 NR Description: phosphoprotein phosphatase (EC 3.1.3.16) 2C
  misc_feature (44)..(338): Homolog of NCBI NO: 24413992 NR Description: putative DNA-binding protein phosphatase 2C
  misc_feature (47)..(335): Homolog of NCBI NO: 34894410 NR Description: putative protein phosphatase [Oryza sativa
MTNLSSSGKPPRNISAMRHCNSTAWLTDYEGDERFGAKSPEGVNSTFQPVFRSGSWSDKGPKQSMEDEFICVDDLTEYIGSSTGAFYGVFDGHGGVDAASFTKKNIMKLVMEDKHFPTSTKKATRSAFVKTDHALADASSLDRSSGTTALTALILDKTMLIANAGDSRAVLGKRGRAIELSKDHKPNCTSERLRIEKLGGVIYDGYLNGQLSVARALGDWHIKGTKGSLCPLSCEPELEEIVLTEEDEYLIMGCDGLWDVMSSQCAVTMVRRELMQHNDPERCSQALVKEALQRNSCDNLTVVVVCFSPEAPPRIEIPKSHKRRSISAEGLDLLKGVLNEL

SEQ ID NO: 90771 - DNA, 3066 bp, Arabidopsis thaliana
  misc_feature (1)..(3066): Ceres Seq. ID no. 12725211
  misc_feature: MA Experiment ID: 20001247 Result: Up-regulated in Transcription
  misc_feature: MA Experiment 20001247 PARAMETER Experiment Name: At_Far-red-induction_P Parameter: Age (day) Value: 7
  misc_feature: MA Experiment 20001247 PARAMETER Experiment Name: At_Far-red-induction_P Parameter: Light Value: Far-red vs. White
  misc_feature: MA Experiment 20001247 PARAMETER Experiment Name: At_Far-red-induction_P Parameter: Organism Value: A. thaliana
  misc_feature: MA Experiment 20001247 PARAMETER Experiment Name: At_Far-red-induction_P Parameter: Plant Line Value: Columbia
  misc_feature: MA Experiment 20001247 PARAMETER Experiment Name: At_Far-red-induction_P Parameter: Timepoint (hr) Value: 1
  misc_feature: MA Experiment 20001247 PARAMETER Experiment Name: At_Far-red-induction_P Parameter: Tissue Value: Whole Plant
atctctgtcttctccaaaaactctctccgatttcatcgcttagggtttcttccccgattcttcagatctgagaagaagatcttcccggagaagtgctcttgatcgatgaagatcacagagggacgattccgtctctctcttcttcttcttcttcttctcatatctgcagcaactttaatctcagctgctgattactctccaacagagaaaatcctattgaattgcggtggtggtgcttctaatctaaccgacacagataaccgtatatggatctccgatgtcaaatcaaaattcttatcatcttcctctgaagactctaaaacatcaccagcgttaacacaagatccttccgttcccgaagttccttacatgacggcgagagttttccgatctcctttcacttacactttccctgtagcatcaggtcgtaaattcgtgcgtctctacttctacccaaactcgtacgacggtctcaacgctaccaactcgttattctccgtctcctttggtccttacactcttctcaagaatttcagtgcttctcagacggcggaggcgttgacttacgctttcatcatcaaagagtttgttgtcaacgttgaaggtggaacgttgaacatgacgtttacaccggaatcagctccgtctaatgcgtatgcgtttgttaatgggattgaggttacttcaatgcctgatatgtatagtagtactgatgggactttgactatggttggatcatctggctctgttactattgataacagtactgctcttgagaatgtgtataggctcaatgttggagggaatgatatctcgccttccgcggatacgggtttgtataggtcgtggtatgatgatcagccttatatatttggtgcaggacttggtattccagagactgctgatcccaacatgacgattaagtatcctacggggactcctacttatgttgctcctgtggatgtttattcaaccgcgaggtctatgggtccaacagctcagatcaatctcaactacaatcttacttggattttcagcattgactctggtttcacttaccttgttagacttcatttctgtgaggtttcttcgaatatcactaagatcaaccaacgggtgtttacaatctacctcaacaatcaaactgctgagcctgaagctgatgtgattgcttggactagttcaaacggggttccgtttcacaaggattacgtggtgaatcctccagagggaaatggacagcaagatttgtggcttgctcttcatcctaacccagttaacaagccggagtattatgattctcttcttaatggagtggagatattcaagatgaatacttctgatggtaatctggctggtaccaatcctatacctggtccacaggtgactgctgatccatctaaagtcctacgcccgactactaggaaatcgaaaagcaatacggctattattgcaggcgcagccagtggtgcagttgttctggcccttatcattgggttttgtgtgtttggtgcttaccgcagacgtaagcgtggtgattaccagcctgctagtgatgcaacatcagggtggcttccactatctctgtatggaaactcacattctgctggctcggcgaagacaaacacaacaggaagttatgcctcgtcccttccgtcaaatctttgccgtcacttctcgtttgctgagatcaaagctgccactaaaaactttgatgagtcccgggtgcttggtgttggtggtttcggcaaggtttacagaggagagattgatggcggaactacaaaggtagccatcaagagaggcaacccaatgtccgagcaaggtgtacatgagttccagactgagattgaaatgctttcaaagcttagacatcgtcatcttgtgtccttgattggatactgtgaagagaactgcgaaatgatcttagtctatgattacatggctcatggtacaatgagggagcatctctacaaaacccagaatccttctcttccatggaagcaacgtcttgagatatgcattggagcagcccgaggtttacactatctacacactggtgcaaaacacacaatcatccatagagatgtgaagacaacaaacattctattggatgagaaatgggtggccaaggtctctgattttggtctatcgaagactggtcctacactagaccacacacacgtaagcacagttgtgaaaggaagtttcggttatcttgacccagagtatttcagacggcagcaactgactgagaaatccgatgtctactcctttggcgttgttctattcgaagctctatgcgctcgtccagccttgaacccaacacttgcaaaggaacaagtgagcttagctgagtgggcaccatactgctacaagaaaggcatgctagatcaaatcgttgatccctacctcaagggcaagatcacaccagaatgcttcaaaaagtttgctgaaaccgcgatgaagtgtgttctagaccagggcattgagagaccatcaatgggagatgttctgtggaacttagaatttgcgttgcagctccaggaaagcgcagaagagaacggaaaaggagtatgcggtgacatggacatggatgagattaagtacgatgatggaaactgtaaaggaaagaacgacaagagttctgatgtgtatgaagggaatgtgacggactcgaggagcagtggaatagatatgagcatcggtggtaggagtttggccagcgaagattcagatggactcactccaagtgctgtgttttctcagatcatgaatccaaagggacgttagagaagtcttataacacggtacaacactactacctttctaaaccggctccatccaaaggagaccggttcgtttctcttttttatattttttttcctcttaactatttattattattctctttgctgttatttatttagaattttggatttgtgtatttgatgccacgatggagagtgtaaaaaataatgtatttttttttcttctttctacaaaaacattaaacatgaatcgcgtcaatgtactatttggtttgttatctataacgtttttggt

SEQ ID NO: 90772 - protein, 895 aa, Arabidopsis thaliana
  peptide (1)..(895): Ceres Seq. ID no. 12725212
  misc_feature (22)..(895): Homolog of NCBI NO: 34909896 NR Description: putative receptor-protein kinase [Oryza sativa
  misc_feature (244)..(895): Homolog of NCBI NO: 17887381 NR Description: receptor protein kinase-like protein [Capsicum
  misc_feature (14)..(818): Homolog of NCBI NO: 15229329 NR Description: putative protein kinase; protein id: At3g04690.1 thaliana] >gi|6175184|gb|AAF04910.1|AC011437_25 putative protein
  misc_feature (9)..(818): Homolog of NCBI NO: 15241880 NR Description: receptor-like protein kinase precursor - like;
  misc_feature (13)..(895): Homolog of NCBI NO: 34902826 NR Description: unnamed protein product [Oryza sativa (japonica group)] >gi|6498463|dbj|BAA87852.1| unnamed protein product
  misc_feature (9)..(895): Homolog of NCBI NO: 15241606 NR Description: protein kinase - like protein; protein id:
  misc_feature (12)..(895): Homolog of NCBI NO: 15241605 NR Description: protein kinase - like protein; protein id:
  misc_feature (12)..(895): Homolog of NCBI NO: 20147233 NR Description: AT5g38990/K15E6_170 [Arabidopsis thaliana]
  misc_feature (398)..(829): Homolog of NCBI NO: 34898020 NR Description: Similar to putative receptor-like protein kinase
  misc_feature (43)..(461): Homolog of NCBI NO: 34898020 NR Description: Similar to putative receptor-like protein kinase
MKITEGRFRLSLLLLLLLISAATLISAADYSPTEKILLNCGGGASNLTDTDNRIWISDVKSKFLSSSSEDSKTSPALTQDPSVPEVPYMTARVFRSPFTYTFPVASGRKFVRLYFYPNSYDGLNATNSLFSVSFGPYTLLKNFSASQTAEALTYAFIIKEFVVNVEGGTLNMTFTPESAPSNAYAFVNGIEVTSMPDMYSSTDGTLTMVGSSGSVTIDNSTALENVYRLNVGGNDISPSADTGLYRSWYDDQPYIFGAGLGIPETADPNMTIKYPTGTPTYVAPVDVYSTARSMGPTAQINLNYNLTWIFSIDSGFTYLVRLHFCEVSSNITKINQRVFTIYLNNQTAEPEADVIAWTSSNGVPFHKDYVVNPPEGNGQQDLWLALHPNPVNKPEYYDSLLNGVEIFKMNTSDGNLAGTNPIPGPQVTADPSKVLRPTTRKSKSNTAIIAGAASGAVVLALIIGFCVFGAYRRRKRGDYQPASDATSGWLPLSLYGNSHSAGSAKTNTTGSYASSLPSNLCRHFSFAEIKAATKNFDESRVLGVGGFGKVYRGEIDGGTTKVAIKRGNPMSEQGVHEFQTEIEMLSKLRHRHLVSLIGYCEENCEMILVYDYMAHGTMREHLYKTQNPSLPWKQRLEICIGAARGLHYLHTGAKHTIIHRDVKTTNILLDEKWVAKVSDFGLSKTGPTLDHTHVSTVVKGSFGYLDPEYFRRQQLTEKSDVYSFGVVLFEALCARPALNPTLAKEQVSLAEWAPYCYKKGMLDQIVDPYLKGKITPECFKKFAETAMKCVLDQGIERPSMGDVLWNLEFALQLQESAEENGKGVCGDMDMDEIKYDDGNCKGKNDKSSDVYEGNVTDSRSSGIDMSIGGRSLASEDSDGLTPSAVFSQIMNPKGR

SEQ ID NO: 90773 - protein, 807 aa, Arabidopsis thaliana
  peptide (1)..(807): Ceres Seq. ID no. 12725213
  misc_feature (1)..(807): Homolog of NCBI NO: 34909896 NR Description: putative receptor-protein kinase [Oryza sativa
  misc_feature (156)..(807): Homolog of NCBI NO: 17887381 NR Description: receptor protein kinase-like protein [Capsicum
  misc_feature (1)..(730): Homolog of NCBI NO: 15229329 NR Description: putative protein kinase; protein id: At3g04690.1 thaliana] >gi|6175184|gb|AAF04910.1|AC011437_25 putative protein
  misc_feature (1)..(730): Homolog of NCBI NO: 15241880 NR Description: receptor-like protein kinase precursor - like;
  misc_feature (1)..(807): Homolog of NCBI NO: 34902826 NR Description: unnamed protein product [Oryza sativa (japonica group)] >gi|6498463|dbj|BAA87852.1| unnamed protein product
  misc_feature (1)..(807): Homolog of NCBI NO: 15241606 NR Description: protein kinase - like protein; protein id:
  misc_feature (1)..(807): Homolog of NCBI NO: 15241605 NR Description: protein kinase - like protein; protein id:
  misc_feature (1)..(807): Homolog of NCBI NO: 20147233 NR Description: AT5g38990/K15E6_170 [Arabidopsis thaliana]
  misc_feature (310)..(741): Homolog of NCBI NO: 34898020 NR Description: Similar to putative receptor-like protein kinase
  misc_feature (1)..(373): Homolog of NCBI NO: 34898020 NR Description: Similar to putative receptor-like protein kinase
MTARVFRSPFTYTFPVASGRKFVRLYFYPNSYDGLNATNSLFSVSFGPYTLLKNFSASQTAEALTYAFIIKEFVVNVEGGTLNMTFTPESAPSNAYAFVNGIEVTSMPDMYSSTDGTLTMVGSSGSVTIDNSTALENVYRLNVGGNDISPSADTGLYRSWYDDQPYIFGAGLGIPETADPNMTIKYPTGTPTYVAPVDVYSTARSMGPTAQINLNYNLTWIFSIDSGFTYLVRLHFCEVSSNITKINQRVFTIYLNNQTAEPEADVIAWTSSNGVPFHKDYVVNPPEGNGQQDLWLALHPNPVNKPEYYDSLLNGVEIFKMNTSDGNLAGTNPIPGPQVTADPSKVLRPTTRKSKSNTAIIAGAASGAVVLALIIGFCVFGAYRRRKRGDYQPASDATSGWLPLSLYGNSHSAGSAKTNTTGSYASSLPSNLCRHFSFAEIKAATKNFDESRVLGVGGFGKVYRGEIDGGTTKVAIKRGNPMSEQGVHEFQTEIEMLSKLRHRHLVSLIGYCEENCEMILVYDYMAHGTMREHLYKTQNPSLPWKQRLEICIGAARGLHYLHTGAKHTIIHRDVKTTNILLDEKWVAKVSDFGLSKTGPTLDHTHVSTVVKGSFGYLDPEYFRRQQLTEKSDVYSFGVVLFEALCARPALNPTLAKEQVSLAEWAPYCYKKGMLDQIVDPYLKGKITPECFKKFAETAMKCVLDQGIERPSMGDVLWNLEFALQLQESAEENGKGVCGDMDMDEIKYDDGNCKGKNDKSSDVYEGNVTDSRSSGIDMSIGGRSLASEDSDGLTPSAVFSQIMNPKGR

SEQ ID NO: 90774 - protein, 724 aa, Arabidopsis thaliana
  peptide (1)..(724): Ceres Seq. ID no. 12725214
  misc_feature (1)..(724): Homolog of NCBI NO: 34909896 NR Description: putative receptor-protein kinase [Oryza sativa
  misc_feature (73)..(724): Homolog of NCBI NO: 17887381 NR Description: receptor protein kinase-like protein [Capsicum
  misc_feature (1)..(647): Homolog of NCBI NO: 15229329 NR Description: putative protein kinase; protein id: At3g04690.1 thaliana] >gi|6175184|gb|AAF04910.1|AC011437_25 putative protein
  misc_feature (1)..(647): Homolog of NCBI NO: 15241880 NR Description: receptor-like protein kinase precursor - like;
  misc_feature (1)..(724): Homolog of NCBI NO: 34902826 NR Description: unnamed protein product [Oryza sativa (japonica group)] >gi|6498463|dbj|BAA87852.1| unnamed protein product
  misc_feature (1)..(724): Homolog of NCBI NO: 15241606 NR Description: protein kinase - like protein; protein id:
  misc_feature (1)..(724): Homolog of NCBI NO: 15241605 NR Description: protein kinase - like protein; protein id:
  misc_feature (1)..(724): Homolog of NCBI NO: 20147233 NR Description: AT5g38990/K15E6_170 [Arabidopsis thaliana]
  misc_feature (227)..(658): Homolog of NCBI NO: 34898020 NR Description: Similar to putative receptor-like protein kinase
  misc_feature (1)..(290): Homolog of NCBI NO: 34898020 NR Description: Similar to putative receptor-like protein kinase
MTFTPESAPSNAYAFVNGIEVTSMPDMYSSTDGTLTMVGSSGSVTIDNSTALENVYRLNVGGNDISPSADTGLYRSWYDDQPYIFGAGLGIPETADPNMTIKYPTGTPTYVAPVDVYSTARSMGPTAQINLNYNLTWIFSIDSGFTYLVRLHFCEVSSNITKINQRVFTIYLNNQTAEPEADVIAWTSSNGVPFHKDYVVNPPEGNGQQDLWLALHPNPVNKPEYYDSLLNGVEIFKMNTSDGNLAGTNPIPGPQVTADPSKVLRPTTRKSKSNTAIIAGAASGAVVLALIIGFCVFGAYRRRKRGDYQPASDATSGWLPLSLYGNSHSAGSAKTNTTGSYASSLPSNLCRHFSFAEIKAATKNFDESRVLGVGGFGKVYRGEIDGGTTKVAIKRGNPMSEQGVHEFQTEIEMLSKLRHRHLVSLIGYCEENCEMILVYDYMAHGTMREHLYKTQNPSLPWKQRLEICIGAARGLHYLHTGAKHTIIHRDVKTTNILLDEKWVAKVSDFGLSKTGPTLDHTHVSTVVKGSFGYLDPEYFRRQQLTEKSDVYSFGVVLFEALCARPALNPTLAKEQVSLAEWAPYCYKKGMLDQIVDPYLKGKITPECFKKFAETAMKCVLDQGIERPSMGDVLWNLEFALQLQESAEENGKGVCGDMDMDEIKYDDGNCKGKNDKSSDVYEGNVTDSRSSGIDMSIGGRSLASEDSDGLTPSAVFSQIMNPKGR

SEQ ID NO: 90775 - DNA, 990 bp, Arabidopsis thaliana
  misc_feature (1)..(990): Ceres Seq. ID no. 12725215
  misc_feature: MA Experiment ID: 20000173 Result: Down-regulated in Transcription
  misc_feature: MA Experiment 20000173 PARAMETER Experiment Name: At_42deg_Heat_P Parameter: Age (day) Value: 14
  misc_feature: MA Experiment 20000173 PARAMETER Experiment Name: At_42deg_Heat_P Parameter: Organism Value: A. thaliana
  misc_feature: MA Experiment 20000173 PARAMETER Experiment Name: At_42deg_Heat_P Parameter: Plant Line Value: WS
  misc_feature: MA Experiment 20000173 PARAMETER Experiment Name: At_42deg_Heat_P Parameter: Temperature (deg C) Value: 42 vs. 22
  misc_feature: MA Experiment 20000173 PARAMETER Experiment Name: At_42deg_Heat_P Parameter: Timepoint (hr) Value: 6
  misc_feature: MA Experiment 20000173 PARAMETER Experiment Name: At_42deg_Heat_P Parameter: Tissue Value: Aerial
  misc_feature: MA Experiment ID: 20000180 Result: Down-regulated in Transcription
  misc_feature: MA Experiment 20000180 PARAMETER Experiment Name: At_Germinating_Seeds_P Parameter: Age (hr) Value: 24 vs. 0
  misc_feature: MA Experiment 20000180 PARAMETER Experiment Name: At_Germinating_Seeds_P Parameter: Tissue Value: Germinating Seeds
  misc_feature: MA Experiment ID: 20000437 Result: Up-regulated in Transcription
  misc_feature: MA Experiment 20000437 PARAMETER Experiment Name: At_Drought_P Parameter: Age (day) Value: 8
  misc_feature: MA Experiment 20000437 PARAMETER Experiment Name: At_Drought_P Parameter: Organism Value: A. thaliana
  misc_feature: MA Experiment 20000437 PARAMETER Experiment Name: At_Drought_P Parameter: Plant Line Value: WS
  misc_feature: MA Experiment 20000437 PARAMETER Experiment Name: At_Drought_P Parameter: Timepoint (hr) Value: 24
  misc_feature: MA Experiment 20000437 PARAMETER Experiment Name: At_Drought_P Parameter: Tissue Value: Whole Plant
  misc_feature: MA Experiment 20000437 PARAMETER Experiment Name: At_Drought_P Parameter: Treatment Value: Drought vs. No Drought
ctcttcctcttctacgatctcttcttctctctttgttgcagtctcttctcatcttctccactctcgtctctcaagtatggttaattacaggattaatttccaacatctattatatatataaactcgttgaaatcataatttttttcttcagatattaagtaaacaaattggccatcgacgagagactcaaagagagacccatctccatggcaccaaggtggaaatggaaaggtgctgaggcaaaggcacttgcagaacctgtttcgaaaacagtctcggagctgagatcttcattgacccaaaccgaggctttaggtttcctctcaagttgtaacgtacttttatcggttgagtcagaggaagctgagcttttggatcgttgttgttttggtagactagttgttggtgctgagaaagataagagatggattcagttatcctttgaagaagctttctttttgttttacaaactgaaatgcatcaagatttgccttcacggtcgttctctggaaaacgaggtagatttatggcgatccatgagttcctttaagcaagattttgcgatcttgtacaaggcttattcgcatctacgatcgaagaactggattgtgagatcagggttacaatatggagttgatttcgtggtgtatagacatcatccatctcttgtccactctgaatacgccgttcttgttcagtccattggcgggaatgatcggttaaaggtgtggtccgatatccattgcagtgttcgactaaccggaagcgtcgcgaaatcattgttggttctttacgtcaacagaaaagtcaacacagagaagatgaatctgcctttgtgtttagaggactacacagttgaagagcaaacaatacgtagatggagtccagaacttagccgtgaagatgaaaccagaacatgattaagcttacatgttaacaagtcttgttgtaatgctgatttctagaagaatataaaatgaactaggttcc

SEQ ID NO: 90776 - protein, 237 aa, Arabidopsis thaliana
  peptide (1)..(237): Ceres Seq. ID no. 12725216
  misc_feature (118)..(205): Pfam Name: tRNA intron endonuclease, catalytic C-terminal domain Pfam Description: tRNA intron endonuclease, catalytic C-terminal
  misc_feature (1)..(237): Homolog of NCBI NO: 15231186 NR Description: putative protein; protein id: At3g45590.1, by cDNA: gi_6635255 [Arabidopsis thaliana]
  misc_feature (1)..(237): Homolog of NCBI NO: 6635256 NR Description: tRNA intron endonuclease [Arabidopsis thaliana]
  misc_feature (1)..(237): Homolog of NCBI NO: 15238643 NR Description: tRNA intron endonuclease - like protein; protein At5g60230.1 [Arabidopsis thaliana] >gi|8885574|dbj|BAA97504.1| intron endonuclease [Arabidopsis thaliana]
  misc_feature (74)..(234): Homolog of NCBI NO: 39841065 NR Description: similar to hypothetical protein MGC2776 [Mus
  misc_feature (74)..(234): Homolog of NCBI NO: 39644952 NR Description: MGC2776 protein [Homo sapiens]
  misc_feature (74)..(234): Homolog of NCBI NO: 13376882 NR Description: hypothetical protein MGC2776 [Homo sapiens] Unknown (protein for MGC:2776) [Homo sapiens] Unknown (protein for MGC:4440) [Homo sapiens]
  misc_feature (80)..(234): Homolog of NCBI NO: 22760473 NR Description: unnamed protein product [Homo sapiens]
  misc_feature (80)..(226): Homolog of NCBI NO: 24584677 NR Description: CG31812-PA [Drosophila melanogaster]
  misc_feature (124)..(232): Homolog of NCBI NO: 19571750 NR Description: putative tRNA splicing endonuclease subunit
  misc_feature (19)..(232): Homolog of NCBI NO: 6323134 NR Description: tRNA splicing endonuclease subunit; Sen2p
MAPRWKWKGAEAKALAEPVSKTVSELRSSLTQTEALGFLSSCNVLLSVESEEAELLDRCCFGRLVVGAEKDKRWIQLSFEEAFFLFYKLKCIKICLHGRSLENEVDLWRSMSSFKQDFAILYKAYSHLRSKNWIVRSGLQYGVDFVVYRHHPSLVHSEYAVLVQSIGGNDRLKVWSDIHCSVRLTGSVAKSLLVLYVNRKVNTEKMNLPLCLEDYTVEEQTIRRWSPELSREDETRT

SEQ ID NO: 90777 - protein, 127 aa, Arabidopsis thaliana
  peptide (1)..(127): Ceres Seq. ID no. 12725217
  misc_feature (8)..(95): Pfam Name: tRNA intron endonuclease, catalytic C-terminal domain Pfam Description: tRNA intron endonuclease, catalytic C-terminal
  misc_feature (1)..(127): Homolog of NCBI NO: 15231186 NR Description: putative protein; protein id: At3g45590.1, by cDNA: gi_6635255 [Arabidopsis thaliana]
  misc_feature (1)..(127): Homolog of NCBI NO: 6635256 NR Description: tRNA intron endonuclease [Arabidopsis thaliana]
  misc_feature (1)..(127): Homolog of NCBI NO: 15238643 NR Description: tRNA intron endonuclease - like protein; protein At5g60230.1 [Arabidopsis thaliana] >gi|8885574|dbj|BAA97504.1| intron endonuclease [Arabidopsis thaliana]
  misc_feature (1)..(124): Homolog of NCBI NO: 39841065 NR Description: similar to hypothetical protein MGC2776 [Mus
  misc_feature (1)..(124): Homolog of NCBI NO: 39644952 NR Description: MGC2776 protein [Homo sapiens]
  misc_feature (1)..(124): Homolog of NCBI NO: 13376882 NR Description: hypothetical protein MGC2776 [Homo sapiens] Unknown (protein for MGC:2776) [Homo sapiens] Unknown (protein for MGC:4440) [Homo sapiens]
  misc_feature (1)..(124): Homolog of NCBI NO: 22760473 NR Description: unnamed protein product [Homo sapiens]
  misc_feature (1)..(116): Homolog of NCBI NO: 24584677 NR Description: CG31812-PA [Drosophila melanogaster]
  misc_feature (14)..(122): Homolog of NCBI NO: 19571750 NR Description: putative tRNA splicing endonuclease subunit
  misc_feature (1)..(122): Homolog of NCBI NO: 6323134 NR Description: tRNA splicing endonuclease subunit; Sen2p
MSSFKQDFAILYKAYSHLRSKNWIVRSGLQYGVDFVVYRHHPSLVHSEYAVLVQSIGGNDRLKVWSDIHCSVRLTGSVAKSLLVLYVNRKVNTEKMNLPLCLEDYTVEEQTIRRWSPELSREDETRT

SEQ ID NO: 90778 - DNA, 3177 bp, Arabidopsis thaliana
  misc_feature (1)..(3177): Ceres Seq. ID no. 12725257
  misc_feature: MA Experiment ID: 20000173 Result: Down-regulated in Transcription
  misc_feature: MA Experiment 20000173 PARAMETER Experiment Name: At_42deg_Heat_P Parameter: Age (day) Value: 14
  misc_feature: MA Experiment 20000173 PARAMETER Experiment Name: At_42deg_Heat_P Parameter: Organism Value: A. thaliana
  misc_feature: MA Experiment 20000173 PARAMETER Experiment Name: At_42deg_Heat_P Parameter: Plant Line Value: WS
  misc_feature: MA Experiment 20000173 PARAMETER Experiment Name: At_42deg_Heat_P Parameter: Temperature (deg C) Value: 42 vs. 22
  misc_feature: MA Experiment 20000173 PARAMETER Experiment Name: At_42deg_Heat_P Parameter: Timepoint (hr) Value: 6
  misc_feature: MA Experiment 20000173 PARAMETER Experiment Name: At_42deg_Heat_P Parameter: Tissue Value: Aerial
  misc_feature: MA Experiment ID: 20000179 Result: Up-regulated in Transcription
  misc_feature: MA Experiment 20000179 PARAMETER Experiment Name: At_Germinating_Seeds_P Parameter: Age (hr) Value: 6 vs. 0
  misc_feature: MA Experiment 20000179 PARAMETER Experiment Name: At_Germinating_Seeds_P Parameter: Tissue Value: Germinating Seeds
  misc_feature: MA Experiment ID: 20000180 Result: Up-regulated in Transcription
  misc_feature: MA Experiment 20000180 PARAMETER Experiment Name: At_Germinating_Seeds_P Parameter: Age (hr) Value: 24 vs. 0
  misc_feature: MA Experiment 20000180 PARAMETER Experiment Name: At_Germinating_Seeds_P Parameter: Tissue Value: Germinating Seeds
  misc_feature: MA Experiment ID: 20000234 Result: Up-regulated in Transcription
  misc_feature: MA Experiment 20000234 PARAMETER Experiment Name: At_Siliques_P Parameter: Age (day) Value: 21
  misc_feature: MA Experiment 20000234 PARAMETER Experiment Name: At_Siliques_P Parameter: Organism Value: A. thaliana
  misc_feature: MA Experiment 20000234 PARAMETER Experiment Name: At_Siliques_P Parameter: Plant Line Value: WS
  misc_feature: MA Experiment 20000234 PARAMETER Experiment Name: At_Siliques_P Parameter: Tissue Value: Less Than 5mm Siliques vs. Whole Plant
  misc_feature: MA Experiment ID: 20000235 Result: Up-regulated in Transcription
  misc_feature: MA Experiment 20000235 PARAMETER Experiment Name: At_Siliques_P Parameter: Age (day) Value: 21
  misc_feature: MA Experiment 20000235 PARAMETER Experiment Name: At_Siliques_P Parameter: Organism Value: A. thaliana
  misc_feature: MA Experiment 20000235 PARAMETER Experiment Name: At_Siliques_P Parameter: Plant Line Value: WS
  misc_feature: MA Experiment 20000235 PARAMETER Experiment Name: At_Siliques_P Parameter: Tissue Value: 5-10mm Siliques vs. Whole Plant
  misc_feature: MA Experiment ID: 20000265 Result: Up-regulated in Transcription
  misc_feature: MA Experiment 20000265 PARAMETER Experiment Name: At_Open_Flower_P Parameter: Age (day) Value: 21
  misc_feature: MA Experiment 20000265 PARAMETER Experiment Name: At_Open_Flower_P Parameter: Plant Line Value: WS
  misc_feature: MA Experiment 20000265 PARAMETER Experiment Name: At_Open_Flower_P Parameter: Tissue Value: Closed Flower vs. Whole Plant
  misc_feature: MA Experiment ID: 20000286 Result: Up-regulated in Transcription
  misc_feature: MA Experiment 20000286 PARAMETER Experiment Name: At_Open_Flower_P Parameter: Age (day) Value: 21
  misc_feature: MA Experiment 20000286 PARAMETER Experiment Name: At_Open_Flower_P Parameter: Plant Line Value: WS
  misc_feature: MA Experiment 20000286 PARAMETER Experiment Name: At_Open_Flower_P Parameter: Tissue Value: Half Open vs. Whole Plant
  misc_feature: MA Experiment ID: 20000437 Result: Down-regulated in Transcription
  misc_feature: MA Experiment 20000437 PARAMETER Experiment Name: At_Drought_P Parameter: Age (day) Value: 8
  misc_feature: MA Experiment 20000437 PARAMETER Experiment Name: At_Drought_P Parameter: Organism Value: A. thaliana
  misc_feature: MA Experiment 20000437 PARAMETER Experiment Name: At_Drought_P Parameter: Plant Line Value: WS
  misc_feature: MA Experiment 20000437 PARAMETER Experiment Name: At_Drought_P Parameter: Timepoint (hr) Value: 24
  misc_feature: MA Experiment 20000437 PARAMETER Experiment Name: At_Drought_P Parameter: Tissue Value: Whole Plant
  misc_feature: MA Experiment 20000437 PARAMETER Experiment Name: At_Drought_P Parameter: Treatment Value: Drought vs. No Drought
  misc_feature: MA Experiment ID: 20000794 Result: Down-regulated in Transcription
  misc_feature: MA Experiment 20000794 PARAMETER Experiment Name: At_Petals_P Parameter: Age (day) Value: 23-25 days
  misc_feature: MA Experiment 20000794 PARAMETER Experiment Name: At_Petals_P Parameter: Plant Line Value: WS
  misc_feature: MA Experiment 20000794 PARAMETER Experiment Name: At_Petals_P Parameter: Tissue Value: Petals vs. Whole plant
  misc_feature: MA Experiment ID: 20001451 Result: Down-regulated in Transcription
  misc_feature: MA Experiment 20001451 PARAMETER Experiment Name: At_Far-red-induction_P Parameter: Age (day) Value: 7
  misc_feature: MA Experiment 20001451 PARAMETER Experiment Name: At_Far-red-induction_P Parameter: Light Value: Far-red vs. White
  misc_feature: MA Experiment 20001451 PARAMETER Experiment Name: At_Far-red-induction_P Parameter: Organism Value: A. thaliana
  misc_feature: MA Experiment 20001451 PARAMETER Experiment Name: At_Far-red-induction_P Parameter: Plant Line Value: Columbia
  misc_feature: MA Experiment 20001451 PARAMETER Experiment Name: At_Far-red-induction_P Parameter: Timepoint (hr) Value: 24
  misc_feature: MA Experiment 20001451 PARAMETER Experiment Name: At_Far-red-induction_P Parameter: Tissue Value: Whole Plant
  misc_feature: MA Experiment ID: 20001555 Result: Down-regulated in Transcription
  misc_feature: MA Experiment 20001555 PARAMETER Experiment Name: At_Drought_Soil_Dry_P Parameter: Age (day) Value: 24
  misc_feature: MA Experiment 20001555 PARAMETER Experiment Name: At_Drought_Soil_Dry_P Parameter: Organism Value: A. thaliana
  misc_feature: MA Experiment 20001555 PARAMETER Experiment Name: At_Drought_Soil_Dry_P Parameter: Plant Line Value: WS
  misc_feature: MA Experiment 20001555 PARAMETER Experiment Name: At_Drought_Soil_Dry_P Parameter: Post Timepoint (hr) Value: None
  misc_feature: MA Experiment 20001555 PARAMETER Experiment Name: At_Drought_Soil_Dry_P Parameter: Post-Treatment Value: None
  misc_feature: MA Experiment 20001555 PARAMETER Experiment Name: At_Drought_Soil_Dry_P Parameter: Timepoint (day) Value: 10
  misc_feature: MA Experiment 20001555 PARAMETER Experiment Name: At_Drought_Soil_Dry_P Parameter: Treatment Value: Drought vs. No Drought
  misc_feature: MA Experiment ID: 20001911 Result: Down-regulated in Transcription
  misc_feature: MA Experiment 20001911 PARAMETER Experiment Name: At_Drought_Reproduction_P Parameter: Age (day) Value: 40
  misc_feature: MA Experiment 20001911 PARAMETER Experiment Name: At_Drought_Reproduction_P Parameter: Organism Value: A. thaliana
  misc_feature: MA Experiment 20001911 PARAMETER Experiment Name: At_Drought_Reproduction_P Parameter: Plant Line Value: WS
  misc_feature: MA Experiment 20001911 PARAMETER Experiment Name: At_Drought_Reproduction_P Parameter: Timepoint (day) Value: 10
  misc_feature: MA Experiment 20001911 PARAMETER Experiment Name: At_Drought_Reproduction_P Parameter: Tissue Value: Flowers
  misc_feature: MA Experiment 20001911 PARAMETER Experiment Name: At_Drought_Reproduction_P Parameter: Treatment Value: Drought vs. No Drought
atggattcgattcagcaacgaagaggtgggattgtatctctctctccagctcagacaccacgatcaagtgacaaatcagcaagagaatcgagatcttctgaatcaaattcaaccaatagaaatgataaagaaaagggtgtgaatgtgcaggtcatattgcgttgcaggccattgagtgaggatgaagctagaattcatacaccggtggtgatttcttgtaacgagaaccgtagagaagttgctgccactcagagtattgctggaaagcatattgatagacattttgctttcgataaggtcttcggtccagcatctcaacagaaggacttatatgaccaagccatttgtccaattgtgtttgaagtacttgagggttacaactgtaccatatttgcgtatggtcagaccggaactggaaagacgtatacgatggaaggaggtgcaaggaaaaagaatggtgagttcccgagtgacgcaggtgttattccaagagctgttaagcaaattttcgacatattagaagctcagggggctgaatatagcatgaaggtcaccttcctagaactatataatgaggaaatctcagatcttttagcaccagaggagactataaaatttgttgatgagaagtctaaaaaatcgattgccctcatggaagacgggaaaggaagtgtctttgtccgtgggttagaagaagagatagtaagtacagcgaatgagatatacaagatcttagaaaaaggttccgcgaaaaggcgtacagctgaaactcttttgaataagcaaagtagtcgctctcattcaatattttccataaccattcacattaaggaaaatactccagagggagaagagatgatcaaatgtgggaaactaaatcttgttgaccttgctggttccgagaatatctcacgttctggtgcacgagagggacgagccagagaagctggagagatcaacaagagtttacttactcttggccgtgtcattaacgcgcttgtggagcactctggtcatattccttacagagatagcaaattgacgaggctcttgagagaatcattgggaggaaagacgaaaacttgtgtaatcgccacaatttcaccttccatccactgtttagaagagactctaagcactttggattatgcacatcgcgccaagaatatcaagaacaaaccagagatcaaccagaagatgatgaaatctgctgtcatgaaagatctgtactctgagattgacagactgaagcaagaggtatatgctgcaagagagaagaatgggatttatattccaaaagaccgctacattcaagaagaggctgagaaaaaggcaatggctgaaaagatagaaagattagaacttcaatcagaatccaaggacaagcgagtcgttgaccttcaggagctatacaattctcagcagattttaactgcagagttgagtgagaaacttgaaaaaactgagaaaaagcttgaggaaactgagcactcattgtttgatcttgaagagaaatacagacaggcgaatgcaaccattaaagagaaggaatttgtgatatctaatctcctcaagtcagaaaaatcacttgtcgagcgagcctttcagctacgcacagaactagaaagtgcatcatcagatgtttccaacttgttttccaaaatagaaagaaaggacaaaatcgaggatggaaacagatttctcatccaaaagttccagtcacagctcacacaacagcttgagctattgcataagactgtggcttcttcggtgactcaacaagaggttcaactaaaacacatggaggaagacatggagtcctttgtgtcgacaaaatctgaggctactgaagaactccgtgatagactttcaaaactgaagagagtttatggttctggcattgaagctcttgataacatagctgtgaagctagatggaaattctcagtcaacatttagtagccttaactcagaagtttcgaaacattcgcatgaacttgagaatgttttcaagggttttgcttccgaggctgacatgttactgcaagatctccaaagtagccttaacaaacaggaagagaagcttattacatttgcacagcagcaacggaaggcacactcgcgagctgtggatacagcaaggtcagtttcaaaagtaacagtagaattcttcaagactctagacacacatgctaccaaattaaccgggatagtagaagaggcacagacagttaaccacaagaaattgagcgaatttgaaaacaagtttgaggaatgtgctgcaaatgaagagagacaattgctagagaaagtagcagagcttcttgcaaattctaatgctaggaagaaaaaccttgtccaaatggctgtacacgatctacgcgagagcgcatccaccagaactactaccctacagcatgagatgtcaacaatgcaagattcaacttcttccattaaagcagagtggagcattcacatggagaaaacagaatcaagccaccacgaggacacttcagcagttgagagcgggaagaaagctatgcaagaagttctcttaaactgtttggagaagaccgagatgagtgcacatcaatggaggaaagctcaagaatcacttgtcagtctagaacgaaacaatgtggcttctgttgactccatcgttagaggtggcatggatgccaatgagaacctacgctctcaattctcgaccgctgtttcatcctctcttgatgtttttgatgctgcaaatagtagcctccttacttccatcgatcattcattgcaactcgataatgatgcatgtacaaaggtcaactccatgatcattccatgctgtgaagacttgatagagctaaagagtgatcacaatcacaagatcatagagatcacagagaatgcagggaaatgtcttcttgatgaatatgtagtggatgaaccatcatgttcaacgccaaagaaaagaccaatcgacataccaagcattgagtccatcgaagagcttagaactccagcatctgaggagttactgagagcgtttcgtgatgagaagttgtcgaagcaagccaatggggatgcaaagcagcagcagcagcagcaacaacaacaccttatacgcgcttcgtctctttacgaggcagctgtgtcggattcaagatatcccctctctgctgttaactga

SEQ ID NO: 90779 - protein, 1058 aa, Arabidopsis thaliana
  peptide (1)..(1058): Ceres Seq. ID no. 12725258
  misc_feature (208)..(1054): Pfam Name: Myosin tail Pfam Description: Myosin tail
  misc_feature (41)..(1014): Homolog of NCBI NO: 11132775 NR Description: 125 kDa kinesin-related protein
  misc_feature (4)..(1028): Homolog of NCBI NO: 30687132 NR Description: kinesin-related protein [Arabidopsis thaliana]
  misc_feature (38)..(1054): Homolog of NCBI NO: 15227596 NR Description: kinesin-related protein; protein id: At2g36200.1
  misc_feature (38)..(956): Homolog of NCBI NO: 15208453 NR Description: kinesin heavy chain [Zea mays]
  misc_feature (275)..(1029): Homolog of NCBI NO: 15208459 NR Description: kinesin heavy chain [Zea mays]
  misc_feature (38)..(268): Homolog of NCBI NO: 15208459 NR Description: kinesin heavy chain [Zea mays]
  misc_feature (4)..(727): Homolog of NCBI NO: 25408550 NR Description: probable kinesin heavy chain [imported] - thaliana >gi|4056495|gb|AAC98061.1| putative kinesin heavy chain
  misc_feature (48)..(1022): Homolog of NCBI NO: 10567777 NR Description: KRP170 [Strongylocentrotus purpuratus]
  misc_feature (48)..(1015): Homolog of NCBI NO: 12055369 NR Description: kinesin-like boursin [Paracentrotus lividus]
  misc_feature (33)..(883): Homolog of NCBI NO: 539445 NR Description: kinesin-related protein KLP61F - fruit fly
MDSIQQRRGGIVSLSPAQTPRSSDKSARESRSSESNSTNRNDKEKGVNVQVILRCRPLSEDEARIHTPVVISCNENRREVAATQSIAGKHIDRHFAFDKVFGPASQQKDLYDQAICPIVFEVLEGYNCTIFAYGQTGTGKTYTMEGGARKKNGEFPSDAGVIPRAVKQIFDILEAQGAEYSMKVTFLELYNEEISDLLAPEETIKFVDEKSKKSIALMEDGKGSVFVRGLEEEIVSTANEIYKILEKGSAKRRTAETLLNKQSSRSHSIFSITIHIKENTPEGEEMIKCGKLNLVDLAGSENISRSGAREGRAREAGEINKSLLTLGRVINALVEHSGHIPYRDSKLTRLLRESLGGKTKTCVIATISPSIHCLEETLSTLDYAHRAKNIKNKPEINQKMMKSAVMKDLYSEIDRLKQEVYAAREKNGIYIPKDRYIQEEAEKKAMAEKIERLELQSESKDKRVVDLQELYNSQQILTAELSEKLEKTEKKLEETEHSLFDLEEKYRQANATIKEKEFVISNLLKSEKSLVERAFQLRTELESASSDVSNLFSKIERKDKIEDGNRFLIQKFQSQLTQQLELLHKTVASSVTQQEVQLKHMEEDMESFVSTKSEATEELRDRLSKLKRVYGSGIEALDNIAVKLDGNSQSTFSSLNSEVSKHSHELENVFKGFASEADMLLQDLQSSLNKQEEKLITFAQQQRKAHSRAVDTARSVSKVTVEFFKTLDTHATKLTGIVEEAQTVNHKKLSEFENKFEECAANEERQLLEKVAELLANSNARKKNLVQMAVHDLRESASTRTTTLQHEMSTMQDSTSSIKAEWSIHMEKTESSHHEDTSAVESGKKAMQEVLLNCLEKTEMSAHQWRKAQESLVSLERNNVASVDSIVRGGMDANENLRSQFSTAVSSSLDVFDAANSSLLTSIDHSLQLDNDACTKVNSMIIPCCEDLIELKSDHNHKIIEITENAGKCLLDEYVVDEPSCSTPKKRPIDIPSIESIEELRTPASEELLRAFRDEKLSKQANGDAKQQQQQQQQHLIRASSLYEAAVSDSRYPLSAVN

SEQ ID NO: 90780 - protein, 915 aa, Arabidopsis thaliana
  peptide (1)..(915): Ceres Seq. ID no. 12725259
  misc_feature (65)..(911): Pfam Name: Myosin tail Pfam Description: Myosin tail
  misc_feature (1)..(871): Homolog of NCBI NO: 11132775 NR Description: 125 kDa kinesin-related protein
  misc_feature (1)..(885): Homolog of NCBI NO: 30687132 NR Description: kinesin-related protein [Arabidopsis thaliana]
  misc_feature (1)..(911): Homolog of NCBI NO: 15227596 NR Description: kinesin-related protein; protein id: At2g36200.1
  misc_feature (1)..(813): Homolog of NCBI NO: 15208453 NR Description: kinesin heavy chain [Zea mays]
  misc_feature (132)..(886): Homolog of NCBI NO: 15208459 NR Description: kinesin heavy chain [Zea mays]
  misc_feature (1)..(125): Homolog of NCBI NO: 15208459 NR Description: kinesin heavy chain [Zea mays]
  misc_feature (1)..(584): Homolog of NCBI NO: 25408550 NR Description: probable kinesin heavy chain [imported] - thaliana >gi|4056495|gb|AAC98061.1| putative kinesin heavy chain
  misc_feature (1)..(879): Homolog of NCBI NO: 10567777 NR Description: KRP170 [Strongylocentrotus purpuratus]
  misc_feature (1)..(872): Homolog of NCBI NO: 12055369 NR Description: kinesin-like boursin [Paracentrotus lividus]
  misc_feature (1)..(740): Homolog of NCBI NO: 539445 NR Description: kinesin-related protein KLP61F - fruit fly
MEGGARKKNGEFPSDAGVIPRAVKQIFDILEAQGAEYSMKVTFLELYNEEISDLLAPEETIKFVDEKSKKSIALMEDGKGSVFVRGLEEEIVSTANEIYKILEKGSAKRRTAETLLNKQSSRSHSIFSITIHIKENTPEGEEMIKCGKLNLVDLAGSENISRSGAREGRAREAGEINKSLLTLGRVINALVEHSGHIPYRDSKLTRLLRESLGGKTKTCVIATISPSIHCLEETLSTLDYAHRAKNIKNKPEINQKMMKSAVMKDLYSEIDRLKQEVYAAREKNGIYIPKDRYIQEEAEKKAMAEKIERLELQSESKDKRVVDLQELYNSQQILTAELSEKLEKTEKKLEETEHSLFDLEEKYRQANATIKEKEFVISNLLKSEKSLVERAFQLRTELESASSDVSNLFSKIERKDKIEDGNRFLIQKFQSQLTQQLELLHKTVASSVTQQEVQLKHMEEDMESFVSTKSEATEELRDRLSKLKRVYGSGIEALDNIAVKLDGNSQSTFSSLNSEVSKHSHELENVFKGFASEADMLLQDLQSSLNKQEEKLITFAQQQRKAHSRAVDTARSVSKVTVEFFKTLDTHATKLTGIVEEAQTVNHKKLSEFENKFEECAANEERQLLEKVAELLANSNARKKNLVQMAVHDLRESASTRTTTLQHEMSTMQDSTSSIKAEWSIHMEKTESSHHEDTSAVESGKKAMQEVLLNCLEKTEMSAHQWRKAQESLVSLERNNVASVDSIVRGGMDANENLRSQFSTAVSSSLDVFDAANSSLLTSIDHSLQLDNDACTKVNSMIIPCCEDLIELKSDHNHKIIEITENAGKCLLDEYVVDEPSCSTPKKRPIDIPSIESIEELRTPASEELLRAFRDEKLSKQANGDAKQQQQQQQQHLIRASSLYEAAVSDSRYPLSAVN

SEQ ID NO: 90781 - protein, 877 aa, Arabidopsis thaliana
  peptide (1)..(877): Ceres Seq. ID no. 12725260
  misc_feature (27)..(873): Pfam Name: Myosin tail Pfam Description: Myosin tail
  misc_feature (1)..(833): Homolog of NCBI NO: 11132775 NR Description: 125 kDa kinesin-related protein
  misc_feature (1)..(847): Homolog of NCBI NO: 30687132 NR Description: kinesin-related protein [Arabidopsis thaliana]
  misc_feature (1)..(873): Homolog of NCBI NO: 15227596 NR Description: kinesin-related protein; protein id: At2g36200.1
  misc_feature (1)..(775): Homolog of NCBI NO: 15208453 NR Description: kinesin heavy chain [Zea mays]
  misc_feature (94)..(848): Homolog of NCBI NO: 15208459 NR Description: kinesin heavy chain [Zea mays]
  misc_feature (1)..(87): Homolog of NCBI NO: 15208459 NR Description: kinesin heavy chain [Zea mays]
  misc_feature (1)..(546): Homolog of NCBI NO: 25408550 NR Description: probable kinesin heavy chain [imported] - thaliana >gi|4056495|gb|AAC98061.1| putative kinesin heavy chain
  misc_feature (1)..(841): Homolog of NCBI NO: 10567777 NR Description: KRP170 [Strongylocentrotus purpuratus]
  misc_feature (1)..(834): Homolog of NCBI NO: 12055369 NR Description: kinesin-like boursin [Paracentrotus lividus]
  misc_feature (1)..(702): Homolog of NCBI NO: 539445 NR Description: kinesin-related protein KLP61F - fruit fly
MKVTFLELYNEEISDLLAPEETIKFVDEKSKKSIALMEDGKGSVFVRGLEEEIVSTANEIYKILEKGSAKRRTAETLLNKQSSRSHSIFSITIHIKENTPEGEEMIKCGKLNLVDLAGSENISRSGAREGRAREAGEINKSLLTLGRVINALVEHSGHIPYRDSKLTRLLRESLGGKTKTCVIATISPSIHCLEETLSTLDYAHRAKNIKNKPEINQKMMKSAVMKDLYSEIDRLKQEVYAAREKNGIYIPKDRYIQEEAEKKAMAEKIERLELQSESKDKRVVDLQELYNSQQILTAELSEKLEKTEKKLEETEHSLFDLEEKYRQANATIKEKEFVISNLLKSEKSLVERAFQLRTELESASSDVSNLFSKIERKDKIEDGNRFLIQKFQSQLTQQLELLHKTVASSVTQQEVQLKHMEEDMESFVSTKSEATEELRDRLSKLKRVYGSGIEALDNIAVKLDGNSQSTFSSLNSEVSKHSHELENVFKGFASEADMLLQDLQSSLNKQEEKLITFAQQQRKAHSRAVDTARSVSKVTVEFFKTLDTHATKLTGIVEEAQTVNHKKLSEFENKFEECAANEERQLLEKVAELLANSNARKKNLVQMAVHDLRESASTRTTTLQHEMSTMQDSTSSIKAEWSIHMEKTESSHHEDTSAVESGKKAMQEVLLNCLEKTEMSAHQWRKAQESLVSLERNNVASVDSIVRGGMDANENLRSQFSTAVSSSLDVFDAANSSLLTSIDHSLQLDNDACTKVNSMIIPCCEDLIELKSDHNHKIIEITENAGKCLLDEYVVDEPSCSTPKKRPIDIPSIESIEELRTPASEELLRAFRDEKLSKQANGDAKQQQQQQQQHLIRASSLYEAAVSDSRYPLSAVN

SEQ ID NO: 90782 - DNA, 792 bp, Arabidopsis thaliana
  misc_feature (1)..(792): Ceres Seq. ID no. 12725263
  misc_feature: MA Experiment ID: 20000314 Result: Down-regulated in Transcription
  misc_feature: MA Experiment 20000314 PARAMETER Experiment Name: At_14day_Shoots-Roots_Sub_P Parameter: Age (day) Value: 14
  misc_feature: MA Experiment 20000314 PARAMETER Experiment Name: At_14day_Shoots-Roots_Sub_P Parameter: Organism Value: A. thaliana
  misc_feature: MA Experiment 20000314 PARAMETER Experiment Name: At_14day_Shoots-Roots_Sub_P Parameter: Plant Line Value: WS
  misc_feature: MA Experiment 20000314 PARAMETER Experiment Name: At_14day_Shoots-Roots_Sub_P Parameter: Tissue Value: Roots vs. Whole Plant
  misc_feature: MA Experiment ID: 20000315 Result: Down-regulated in Transcription
  misc_feature: MA Experiment 20000315 PARAMETER Experiment Name: At_14day_Shoots-Roots_Sub_P Parameter: Age (day) Value: 14
  misc_feature: MA Experiment 20000315 PARAMETER Experiment Name: At_14day_Shoots-Roots_Sub_P Parameter: Organism Value: A. thaliana
  misc_feature: MA Experiment 20000315 PARAMETER Experiment Name: At_14day_Shoots-Roots_Sub_P Parameter: Plant Line Value: WS
  misc_feature: MA Experiment 20000315 PARAMETER Experiment Name: At_14day_Shoots-Roots_Sub_P Parameter: Tissue Value: Shoots vs. Whole Plant
  misc_feature: MA Experiment ID: 20000352 Result: Up-regulated in Transcription
  misc_feature: MA Experiment 20000352 PARAMETER Experiment Name: At_Drought_Sub_P Parameter: Age (day) Value: 7
  misc_feature: MA Experiment 20000352 PARAMETER Experiment Name: At_Drought_Sub_P Parameter: Organism Value: A. thaliana
  misc_feature: MA Experiment 20000352 PARAMETER Experiment Name: At_Drought_Sub_P Parameter: Plant Line Value: WS
  misc_feature: MA Experiment 20000352 PARAMETER Experiment Name: At_Drought_Sub_P Parameter: Timepoint (hr) Value: 6
  misc_feature: MA Experiment 20000352 PARAMETER Experiment Name: At_Drought_Sub_P Parameter: Tissue Value: Whole Plant
  misc_feature: MA Experiment 20000352 PARAMETER Experiment Name: At_Drought_Sub_P Parameter: Treatment Value: Drought vs. No Drought
  misc_feature: MA Experiment ID: 20000355 Result: Down-regulated in Transcription
  misc_feature: MA Experiment 20000355 PARAMETER Experiment Name: At_Siliques_Sub_P Parameter: Age (day) Value: 21
  misc_feature: MA Experiment 20000355 PARAMETER Experiment Name: At_Siliques_Sub_P Parameter: Organism Value: A. thaliana
  misc_feature: MA Experiment 20000355 PARAMETER Experiment Name: At_Siliques_Sub_P Parameter: Plant Line Value: WS
  misc_feature: MA Experiment 20000355 PARAMETER Experiment Name: At_Siliques_Sub_P Parameter: Tissue Value: Less Than 5mm Siliques vs. Whole Plant
  misc_feature: MA Experiment ID: 20000440 Result: Down-regulated in Transcription
  misc_feature: MA Experiment 20000440 PARAMETER Experiment Name: At_Closed-Flower__Sub_P Parameter: Tissue Value: Closed Flower vs. Whole Plant
  misc_feature: MA Experiment ID: 20000634 Result: Up-regulated in Transcription
  misc_feature: MA Experiment 20000634 PARAMETER Experiment Name: At_10percent_PEG_Sub_P Parameter: Age (day) Value: 12
  misc_feature: MA Experiment 20000634 PARAMETER Experiment Name: At_10percent_PEG_Sub_P Parameter: Organism Value: A. thaliana
  misc_feature: MA Experiment 20000634 PARAMETER Experiment Name: At_10percent_PEG_Sub_P Parameter: Plant Line Value: WS
  misc_feature: MA Experiment 20000634 PARAMETER Experiment Name: At_10percent_PEG_Sub_P Parameter: Timepoint (day) Value: 12
  misc_feature: MA Experiment 20000634 PARAMETER Experiment Name: At_10percent_PEG_Sub_P Parameter: Tissue Value: Whole Plant
  misc_feature: MA Experiment 20000634 PARAMETER Experiment Name: At_10percent_PEG_Sub_P Parameter: Treatment Value: 10% PEG vs. No Treatment
atgagaagctttctctacctcatcgtagtcatcttcctcttctcttcatccgttaacgcttgtgatcgatgtctacaccgttctaaagcatcttatttctcctctgcttctgctctctcttccggggcttgtgcctatggccctatggctacgagcttctttgccggccacattgcggccgctataccttccatttacaaagatggtgctggctgtggagcttgctttcaagtcagatgcaagaaccccaagttgtgtaacagtaaaggaaccattgtgatggtcacagacttgaacacgagcaaccaaactgatcttgtccttagtagtagagcttttagggctatggctaagcctgttgttggtgttgacaaataccttctcaaacaaggcatcgtcgacgttgaataccaaagagttccttgcaattacggtaaaaggaatttgaacgtgagagtggaagaagcaagcaaaaagccaaattacttggcgataaagctattgtaccaaggaggtcaaaccgaagtggtaggtatcgacattgctccagtaggttcgtcacaatggagttacatgagtagaagccacggagccgtttgggcgaccgataaagtaccaacgggagctctacagttcaagttcacggtgacaggcggctacgatggcaaaacggtttggtcaaagagggttcttccggcgaattggaactctgggaggatttatgatgccggcgttcagatcaccgacattgctcaagaaggttgtgatacatgcggtcacatatggaactga

SEQ ID NO: 90783 - protein, 263 aa, Arabidopsis thaliana
  peptide (1)..(263): Ceres Seq. ID no. 12725264
  misc_feature (149)..(232): Pfam Name: Pollen allergen Pfam Description: Pollen allergen
  misc_feature (1)..(263): Homolog of NCBI NO: 20138389 NR Description: Expansin-like 3 precursor (At-EXPL3)
  misc_feature (1)..(263): Homolog of NCBI NO: 21555265 NR Description: Expansin-like 1 precursor (At-EXPL1)
  misc_feature (1)..(263): Homolog of NCBI NO: 15231303 NR Description: putative protein; protein id: At3g45970.1, by cDNA: 27534., supported by cDNA: gi_14190436, supported by
  misc_feature (49)..(263): Homolog of NCBI NO: 30692657 NR Description: expansin protein family (EXPL3) [Arabidopsis >gi|26449323|dbj|BAC41789.1| unknown protein [Arabidopsis
  misc_feature (1)..(263): Homolog of NCBI NO: 15233841 NR Description: putative pollen allergen; protein id: supported by cDNA: gi_14190354, supported by cDNA: gi_15215878
  misc_feature (3)..(258): Homolog of NCBI NO: 33111959 NR Description: expansin-like protein [Quercus robur]
  misc_feature (3)..(258): Homolog of NCBI NO: 37536544 NR Description: putative pollen allergen [Oryza sativa (japonica group)] >gi|10140765|gb|AAG13596.1| putative pollen allergen sativa] >gi|31433332|gb|AAP54861.1| putative pollen allergen
  misc_feature (5)..(262): Homolog of NCBI NO: 21654743 NR Description: expansin-like protein 1 [Oryza sativa]
  misc_feature (5)..(262): Homolog of NCBI NO: 20502989 NR Description: Putative pollen allergen [Oryza sativa (japonica
  misc_feature (3)..(262): Homolog of NCBI NO: 34901594 NR Description: P0571D04.11 [Oryza sativa (japonica
MRSFLYLIVVIFLFSSSVNACDRCLHRSKASYFSSASALSSGACAYGPMATSFFAGHIAAAIPSIYKDGAGCGACFQVRCKNPKLCNSKGTIVMVTDLNTSNQTDLVLSSRAFRAMAKPVVGVDKYLLKQGIVDVEYQRVPCNYGKRNLNVRVEEASKKPNYLAIKLLYQGGQTEVVGIDIAPVGSSQWSYMSRSHGAVWATDKVPTGALQFKFTVTGGYDGKTVWSKRVLPANWNSGRIYDAGVQITDIAQEGCDTCGHIWN

SEQ ID NO: 90784 - protein, 215 aa, Arabidopsis thaliana
  peptide (1)..(215): Ceres Seq. ID no. 12725265
  misc_feature (101)..(184): Pfam Name: Pollen allergen Pfam Description: Pollen allergen
  misc_feature (1)..(215): Homolog of NCBI NO: 20138389 NR Description: Expansin-like 3 precursor (At-EXPL3)
  misc_feature (1)..(215): Homolog of NCBI NO: 21555265 NR Description: Expansin-like 1 precursor (At-EXPL1)
  misc_feature (1)..(215): Homolog of NCBI NO: 15231303 NR Description: putative protein; protein id: At3g45970.1, by cDNA: 27534., supported by cDNA: gi_14190436, supported by
  misc_feature (1)..(215): Homolog of NCBI NO: 30692657 NR Description: expansin protein family (EXPL3) [Arabidopsis >gi|26449323|dbj|BAC41789.1| unknown protein [Arabidopsis
  misc_feature (1)..(215): Homolog of NCBI NO: 15233841 NR Description: putative pollen allergen; protein id: supported by cDNA: gi_14190354, supported by cDNA: gi_15215878
  misc_feature (1)..(210): Homolog of NCBI NO: 33111959 NR Description: expansin-like protein [Quercus robur]
  misc_feature (1)..(210): Homolog of NCBI NO: 37536544 NR Description: putative pollen allergen [Oryza sativa (japonica group)] >gi|10140765|gb|AAG13596.1| putative pollen allergen sativa] >gi|31433332|gb|AAP54861.1| putative pollen allergen
  misc_feature (1)..(214): Homolog of NCBI NO: 21654743 NR Description: expansin-like protein 1 [Oryza sativa]
  misc_feature (1)..(214): Homolog of NCBI NO: 20502989 NR Description: Putative pollen allergen [Oryza sativa (japonica
  misc_feature (1)..(214): Homolog of NCBI NO: 34901594 NR Description: P0571D04.11 [Oryza sativa (japonica
MATSFFAGHIAAAIPSIYKDGAGCGACFQVRCKNPKLCNSKGTIVMVTDLNTSNQTDLVLSSRAFRAMAKPVVGVDKYLLKQGIVDVEYQRVPCNYGKRNLNVRVEEASKKPNYLAIKLLYQGGQTEVVGIDIAPVGSSQWSYMSRSHGAVWATDKVPTGALQFKFTVTGGYDGKTVWSKRVLPANWNSGRIYDAGVQITDIAQEGCDTCGHIWN

SEQ ID NO: 90785 - protein, 170 aa, Arabidopsis thaliana
  peptide (1)..(170): Ceres Seq. ID no. 12725266
  misc_feature (56)..(139): Pfam Name: Pollen allergen Pfam Description: Pollen allergen
  misc_feature (1)..(170): Homolog of NCBI NO: 20138389 NR Description: Expansin-like 3 precursor (At-EXPL3)
  misc_feature (1)..(170): Homolog of NCBI NO: 21555265 NR Description: Expansin-like 1 precursor (At-EXPL1)
  misc_feature (1)..(170): Homolog of NCBI NO: 15231303 NR Description: putative protein; protein id: At3g45970.1, by cDNA: 27534., supported by cDNA: gi_14190436, supported by
  misc_feature (1)..(170): Homolog of NCBI NO: 30692657 NR Description: expansin protein family (EXPL3) [Arabidopsis >gi|26449323|dbj|BAC41789.1| unknown protein [Arabidopsis
  misc_feature (1)..(170): Homolog of NCBI NO: 15233841 NR Description: putative pollen allergen; protein id: supported by cDNA: gi_14190354, supported by cDNA: gi_15215878
  misc_feature (1)..(165): Homolog of NCBI NO: 33111959 NR Description: expansin-like protein [Quercus robur]
  misc_feature (1)..(165): Homolog of NCBI NO: 37536544 NR Description: putative pollen allergen [Oryza sativa (japonica group)] >gi|10140765|gb|AAG13596.1| putative pollen allergen sativa] >gi|31433332|gb|AAP54861.1| putative pollen allergen
  misc_feature (1)..(169): Homolog of NCBI NO: 21654743 NR Description: expansin-like protein 1 [Oryza sativa]
  misc_feature (1)..(169): Homolog of NCBI NO: 20502989 NR Description: Putative pollen allergen [Oryza sativa (japonica
  misc_feature (1)..(169): Homolog of NCBI NO: 34901594 NR Description: P0571D04.11 [Oryza sativa (japonica
MVTDLNTSNQTDLVLSSRAFRAMAKPVVGVDKYLLKQGIVDVEYQRVPCNYGKRNLNVRVEEASKKPNYLAIKLLYQGGQTEVVGIDIAPVGSSQWSYMSRSHGAVWATDKVPTGALQFKFTVTGGYDGKTVWSKRVLPANWNSGRIYDAGVQITDIAQEGCDTCGHIWN

SEQ ID NO: 90786 - DNA, 402 bp, Arabidopsis thaliana
  misc_feature (1)..(402): Ceres Seq. ID no. 12725267
  misc_feature: MA Experiment ID: 20000328 Result: Down-regulated in Transcription
  misc_feature: MA Experiment 20000328 PARAMETER Experiment Name: At_42deg_Heat_Sub_P Parameter: Age (day) Value: 14
  misc_feature: MA Experiment 20000328 PARAMETER Experiment Name: At_42deg_Heat_Sub_P Parameter: Organism Value: A. thaliana
  misc_feature: MA Experiment 20000328 PARAMETER Experiment Name: At_42deg_Heat_Sub_P Parameter: Plant Line Value: WS
  misc_feature: MA Experiment 20000328 PARAMETER Experiment Name: At_42deg_Heat_Sub_P Parameter: Temperature (deg C) Value: 42 vs. 22
  misc_feature: MA Experiment 20000328 PARAMETER Experiment Name: At_42deg_Heat_Sub_P Parameter: Timepoint (hr) Value: 6
  misc_feature: MA Experiment 20000328 PARAMETER Experiment Name: At_42deg_Heat_Sub_P Parameter: Tissue Value: Aerial
atggttttgcatgatgactgcaagctaacattcttggaactgaaggagagacgaacattccgttccatagtctacaagattgaggacaacatgcaagtgattgtagagaaacatcactacaaaaaaatgcatggcgaacgtgaacaatcatatgaggagtttgcaaacagtcttccagctgatgaatgccgatatgccattttggatatcgaattcgtcccaggggagagaaagatttgcttcatcgcgtggtctccatccactgccaagatgagaaagaagatgatttactcgagcactaaggataggttcaagagagaactagatggaattcaagtggagtttcacgcaactgatctaaccgatataagtcttgatgctatcagacgccgcatcaactaa

SEQ ID NO: 90787 - protein, 133 aa, Arabidopsis thaliana
  peptide (1)..(133): Ceres Seq. ID no. 12725268
  misc_feature (5)..(133): Pfam Name: Cofilin/tropomyosin-type actin-binding protein Pfam Description: Cofilin/tropomyosin-type actin-binding protein
  misc_feature (1)..(133): Homolog of NCBI NO: 15231305 NR Description: actin depolymerising like protein; protein id: [Arabidopsis thaliana] >gi|11276986|pir||T47539 actin
  misc_feature (1)..(133): Homolog of NCBI NO: 11276987 NR Description: actin depolymerizing factor 2 - Arabidopsis >gi|7339501|emb|CAB82824.1| actin depolymerizing factor 2 (ADF2)
  misc_feature (1)..(133): Homolog of NCBI NO: 18408116 NR Description: actin depolymerizing factor 2 (ADF2); protein id: supported by cDNA: 99657., supported by cDNA: gi_13877562, by cDNA: gi_1408472, supported by cDNA: gi_14423375 [Arabidopsis
  misc_feature (1)..(133): Homolog of NCBI NO: 30697300 NR Description: actin depolymerizing factor 4 - like protein
  misc_feature (1)..(133): Homolog of NCBI NO: 30697303 NR Description: actin depolymerizing factor 4 - like protein thaliana] >gi|15215859|gb|AAK91473.1| AT5g59890/mmn10_110 thaliana] >gi|19699262|gb|AAL90997.1| At1g05180/YUP8H12_21
  misc_feature (1)..(133): Homolog of NCBI NO: 15231309 NR Description: actin depolymerizing factor 1 (ADF1); protein id: supported by cDNA: 1907., supported by cDNA: gi_1408470, by cDNA: gi_14334961 [Arabidopsis thaliana]
  misc_feature (1)..(131): Homolog of NCBI NO: 17366765 NR Description: Actin-depolymerizing factor 2 (ADF 2)
  misc_feature (1)..(133): Homolog of NCBI NO: 30697295 NR Description: actin depolymerizing factor 3 - like protein
  misc_feature (1)..(133): Homolog of NCBI NO: 4185511 NR Description: actin depolymerizing factor 4 [Arabidopsis
  misc_feature (1)..(133): Homolog of NCBI NO: 17366768 NR Description: Actin-depolymerizing factor 1 (ADF 1)
MVLHDDCKLTFLELKERRTFRSIVYKIEDNMQVIVEKHHYKKMHGEREQSYEEFANSLPADECRYAILDIEFVPGERKICFIAWSPSTAKMRKKMIYSSTKDRFKRELDGIQVEFHATDLTDISLDAIRRRIN

SEQ ID NO: 90788 - protein, 103 aa, Arabidopsis thaliana
  peptide (1)..(103): Ceres Seq. ID no. 12725269
  misc_feature (1)..(103): Pfam Name: Cofilin/tropomyosin-type actin-binding protein Pfam Description: Cofilin/tropomyosin-type actin-binding protein
  misc_feature (1)..(103): Homolog of NCBI NO: 15231305 NR Description: actin depolymerising like protein; protein id: [Arabidopsis thaliana] >gi|11276986|pir||T47539 actin
  misc_feature (1)..(103): Homolog of NCBI NO: 11276987 NR Description: actin depolymerizing factor 2 - Arabidopsis >gi|7339501|emb|CAB82824.1| actin depolymerizing factor 2 (ADF2)
  misc_feature (1)..(103): Homolog of NCBI NO: 18408116 NR Description: actin depolymerizing factor 2 (ADF2); protein id: supported by cDNA: 99657., supported by cDNA: gi_13877562, by cDNA: gi_1408472, supported by cDNA: gi_14423375 [Arabidopsis
  misc_feature (1)..(103): Homolog of NCBI NO: 30697300 NR Description: actin depolymerizing factor 4 - like protein
  misc_feature (1)..(103): Homolog of NCBI NO: 30697303 NR Description: actin depolymerizing factor 4 - like protein thaliana] >gi|15215859|gb|AAK91473.1| AT5g59890/mmn10_110 thaliana] >gi|19699262|gb|AAL90997.1| At1g05180/YUP8H12_21
  misc_feature (1)..(103): Homolog of NCBI NO: 15231309 NR Description: actin depolymerizing factor 1 (ADF1); protein id: supported by cDNA: 1907., supported by cDNA: gi_1408470, by cDNA: gi_14334961 [Arabidopsis thaliana]
  misc_feature (1)..(101): Homolog of NCBI NO: 17366765 NR Description: Actin-depolymerizing factor 2 (ADF 2)
  misc_feature (1)..(103): Homolog of NCBI NO: 30697295 NR Description: actin depolymerizing factor 3 - like protein
  misc_feature (1)..(103): Homolog of NCBI NO: 4185511 NR Description: actin depolymerizing factor 4 [Arabidopsis
  misc_feature (1)..(103): Homolog of NCBI NO: 17366768 NR Description: Actin-depolymerizing factor 1 (ADF 1)
MQVIVEKHHYKKMHGEREQSYEEFANSLPADECRYAILDIEFVPGERKICFIAWSPSTAKMRKKMIYSSTKDRFKRELDGIQVEFHATDLTDISLDAIRRRIN

SEQ ID NO: 90789 - protein, 91 aa, Arabidopsis thaliana
  peptide (1)..(91): Ceres Seq. ID no. 12725270
  misc_feature (1)..(91): Pfam Name: Cofilin/tropomyosin-type actin-binding protein Pfam Description: Cofilin/tropomyosin-type actin-binding protein
  misc_feature (1)..(91): Homolog of NCBI NO: 15231305 NR Description: actin depolymerising like protein; protein id: [Arabidopsis thaliana] >gi|11276986|pir||T47539 actin
  misc_feature (1)..(91): Homolog of NCBI NO: 11276987 NR Description: actin depolymerizing factor 2 - Arabidopsis >gi|7339501|emb|CAB82824.1| actin depolymerizing factor 2 (ADF2)
  misc_feature (1)..(91): Homolog of NCBI NO: 18408116 NR Description: actin depolymerizing factor 2 (ADF2); protein id: supported by cDNA: 99657., supported by cDNA: gi_13877562, by cDNA: gi_1408472, supported by cDNA: gi_14423375 [Arabidopsis
  misc_feature (1)..(91): Homolog of NCBI NO: 30697300 NR Description: actin depolymerizing factor 4 - like protein
  misc_feature (1)..(91): Homolog of NCBI NO: 30697303 NR Description: actin depolymerizing factor 4 - like protein thaliana] >gi|15215859|gb|AAK91473.1| AT5g59890/mmn10_110 thaliana] >gi|19699262|gb|AAL90997.1| At1g05180/YUP8H12_21
  misc_feature (1)..(91): Homolog of NCBI NO: 15231309 NR Description: actin depolymerizing factor 1 (ADF1); protein id: supported by cDNA: 1907., supported by cDNA: gi_1408470, by cDNA: gi_14334961 [Arabidopsis thaliana]
  misc_feature (1)..(89): Homolog of NCBI NO: 17366765 NR Description: Actin-depolymerizing factor 2 (ADF 2)
  misc_feature (1)..(91): Homolog of NCBI NO: 30697295 NR Description: actin depolymerizing factor 3 - like protein
  misc_feature (1)..(91): Homolog of NCBI NO: 4185511 NR Description: actin depolymerizing factor 4 [Arabidopsis
  misc_feature (1)..(91): Homolog of NCBI NO: 17366768 NR Description: Actin-depolymerizing factor 1 (ADF 1)
MHGEREQSYEEFANSLPADECRYAILDIEFVPGERKICFIAWSPSTAKMRKKMIYSSTKDRFKRELDGIQVEFHATDLTDISLDAIRRRIN

SEQ ID NO: 90790 - DNA, 867 bp, Arabidopsis thaliana
  misc_feature (1)..(867): Ceres Seq. ID no. 12725283
  misc_feature: MA Experiment ID: 108461 Result: Up-regulated in Transcription
  misc_feature: MA Experiment 108461 PARAMETER Experiment Name: At_Germinating_Seeds_cDNA_P Parameter: Age (day) Value: 1 vs. 0
  misc_feature: MA Experiment 108461 PARAMETER Experiment Name: At_Germinating_Seeds_cDNA_P Parameter: Tissue Value: Germinating Seeds
  misc_feature: MA Experiment ID: 108462 Result: Up-regulated in Transcription
  misc_feature: MA Experiment 108462 PARAMETER Experiment Name: At_Germinating_Seeds_cDNA_P Parameter: Age (day) Value: 2 vs. 0
  misc_feature: MA Experiment 108462 PARAMETER Experiment Name: At_Germinating_Seeds_cDNA_P Parameter: Tissue Value: Germinating Seeds
  misc_feature: MA Experiment ID: 108463 Result: Up-regulated in Transcription
  misc_feature: MA Experiment 108463 PARAMETER Experiment Name: At_Germinating_Seeds_cDNA_P Parameter: Age (day) Value: 3 vs. 0
  misc_feature: MA Experiment 108463 PARAMETER Experiment Name: At_Germinating_Seeds_cDNA_P Parameter: Tissue Value: Germinating Seeds
  misc_feature: MA Experiment ID: 108464 Result: Up-regulated in Transcription
  misc_feature: MA Experiment 108464 PARAMETER Experiment Name: At_Germinating_Seeds_cDNA_P Parameter: Age (day) Value: 4 vs. 0
  misc_feature: MA Experiment 108464 PARAMETER Experiment Name: At_Germinating_Seeds_cDNA_P Parameter: Tissue Value: Germinating Seeds
  misc_feature: MA Experiment ID: 108569 Result: Up-regulated in Transcription
  misc_feature: MA Experiment 108569 PARAMETER Experiment Name: At_0.001%_MeJA__cDNA_P Parameter: Timepoint (hr) Value: 6
  misc_feature: MA Experiment 108569 PARAMETER Experiment Name: At_0.001%_MeJA__cDNA_P Parameter: Tissue Value: Aerial
  misc_feature: MA Experiment 108569 PARAMETER Experiment Name: At_0.001%_MeJA__cDNA_P Parameter: Treatment Value: 0.001% MeJA vs. No Treatment
  misc_feature: MA Experiment ID: 108572 Result: Up-regulated in Transcription
  misc_feature: MA Experiment 108572 PARAMETER Experiment Name: At_Drought_cDNA_P Parameter: Timepoint (hr) Value: 1
  misc_feature: MA Experiment 108572 PARAMETER Experiment Name: At_Drought_cDNA_P Parameter: Tissue Value: Aerial
  misc_feature: MA Experiment 108572 PARAMETER Experiment Name: At_Drought_cDNA_P Parameter: Treatment Value: Drought vs. No Drought
  misc_feature: MA Experiment ID: 108605 Result: Up-regulated in Transcription
  misc_feature: MA Experiment 108605 PARAMETER Experiment Name: At_100uM_ABA_cDNA_P Parameter: Timepoint (hr) Value: 6
  misc_feature: MA Experiment 108605 PARAMETER Experiment Name: At_100uM_ABA_cDNA_P Parameter: Tissue Value: Aerial
  misc_feature: MA Experiment 108605 PARAMETER Experiment Name: At_100uM_ABA_cDNA_P Parameter: Treatment Value: 100uM ABA vs. No Treatment
  misc_feature: MA Experiment ID: 108607 Result: Up-regulated in Transcription
  misc_feature: MA Experiment 108607 PARAMETER Experiment Name: At_100uM_ABA_cDNA_P Parameter: Timepoint (hr) Value: 4
  misc_feature: MA Experiment 108607 PARAMETER Experiment Name: At_100uM_ABA_cDNA_P Parameter: Tissue Value: Aerial
  misc_feature: MA Experiment 108607 PARAMETER Experiment Name: At_100uM_ABA_cDNA_P Parameter: Treatment Value: 100uM ABA vs. No Treatment
  misc_feature: MA Experiment ID: 108609 Result: Up-regulated in Transcription
  misc_feature: MA Experiment 108609 PARAMETER Experiment Name: At_100uM_ABA_cDNA_P Parameter: Timepoint (hr) Value: 24
  misc_feature: MA Experiment 108609 PARAMETER Experiment Name: At_100uM_ABA_cDNA_P Parameter: Tissue Value: Aerial
  misc_feature: MA Experiment 108609 PARAMETER Experiment Name: At_100uM_ABA_cDNA_P Parameter: Treatment Value: 100uM ABA vs. No Treatment
  misc_feature: MA Experiment ID: 20000069 Result: Up-regulated in Transcription
  misc_feature: MA Experiment 20000069 PARAMETER Experiment Name: At_100uM_ABA_Mutants_cDNA_P Parameter: Plant Line Value: CS23
  misc_feature: MA Experiment 20000069 PARAMETER Experiment Name: At_100uM_ABA_Mutants_cDNA_P Parameter: Timepoint (hr) Value: 6
  misc_feature: MA Experiment 20000069 PARAMETER Experiment Name: At_100uM_ABA_Mutants_cDNA_P Parameter: Tissue Value: Aerial
  misc_feature: MA Experiment 20000069 PARAMETER Experiment Name: At_100uM_ABA_Mutants_cDNA_P Parameter: Treatment Value: 100uM ABA vs. No Treatment
  misc_feature: MA Experiment ID: 20000070 Result: Up-regulated in Transcription
  misc_feature: MA Experiment 20000070 PARAMETER Experiment Name: At_100uM_ABA_Mutants_cDNA_P Parameter: Plant Line Value: CS24
  misc_feature: MA Experiment 20000070 PARAMETER Experiment Name: At_100uM_ABA_Mutants_cDNA_P Parameter: Timepoint (hr) Value: 6
  misc_feature: MA Experiment 20000070 PARAMETER Experiment Name: At_100uM_ABA_Mutants_cDNA_P Parameter: Tissue Value: Aerial
  misc_feature: MA Experiment 20000070 PARAMETER Experiment Name: At_100uM_ABA_Mutants_cDNA_P Parameter: Treatment Value: 100uM ABA vs. No Treatment
  misc_feature: MA Experiment ID: 20000071 Result: Up-regulated in Transcription
  misc_feature: MA Experiment 20000071 PARAMETER Experiment Name: At_100uM_ABA_Mutants_cDNA_P Parameter: Plant Line Value: CS8104
  misc_feature: MA Experiment 20000071 PARAMETER Experiment Name: At_100uM_ABA_Mutants_cDNA_P Parameter: Timepoint (hr) Value: 6
  misc_feature: MA Experiment 20000071 PARAMETER Experiment Name: At_100uM_ABA_Mutants_cDNA_P Parameter: Tissue Value: Aerial
  misc_feature: MA Experiment 20000071 PARAMETER Experiment Name: At_100uM_ABA_Mutants_cDNA_P Parameter: Treatment Value: 100uM ABA vs. No Treatment
  misc_feature: MA Experiment ID: 20000072 Result: Up-regulated in Transcription
  misc_feature: MA Experiment 20000072 PARAMETER Experiment Name: At_100uM_ABA_Mutants_cDNA_P Parameter: Plant Line Value: CS8105
  misc_feature: MA Experiment 20000072 PARAMETER Experiment Name: At_100uM_ABA_Mutants_cDNA_P Parameter: Timepoint (hr) Value: 6
  misc_feature: MA Experiment 20000072 PARAMETER Experiment Name: At_100uM_ABA_Mutants_cDNA_P Parameter: Tissue Value: Aerial
  misc_feature: MA Experiment 20000072 PARAMETER Experiment Name: At_100uM_ABA_Mutants_cDNA_P Parameter: Treatment Value: 100uM ABA vs. No Treatment
  misc_feature: MA Experiment ID: 20000087 Result: Up-regulated in Transcription
  misc_feature: MA Experiment 20000087 PARAMETER Experiment Name: At_100uM_ABA_Mutants_cDNA_P Parameter: Plant Line Value: WS
  misc_feature: MA Experiment 20000087 PARAMETER Experiment Name: At_100uM_ABA_Mutants_cDNA_P Parameter: Timepoint (hr) Value: 6
  misc_feature: MA Experiment 20000087 PARAMETER Experiment Name: At_100uM_ABA_Mutants_cDNA_P Parameter: Tissue Value: Aerial
  misc_feature: MA Experiment 20000087 PARAMETER Experiment Name: At_100uM_ABA_Mutants_cDNA_P Parameter: Treatment Value: 100uM ABA vs. No Treatment
  misc_feature: MA Experiment ID: 20000088 Result: Up-regulated in Transcription
  misc_feature: MA Experiment 20000088 PARAMETER Experiment Name: At_100uM_ABA_Mutants_cDNA_P Parameter: Plant Line Value: Landsberg
  misc_feature: MA Experiment 20000088 PARAMETER Experiment Name: At_100uM_ABA_Mutants_cDNA_P Parameter: Timepoint (hr) Value: 6
  misc_feature: MA Experiment 20000088 PARAMETER Experiment Name: At_100uM_ABA_Mutants_cDNA_P Parameter: Tissue Value: Aerial
  misc_feature: MA Experiment 20000088 PARAMETER Experiment Name: At_100uM_ABA_Mutants_cDNA_P Parameter: Treatment Value: 100uM ABA vs. No Treatment
atgagcaatcatcaaactttgacttttgtttttggagagaaggaggtgttgaagcaattggagccgtggtgtgaacttaaagacaaagtggttcttgtgacaggagcttcctctggtataggaagagagatctgtcttgatctaggcaaagctggttgtaagattattgcagtagctcgtcgtgtcgatcgtctcaactctctctgctctgaaatcaacagctccagttcaactggaatccaagccgcggctcttaagctagacgttacatcagacgcagccaccattcaaaaagtggttcagggagcttggggaatctttggaaagatcgatgcgttgatcaacaatgccgggatcagaggcaatgtcaagtcgagtttggatttgtcaaaggaagaatgggacaacgtcttcaagaccaacttaacgggaccttggttagtatctaaatatgtttgtgttctaatgcgtgatgctaaactaggtggctcggtgataaacatctcatcgattgccgggattcgcggtatattgcccggtgcacttgcatatgcttgttccaaaataggtgttgataccatgtcaaagatgatggcagttgagttaggtgtgcacaagatcagagtgaactcgattgcgcccgggattttcaagtcagagatcacacaaggtcttatgcaaaaggagtggttcaagaatgtgaccgagaggactgtaccattaaagctgcaacagaccgttgatccagggataacttctctcgtacgctatctcatccatgactcttctcaatatatatccgggaatacatatattgttgattccggagctacattgcccggtgtgcccatcttttcatctctctga

SEQ ID NO: 90791 - protein, 288 aa, Arabidopsis thaliana
  peptide (1)..(288): Ceres Seq. ID no. 12725284
  misc_feature (1)..(288): Homolog of NCBI NO: 15231362 NR Description: dehydrogenase -like protein; protein id:
  misc_feature (1)..(288): Homolog of NCBI NO: 18410245 NR Description: oxidoreductase -like protein; protein id: supported by cDNA: gi_15028304, supported by cDNA: gi_19310684 thaliana] >gi|15028305|gb|AAK76629.1| putative oxidoreductase
  misc_feature (16)..(288): Homolog of NCBI NO: 11250516 NR Description: oxidoreductase-like protein - Arabidopsis thaliana
  misc_feature (16)..(288): Homolog of NCBI NO: 15233243 NR Description: beta-ketoacyl-ACP reductase - like protein;
  misc_feature (9)..(288): Homolog of NCBI NO: 15221517 NR Description: similar to glucose 1-dehydrogenase (AB000617);
  misc_feature (9)..(288): Homolog of NCBI NO: 15222406 NR Description: reductase, putative; protein id: At1g63380.1
  misc_feature (1)..(288): Homolog of NCBI NO: 18398539 NR Description: similar to oxidoreductase -like protein; protein
  misc_feature (17)..(288): Homolog of NCBI NO: 13549123 NR Description: putative short-chain type alcohol dehydrogenase
  misc_feature (17)..(288): Homolog of NCBI NO: 23451057 NR Description: putative short-chain type alcohol dehydrogenase
  misc_feature (14)..(288): Homolog of NCBI NO: 28411870 NR Description: putative 3-ketoacyl-acyl carrier protein
MSNHQTLTFVFGEKEVLKQLEPWCELKDKVVLVTGASSGIGREICLDLGKAGCKIIAVARRVDRLNSLCSEINSSSSTGIQAAALKLDVTSDAATIQKVVQGAWGIFGKIDALINNAGIRGNVKSSLDLSKEEWDNVFKTNLTGPWLVSKYVCVLMRDAKLGGSVINISSIAGIRGILPGALAYACSKIGVDTMSKMMAVELGVHKIRVNSIAPGIFKSEITQGLMQKEWFKNVTERTVPLKLQQTVDPGITSLVRYLIHDSSQYISGNTYIVDSGATLPGVPIFSSL

SEQ ID NO: 90792 - DNA, 1339 bp, Arabidopsis thaliana
  misc_feature (1)..(1339): Ceres Seq. ID no. 12725320
  misc_feature: MA Experiment ID: 108573 Result: Up-regulated in Transcription
  misc_feature: MA Experiment 108573 PARAMETER Experiment Name: At_Drought_cDNA_P Parameter: Timepoint (hr) Value: 6
  misc_feature: MA Experiment 108573 PARAMETER Experiment Name: At_Drought_cDNA_P Parameter: Tissue Value: Aerial
  misc_feature: MA Experiment 108573 PARAMETER Experiment Name: At_Drought_cDNA_P Parameter: Treatment Value: Drought vs. No Drought
  misc_feature: MA Experiment ID: 20000069 Result: Up-regulated in Transcription
  misc_feature: MA Experiment 20000069 PARAMETER Experiment Name: At_100uM_ABA_Mutants_cDNA_P Parameter: Plant Line Value: CS23
  misc_feature: MA Experiment 20000069 PARAMETER Experiment Name: At_100uM_ABA_Mutants_cDNA_P Parameter: Timepoint (hr) Value: 6
  misc_feature: MA Experiment 20000069 PARAMETER Experiment Name: At_100uM_ABA_Mutants_cDNA_P Parameter: Tissue Value: Aerial
  misc_feature: MA Experiment 20000069 PARAMETER Experiment Name: At_100uM_ABA_Mutants_cDNA_P Parameter: Treatment Value: 100uM ABA vs. No Treatment
  misc_feature: MA Experiment ID: 20000070 Result: Up-regulated in Transcription
  misc_feature: MA Experiment 20000070 PARAMETER Experiment Name: At_100uM_ABA_Mutants_cDNA_P Parameter: Plant Line Value: CS24
  misc_feature: MA Experiment 20000070 PARAMETER Experiment Name: At_100uM_ABA_Mutants_cDNA_P Parameter: Timepoint (hr) Value: 6
  misc_feature: MA Experiment 20000070 PARAMETER Experiment Name: At_100uM_ABA_Mutants_cDNA_P Parameter: Tissue Value: Aerial
  misc_feature: MA Experiment 20000070 PARAMETER Experiment Name: At_100uM_ABA_Mutants_cDNA_P Parameter: Treatment Value: 100uM ABA vs. No Treatment
  misc_feature: MA Experiment ID: 20000071 Result: Up-regulated in Transcription
  misc_feature: MA Experiment 20000071 PARAMETER Experiment Name: At_100uM_ABA_Mutants_cDNA_P Parameter: Plant Line Value: CS8104
  misc_feature: MA Experiment 20000071 PARAMETER Experiment Name: At_100uM_ABA_Mutants_cDNA_P Parameter: Timepoint (hr) Value: 6
  misc_feature: MA Experiment 20000071 PARAMETER Experiment Name: At_100uM_ABA_Mutants_cDNA_P Parameter: Tissue Value: Aerial
  misc_feature: MA Experiment 20000071 PARAMETER Experiment Name: At_100uM_ABA_Mutants_cDNA_P Parameter: Treatment Value: 100uM ABA vs. No Treatment
  misc_feature: MA Experiment ID: 20000090 Result: Up-regulated in Transcription
  misc_feature: MA Experiment ID: 20000113 Result: Down-regulated in Transcription
  misc_feature: MA Experiment 20000113 PARAMETER Experiment Name: At_42deg_Heat_cDNA_P Parameter: Temperature (deg C) Value: 42 vs. 22
  misc_feature: MA Experiment 20000113 PARAMETER Experiment Name: At_42deg_Heat_cDNA_P Parameter: Timepoint (hr) Value: 8
  misc_feature: MA Experiment 20000113 PARAMETER Experiment Name: At_42deg_Heat_cDNA_P Parameter: Tissue Value: Aerial
  misc_feature: MA Experiment ID: 20000117 Result: Up-regulated in Transcription
  misc_feature: MA Experiment 20000117 PARAMETER Experiment Name: At_100uM_ABA_Mutants_cDNA_P Parameter: Plant Line Value: Columbia
  misc_feature: MA Experiment 20000117 PARAMETER Experiment Name: At_100uM_ABA_Mutants_cDNA_P Parameter: Timepoint (hr) Value: 6
  misc_feature: MA Experiment 20000117 PARAMETER Experiment Name: At_100uM_ABA_Mutants_cDNA_P Parameter: Tissue Value: Aerial
  misc_feature: MA Experiment 20000117 PARAMETER Experiment Name: At_100uM_ABA_Mutants_cDNA_P Parameter: Treatment Value: 100uM ABA vs. No Treatment
  misc_feature: MA Experiment ID: 20000179 Result: Up-regulated in Transcription
  misc_feature: MA Experiment 20000179 PARAMETER Experiment Name: At_Germinating_Seeds_P Parameter: Age (hr) Value: 6 vs. 0
  misc_feature: MA Experiment 20000179 PARAMETER Experiment Name: At_Germinating_Seeds_P Parameter: Tissue Value: Germinating Seeds
  misc_feature: MA Experiment ID: 20000184 Result: Down-regulated in Transcription
  misc_feature: MA Experiment 20000184 PARAMETER Experiment Name: At_Shoots__P Parameter: Age (day) Value: 7
  misc_feature: MA Experiment 20000184 PARAMETER Experiment Name: At_Shoots__P Parameter: Tissue Value: Shoots vs. Whole Plant
  misc_feature: MA Experiment ID: 20000264 Result: Down-regulated in Transcription
  misc_feature: MA Experiment 20000264 PARAMETER Experiment Name: At_Open_Flower_P Parameter: Age (day) Value: 21
  misc_feature: MA Experiment 20000264 PARAMETER Experiment Name: At_Open_Flower_P Parameter: Plant Line Value: WS
  misc_feature: MA Experiment 20000264 PARAMETER Experiment Name: At_Open_Flower_P Parameter: Tissue Value: Open Flower vs. Whole Plant
  misc_feature: MA Experiment ID: 20000265 Result: Down-regulated in Transcription
  misc_feature: MA Experiment 20000265 PARAMETER Experiment Name: At_Open_Flower_P Parameter: Age (day) Value: 21
  misc_feature: MA Experiment 20000265 PARAMETER Experiment Name: At_Open_Flower_P Parameter: Plant Line Value: WS
  misc_feature: MA Experiment 20000265 PARAMETER Experiment Name: At_Open_Flower_P Parameter: Tissue Value: Closed Flower vs. Whole Plant
  misc_feature: MA Experiment ID: 20000286 Result: Down-regulated in Transcription
  misc_feature: MA Experiment 20000286 PARAMETER Experiment Name: At_Open_Flower_P Parameter: Age (day) Value: 21
  misc_feature: MA Experiment 20000286 PARAMETER Experiment Name: At_Open_Flower_P Parameter: Plant Line Value: WS
  misc_feature: MA Experiment 20000286 PARAMETER Experiment Name: At_Open_Flower_P Parameter: Tissue Value: Half Open vs. Whole Plant
  misc_feature: MA Experiment ID: 20000438 Result: Down-regulated in Transcription
  misc_feature: MA Experiment 20000438 PARAMETER Experiment Name: At_Shoots__P Parameter: Age (day) Value: 14
  misc_feature: MA Experiment 20000438 PARAMETER Experiment Name: At_Shoots__P Parameter: Tissue Value: Shoots vs. Whole Plant
  misc_feature: MA Experiment ID: 20000794 Result: Down-regulated in Transcription
  misc_feature: MA Experiment 20000794 PARAMETER Experiment Name: At_Petals_P Parameter: Age (day) Value: 23-25 days
  misc_feature: MA Experiment 20000794 PARAMETER Experiment Name: At_Petals_P Parameter: Plant Line Value: WS
  misc_feature: MA Experiment 20000794 PARAMETER Experiment Name: At_Petals_P Parameter: Tissue Value: Petals vs. Whole plant
  misc_feature: MA Experiment ID: 20001451 Result: Down-regulated in Transcription
  misc_feature: MA Experiment 20001451 PARAMETER Experiment Name: At_Far-red-induction_P Parameter: Age (day) Value: 7
  misc_feature: MA Experiment 20001451 PARAMETER Experiment Name: At_Far-red-induction_P Parameter: Light Value: Far-red vs. White
  misc_feature: MA Experiment 20001451 PARAMETER Experiment Name: At_Far-red-induction_P Parameter: Organism Value: A. thaliana
  misc_feature: MA Experiment 20001451 PARAMETER Experiment Name: At_Far-red-induction_P Parameter: Plant Line Value: Columbia
  misc_feature: MA Experiment 20001451 PARAMETER Experiment Name: At_Far-red-induction_P Parameter: Timepoint (hr) Value: 24
  misc_feature: MA Experiment 20001451 PARAMETER Experiment Name: At_Far-red-induction_P Parameter: Tissue Value: Whole Plant
  misc_feature: MA Experiment ID: 20001905 Result: Up-regulated in Transcription
  misc_feature: MA Experiment 20001905 PARAMETER Experiment Name: At_Drought_Reproduction_P Parameter: Age (day) Value: 40
  misc_feature: MA Experiment 20001905 PARAMETER Experiment Name: At_Drought_Reproduction_P Parameter: Organism Value: A. thaliana
  misc_feature: MA Experiment 20001905 PARAMETER Experiment Name: At_Drought_Reproduction_P Parameter: Plant Line Value: WS
  misc_feature: MA Experiment 20001905 PARAMETER Experiment Name: At_Drought_Reproduction_P Parameter: Timepoint (day) Value: 10
  misc_feature: MA Experiment 20001905 PARAMETER Experiment Name: At_Drought_Reproduction_P Parameter: Tissue Value: Rosettes
  misc_feature: MA Experiment 20001905 PARAMETER Experiment Name: At_Drought_Reproduction_P Parameter: Treatment Value: Drought vs. No Drought
agttcccgacacttgtgagagactataaaagtatacgatctcctcctctcgctctcttcagatcacaaagttttcgtttttagggttctctcatcgatctcggtttgtgatcttcttcttcatcaatggcgtctagtgataaacaaacaagcccaaagcctcctccttcaccgtctcctctccgtaattccaagttttgtcagtcaaatatgaggattttgatctcaggaggagctggattcattggttctcaccttgttgataagctgatggaaaacgaaaagaatgaggtgattgttgctgataactatttcactggttcaaaggacaaccttaagaagtggattggtcatccaagatttgagcttatccgtcacgatgtcacggagccacttttgatcgaggttgatcagatttaccatcttgcatgtcctgcttctcctatcttctacaagtacaaccctgtgaagacaatcaagaccaatgtgattggcacactgaacatgctaggtctcgccaagcgtgttggagcaaggattttgcttacctcaacctcggaggtatatggagatcctctcattcatccccagcctgagagctattggggaaatgtcaacccaattggtgttaggagctgttatgatgaaggcaagcgtgttgctgagaccttgatgtttgactaccacaggcaacatggaattgaaatccgcattgctagaatcttcaacacttatggtccacgcatgaacatcgatgatggccgtgttgtaagcaacttcattgcacaagcactccggggtgaggcattgactgttcagaaaccagggacacagactcgcagtttctgttatgtatctgacatggttgatggacttatgcgcctcatggaaggagatgacactggtcccatcaacatcggtaacccaggtgagtttacaatggtggagttggctgagacagtgaaagagctgattaacccgagcatagagataaagatggttgagaacacaccggatgatccaagacagaggaagccagacatcacaaaggctaaagaagtgttgggatgggaaccaaaggtgaagcttcgtgaaggccttccacttatggaagaagacttcaggctaaggctcggagtccacaagaactaaaactccatcaccgatcacacgcaaacgtgaatgcactacataaccaagttctacttttcatattccatggtgcaagcggttggtttcatataatatgtttctactttccacagtcgaaattattcctagagaaaaataaagattatgaacgaatgctttttatatttaaggaagataaaatttacttt

SEQ ID NO: 90793 - protein, 341 aa, Arabidopsis thaliana; identical to SEQ ID NO: 21850
  peptide (1)..(341): Ceres Seq. ID no. 12725321
  misc_feature (31)..(337): Pfam Name: NAD dependent epimerase/dehydratase family Pfam Description: NAD dependent epimerase/dehydratase family
  misc_feature (1)..(341): Homolog of NCBI NO: 15231432 NR Description: dTDP-glucose 4-6-dehydratases-like protein; id: At3g46440.1, supported by cDNA: 31901., supported by cDNA:
  misc_feature (2)..(341): Homolog of NCBI NO: 15237853 NR Description: dTDP-glucose 4-6-dehydratase - like protein; id: At5g59290.1, supported by cDNA: 6701., supported by cDNA: supported by cDNA: gi_14595665, supported by cDNA: gi_20334715
  misc_feature (2)..(341): Homolog of NCBI NO: 14030703 NR Description: AT5g59290/mnc17_180 [Arabidopsis thaliana]
  misc_feature (3)..(340): Homolog of NCBI NO: 15226950 NR Description: putative nucleotide-sugar dehydratase; protein At2g28760.1, supported by cDNA: gi_20466473 [Arabidopsis
  misc_feature (1)..(341): Homolog of NCBI NO: 13591616 NR Description: UDP-D-glucuronate carboxy-lyase [Pisum sativum]
  misc_feature (1)..(340): Homolog of NCBI NO: 11270075 NR Description: dTDPglucose 4,6-dehydratase (EC 4.2.1.46)
  misc_feature (3)..(340): Homolog of NCBI NO: 18447934 NR Description: UDP-glucuronic acid decarboxylase [Oryza sativa
  misc_feature (3)..(340): Homolog of NCBI NO: 11121508 NR Description: d-TDP-glucose dehydratase [Phragmites australis]
  misc_feature (78)..(341): Homolog of NCBI NO: 2351580 NR Description: thymidine diphospho-glucose 4-6-dehydratase
  misc_feature (29)..(341): Homolog of NCBI NO: 15227109 NR Description: putative dTDP-glucose 4-6-dehydratase; protein id:

SEQ ID NO: 90794 - protein, 313 aa, Arabidopsis thaliana; identical to SEQ ID NO: 21851
  peptide (1)..(313): Ceres Seq. ID no. 12725322
  misc_feature (3)..(309): Pfam Name: NAD dependent epimerase/dehydratase family Pfam Description: NAD dependent epimerase/dehydratase family
  misc_feature (1)..(313): Homolog of NCBI NO: 15231432 NR Description: dTDP-glucose 4-6-dehydratases-like protein; id: At3g46440.1, supported by cDNA: 31901., supported by cDNA:
  misc_feature (1)..(313): Homolog of NCBI NO: 15237853 NR Description: dTDP-glucose 4-6-dehydratase - like protein; id: At5g59290.1, supported by cDNA: 6701., supported by cDNA: supported by cDNA: gi_14595665, supported by cDNA: gi_20334715
  misc_feature (1)..(313): Homolog of NCBI NO: 14030703 NR Description: AT5g59290/mnc17_180 [Arabidopsis thaliana]
  misc_feature (1)..(312): Homolog of NCBI NO: 15226950 NR Description: putative nucleotide-sugar dehydratase; protein At2g28760.1, supported by cDNA: gi_20466473 [Arabidopsis
  misc_feature (1)..(313): Homolog of NCBI NO: 13591616 NR Description: UDP-D-glucuronate carboxy-lyase [Pisum sativum]
  misc_feature (1)..(312): Homolog of NCBI NO: 11270075 NR Description: dTDPglucose 4,6-dehydratase (EC 4.2.1.46)
  misc_feature (1)..(312): Homolog of NCBI NO: 18447934 NR Description: UDP-glucuronic acid decarboxylase [Oryza sativa
  misc_feature (1)..(312): Homolog of NCBI NO: 11121508 NR Description: d-TDP-glucose dehydratase [Phragmites australis]
  misc_feature (50)..(313): Homolog of NCBI NO: 2351580 NR Description: thymidine diphospho-glucose 4-6-dehydratase
  misc_feature (1)..(313): Homolog of NCBI NO: 15227109 NR Description: putative dTDP-glucose 4-6-dehydratase; protein id:

SEQ ID NO: 90795 - protein, 293 aa, Arabidopsis thaliana; identical to SEQ ID NO: 21852
  peptide (1)..(293): Ceres Seq. ID no. 12725323
  misc_feature (1)..(289): Pfam Name: NAD dependent epimerase/dehydratase family Pfam Description: NAD dependent epimerase/dehydratase family
  misc_feature (1)..(293): Homolog of NCBI NO: 15231432 NR Description: dTDP-glucose 4-6-dehydratases-like protein; id: At3g46440.1, supported by cDNA: 31901., supported by cDNA:
  misc_feature (1)..(293): Homolog of NCBI NO: 15237853 NR Description: dTDP-glucose 4-6-dehydratase - like protein; id: At5g59290.1, supported by cDNA: 6701., supported by cDNA: supported by cDNA: gi_14595665, supported by cDNA: gi_20334715
  misc_feature (1)..(293): Homolog of NCBI NO: 14030703 NR Description: AT5g59290/mnc17_180 [Arabidopsis thaliana]
  misc_feature (1)..(292): Homolog of NCBI NO: 15226950 NR Description: putative nucleotide-sugar dehydratase; protein At2g28760.1, supported by cDNA: gi_20466473 [Arabidopsis
  misc_feature (1)..(293): Homolog of NCBI NO: 13591616 NR Description: UDP-D-glucuronate carboxy-lyase [Pisum sativum]
  misc_feature (1)..(292): Homolog of NCBI NO: 11270075 NR Description: dTDPglucose 4,6-dehydratase (EC 4.2.1.46)
  misc_feature (1)..(292): Homolog of NCBI NO: 18447934 NR Description: UDP-glucuronic acid decarboxylase [Oryza sativa
  misc_feature (1)..(292): Homolog of NCBI NO: 11121508 NR Description: d-TDP-glucose dehydratase [Phragmites australis]
  misc_feature (30)..(293): Homolog of NCBI NO: 2351580 NR Description: thymidine diphospho-glucose 4-6-dehydratase
  misc_feature (1)..(293): Homolog of NCBI NO: 15227109 NR Description: putative dTDP-glucose 4-6-dehydratase; protein id:

SEQ ID NO: 90796 - DNA, 894 bp, Arabidopsis thaliana
  misc_feature (1)..(894): Ceres Seq. ID no. 12725328
  misc_feature: MA Experiment ID: 20000227 Result: Down-regulated in Transcription
  misc_feature: MA Experiment 20000227 PARAMETER Experiment Name: At_Root-Tips-vs-Tops_P Parameter: Tissue Value: Root Tips vs. Root Tops
  misc_feature: MA Experiment ID: 20000451 Result: Down-regulated in Transcription
  misc_feature: MA Experiment 20000451 PARAMETER Experiment Name: At_CS6879_Shoots-Roots_P Parameter: Age (day) Value: 14
  misc_feature: MA Experiment 20000451 PARAMETER Experiment Name: At_CS6879_Shoots-Roots_P Parameter: Organism Value: A. thaliana
  misc_feature: MA Experiment 20000451 PARAMETER Experiment Name: At_CS6879_Shoots-Roots_P Parameter: Plant Line Value: CS6879 vs. WS
  misc_feature: MA Experiment 20000451 PARAMETER Experiment Name: At_CS6879_Shoots-Roots_P Parameter: Tissue Value: Roots
atggagaacaaaactcaagaggaagcttcgaccatcaaagtttcatcccttacttgcatagatcttgccaacccgaactttcaacaatcagcggtttctcttaaacaggcatgtctagattgtggatttttctatgtcacaaatcatggtataagtgaggagttgaaggacgaggcttttgagcagagcaagaagttctttgctcttcctttggaggagaaaatgaaagtcttgagaaatgaaaagcatcgaggctattcacccgtccttgatcaaattttagatcctgagaatcaagtcgacgttgttttgccgggatggcgggcgaccatggagaaatatcatcaagaagcattgagggtttgcaaggctattgctagattattagcattggcgctcgacttggacacaaattactttgataaaccggaaatgctgggaaatcctatcgcagttatgcgtttgcttcgttacgaagggatgtctgatcccttgaaaggaatatttggatgtggagctcattctgattacggaatgctgactctcttagcaaccgatagtgtaaccgggctccaggataaggacgtgaagcctaggaagtgggaatatgtaccatctattaaaggagcatatatcgtcaatcttggagacttgttggagcgttggagcaacggcatttttaaatccacattgcatcgggtacttgggaatggtcaagaccgatattccattccattcttcatagaaccgagtcacgactgtctagtagaatgtctacctacctgccagtccgaaaacaaccttcccaaatatccagctatcaaatgttcaacgttcctcacccaacgttaccagcaatcacatgtgaatttgagcatctacaaacagccctaa

SEQ ID NO: 90797 - protein, 297 aa, Arabidopsis thaliana
  peptide (1)..(297): Ceres Seq. ID no. 12725329
  misc_feature (149)..(250): Pfam Name: 2OG-Fe(II) oxygenase superfamily Pfam Description: 2OG-Fe(II) oxygenase superfamily
  misc_feature (1)..(297): Homolog of NCBI NO: 15231441 NR Description: putative protein; protein id: At3g46480.1
  misc_feature (103)..(296): Homolog of NCBI NO: 15219523 NR Description: hyoscyamine 6-dioxygenase hydroxylase, putative; id: At1g35190.1, supported by cDNA: 2551., supported by cDNA:
  misc_feature (7)..(101): Homolog of NCBI NO: 15219523 NR Description: hyoscyamine 6-dioxygenase hydroxylase, putative; id: At1g35190.1, supported by cDNA: 2551., supported by cDNA:
  misc_feature (103)..(270): Homolog of NCBI NO: 15231442 NR Description: putative protein; protein id: At3g46490.1
  misc_feature (1)..(100): Homolog of NCBI NO: 15231442 NR Description: putative protein; protein id: At3g46490.1
  misc_feature (37)..(294): Homolog of NCBI NO: 34906368 NR Description: unnamed protein product [Oryza sativa (japonica group)] >gi|9558506|dbj|BAB03425.1| unnamed protein product
  misc_feature (40)..(270): Homolog of NCBI NO: 15231443 NR Description: putative protein; protein id: At3g46500.1
  misc_feature (89)..(292): Homolog of NCBI NO: 8919875 NR Description: hypothetical protein [Capsella rubella]
  misc_feature (14)..(96): Homolog of NCBI NO: 8919875 NR Description: hypothetical protein [Capsella rubella]
  misc_feature (89)..(292): Homolog of NCBI NO: 7594582 NR Description: hypothetical protein [Arabidopsis thaliana] AT4g16770 [Arabidopsis thaliana] >gi|14596207|gb|AAK68831.1| protein [Arabidopsis thaliana] >gi|20148323|gb|AAM10052.1|
MENKTQEEASTIKVSSLTCIDLANPNFQQSAVSLKQACLDCGFFYVTNHGISEELKDEAFEQSKKFFALPLEEKMKVLRNEKHRGYSPVLDQILDPENQVDVVLPGWRATMEKYHQEALRVCKAIARLLALALDLDTNYFDKPEMLGNPIAVMRLLRYEGMSDPLKGIFGCGAHSDYGMLTLLATDSVTGLQDKDVKPRKWEYVPSIKGAYIVNLGDLLERWSNGIFKSTLHRVLGNGQDRYSIPFFIEPSHDCLVECLPTCQSENNLPKYPAIKCSTFLTQRYQQSHVNLSIYKQP

SEQ ID NO: 90798 - protein, 223 aa, Arabidopsis thaliana
  peptide (1)..(223): Ceres Seq. ID no. 12725330
  misc_feature (75)..(176): Pfam Name: 2OG-Fe(II) oxygenase superfamily Pfam Description: 2OG-Fe(II) oxygenase superfamily
  misc_feature (1)..(223): Homolog of NCBI NO: 15231441 NR Description: putative protein; protein id: At3g46480.1
  misc_feature (29)..(222): Homolog of NCBI NO: 15219523 NR Description: hyoscyamine 6-dioxygenase hydroxylase, putative; id: At1g35190.1, supported by cDNA: 2551., supported by cDNA:
  misc_feature (1)..(27): Homolog of NCBI NO: 15219523 NR Description: hyoscyamine 6-dioxygenase hydroxylase, putative; id: At1g35190.1, supported by cDNA: 2551., supported by cDNA:
  misc_feature (29)..(196): Homolog of NCBI NO: 15231442 NR Description: putative protein; protein id: At3g46490.1
  misc_feature (1)..(26): Homolog of NCBI NO: 15231442 NR Description: putative protein; protein id: At3g46490.1
  misc_feature (1)..(220): Homolog of NCBI NO: 34906368 NR Description: unnamed protein product [Oryza sativa (japonica group)] >gi|9558506|dbj|BAB03425.1| unnamed protein product
  misc_feature (1)..(196): Homolog of NCBI NO: 15231443 NR Description: putative protein; protein id: At3g46500.1
  misc_feature (15)..(218): Homolog of NCBI NO: 8919875 NR Description: hypothetical protein [Capsella rubella]
  misc_feature (1)..(22): Homolog of NCBI NO: 8919875 NR Description: hypothetical protein [Capsella rubella]
  misc_feature (15)..(218): Homolog of NCBI NO: 7594582 NR Description: hypothetical protein [Arabidopsis thaliana] AT4g16770 [Arabidopsis thaliana] >gi|14596207|gb|AAK68831.1| protein [Arabidopsis thaliana] >gi|20148323|gb|AAM10052.1|
MKVLRNEKHRGYSPVLDQILDPENQVDVVLPGWRATMEKYHQEALRVCKAIARLLALALDLDTNYFDKPEMLGNPIAVMRLLRYEGMSDPLKGIFGCGAHSDYGMLTLLATDSVTGLQDKDVKPRKWEYVPSIKGAYIVNLGDLLERWSNGIFKSTLHRVLGNGQDRYSIPFFIEPSHDCLVECLPTCQSENNLPKYPAIKCSTFLTQRYQQSHVNLSIYKQP

SEQ ID NO: 90799 - protein, 187 aa, Arabidopsis thaliana
  peptide (1)..(187): Ceres Seq. ID no. 12725331
  misc_feature (39)..(140): Pfam Name: 2OG-Fe(II) oxygenase superfamily Pfam Description: 2OG-Fe(II) oxygenase superfamily
  misc_feature (1)..(187): Homolog of NCBI NO: 15231441 NR Description: putative protein; protein id: At3g46480.1
  misc_feature (1)..(186): Homolog of NCBI NO: 15219523 NR Description: hyoscyamine 6-dioxygenase hydroxylase, putative; id: At1g35190.1, supported by cDNA: 2551., supported by cDNA:
  misc_feature (1)..(160): Homolog of NCBI NO: 15231442 NR Description: putative protein; protein id: At3g46490.1
  misc_feature (1)..(184): Homolog of NCBI NO: 34906368 NR Description: unnamed protein product [Oryza sativa (japonica group)] >gi|9558506|dbj|BAB03425.1| unnamed protein product
  misc_feature (1)..(160): Homolog of NCBI NO: 15231443 NR Description: putative protein; protein id: At3g46500.1
  misc_feature (1)..(182): Homolog of NCBI NO: 8919875 NR Description: hypothetical protein [Capsella rubella]
  misc_feature (1)..(182): Homolog of NCBI NO: 7594582 NR Description: hypothetical protein [Arabidopsis thaliana] AT4g16770 [Arabidopsis thaliana] >gi|14596207|gb|AAK68831.1| protein [Arabidopsis thaliana] >gi|20148323|gb|AAM10052.1|
  misc_feature (1)..(182): Homolog of NCBI NO: 18414746 NR Description: gibberellin oxidase-like protein; protein id:
  misc_feature (1)..(182): Homolog of NCBI NO: 8919874 NR Description: hypothetical protein [Capsella rubella]
  misc_feature (1)..(178): Homolog of NCBI NO: 37536198 NR Description: putative gibberellin oxidase [Oryza sativa
MEKYHQEALRVCKAIARLLALALDLDTNYFDKPEMLGNPIAVMRLLRYEGMSDPLKGIFGCGAHSDYGMLTLLATDSVTGLQDKDVKPRKWEYVPSIKGAYIVNLGDLLERWSNGIFKSTLHRVLGNGQDRYSIPFFIEPSHDCLVECLPTCQSENNLPKYPAIKCSTFLTQRYQQSHVNLSIYKQP

SEQ ID NO: 90800 - DNA, 1317 bp, Arabidopsis thaliana
  misc_feature (1)..(1317): Ceres Seq. ID no. 12725349
  misc_feature: MA Experiment ID: 20000314 Result: Up-regulated in Transcription
  misc_feature: MA Experiment 20000314 PARAMETER Experiment Name: At_14day_Shoots-Roots_Sub_P Parameter: Age (day) Value: 14
  misc_feature: MA Experiment 20000314 PARAMETER Experiment Name: At_14day_Shoots-Roots_Sub_P Parameter: Organism Value: A. thaliana
  misc_feature: MA Experiment 20000314 PARAMETER Experiment Name: At_14day_Shoots-Roots_Sub_P Parameter: Plant Line Value: WS
  misc_feature: MA Experiment 20000314 PARAMETER Experiment Name: At_14day_Shoots-Roots_Sub_P Parameter: Tissue Value: Roots vs. Whole Plant
  misc_feature: MA Experiment ID: 20000347 Result: Up-regulated in Transcription
  misc_feature: MA Experiment 20000347 PARAMETER Experiment Name: At_2mM_SA_Sub_P Parameter: Age (day) Value: 14
  misc_feature: MA Experiment 20000347 PARAMETER Experiment Name: At_2mM_SA_Sub_P Parameter: Organism Value: A. thaliana
  misc_feature: MA Experiment 20000347 PARAMETER Experiment Name: At_2mM_SA_Sub_P Parameter: Plant Line Value: WS
  misc_feature: MA Experiment 20000347 PARAMETER Experiment Name: At_2mM_SA_Sub_P Parameter: Timepoint (hr) Value: 6
  misc_feature: MA Experiment 20000347 PARAMETER Experiment Name: At_2mM_SA_Sub_P Parameter: Tissue Value: Aerial
  misc_feature: MA Experiment 20000347 PARAMETER Experiment Name: At_2mM_SA_Sub_P Parameter: Treatment Value: 2mM SA vs. No Treatment
atggagaagaaaatggaagcaaagagaaggatagtgttagttccaattccagcacaaggtcatgtaactccactgatgcaacttgggaaagtacttaactcgaagggcttctcaattacagttgttgagggacatttcaatcaagtaagctcttcttctcaacacttccctggttttcagtttgtcaccataaaagaaagcttaccagagtctgaattcgagaaactcggaggaatcgagtctatgataacgctcaacaaaacaagcgaggcaagcttcaaggactgtataagtcagttgttgctacaacaaggcaatgatattgcatgtatcatttacgacgagtacatgtacttctgtggagctgcagctaaggagttcagcattcctagtgtcatattcagcactcaaagtgctgcaaattacgtttcacatcctgatatgcaagacaaggtggtggaaaatttgtatccattacgatacaaagacctaccgacttcaggaatggggccactagatcgattttttgagctctgtagggaagtagccaacaaaagaacagcttcagctgttatcatcaacacggtgagctgtctagagagctcgtctctgtcatggctggaacaaaaagtaggaatttctgtgtatccattaggccctcttcacatgacagattcatcaccttctagtttacttgaagaggacaggagctgcattgaatggctgaacaagcagaaaccaaagtcagtgatatacataagcataggaacacttggtcaaatggaaaccaaggaagttttggagatgtcttgggggttgtgtaatagcaaccaaccatttctatgggttatccgagcgggttctatccttggcactaacggaatagagtcattgccagaggatgtcaataaaatggtctctgaaagaggatacattgtgaaacgagcaccgcagatagaagtacttggacatcctgcagtgggaggcttctggagccactgtggatggaactcaatactcgagagcattggagaaggagttccaatgatttgcaagccctttcatggcgagcaaaagttgaatgcaatgtatatagaaagtgtttggagaatagggtttcaggtggaaggtaaagtggatagaggagaggttgagagagctgtgaagaggttgatcgtggatgacgaaggtgcggggatgcgagagagagcccttgttctgaaagagaagatcaaagcctctgtcagtagtggaggcgcctcatacaacgcattggaagatattgtcaattacttgaagacaaagcaaagatgttga

SEQ ID NO: 90801 - protein, 438 aa, Arabidopsis thaliana
  peptide (1)..(438): Ceres Seq. ID no. 12725350
  misc_feature (10)..(435): Pfam Name: UDP-glucoronosyl and UDP-glucosyl transferase Pfam Description: UDP-glucoronosyl and UDP-glucosyl transferase
  misc_feature (1)..(438): Homolog of NCBI NO: 15232598 NR Description: glucosyltransferase-like protein; protein id:
  misc_feature (146)..(432): Homolog of NCBI NO: 15232619 NR Description: glucosyltransferase-like protein; protein id: [Arabidopsis thaliana] >gi|11258173|pir||T45605
  misc_feature (3)..(144): Homolog of NCBI NO: 15232619 NR Description: glucosyltransferase-like protein; protein id: [Arabidopsis thaliana] >gi|11258173|pir||T45605
  misc_feature (133)..(435): Homolog of NCBI NO: 15232620 NR Description: glucuronosyl transferase-like protein; protein At3g46690.1 [Arabidopsis thaliana] >gi|7433909|pir||T12981
  misc_feature (133)..(435): Homolog of NCBI NO: 26449469 NR Description: putative glucuronosyl transferase [Arabidopsis
  misc_feature (1)..(178): Homolog of NCBI NO: 15232620 NR Description: glucuronosyl transferase-like protein; protein At3g46690.1 [Arabidopsis thaliana] >gi|7433909|pir||T12981
  misc_feature (1)..(178): Homolog of NCBI NO: 26449469 NR Description: putative glucuronosyl transferase [Arabidopsis
  misc_feature (119)..(434): Homolog of NCBI NO: 11258169 NR Description: glucosyltransferase-like protein - Arabidopsis
  misc_feature (119)..(434): Homolog of NCBI NO: 18408251 NR Description: glucosyltransferase-like protein; protein id: supported by cDNA: gi_15081808 [Arabidopsis thaliana]
  misc_feature (1)..(155): Homolog of NCBI NO: 11258169 NR Description: glucosyltransferase-like protein - Arabidopsis
MEKKMEAKRRIVLVPIPAQGHVTPLMQLGKVLNSKGFSITVVEGHFNQVSSSSQHFPGFQFVTIKESLPESEFEKLGGIESMITLNKTSEASFKDCISQLLLQQGNDIACIIYDEYMYFCGAAAKEFSIPSVIFSTQSAANYVSHPDMQDKVVENLYPLRYKDLPTSGMGPLDRFFELCREVANKRTASAVIINTVSCLESSSLSWLEQKVGISVYPLGPLHMTDSSPSSLLEEDRSCIEWLNKQKPKSVIYISIGTLGQMETKEVLEMSWGLCNSNQPFLWVIRAGSILGTNGIESLPEDVNKMVSERGYIVKRAPQIEVLGHPAVGGFWSHCGWNSILESIGEGVPMICKPFHGEQKLNAMYIESVWRIGFQVEGKVDRGEVERAVKRLIVDDEGAGMRERALVLKEKIKASVSSGGASYNALEDIVNYLKTKQRC

SEQ ID NO: 90802 - protein, 434 aa, Arabidopsis thaliana
  peptide (1)..(434): Ceres Seq. ID no. 12725351
  misc_feature (6)..(431): Pfam Name: UDP-glucoronosyl and UDP-glucosyl transferase Pfam Description: UDP-glucoronosyl and UDP-glucosyl transferase
  misc_feature (1)..(434): Homolog of NCBI NO: 15232598 NR Description: glucosyltransferase-like protein; protein id:
  misc_feature (142)..(428): Homolog of NCBI NO: 15232619 NR Description: glucosyltransferase-like protein; protein id: [Arabidopsis thaliana] >gi|11258173|pir||T45605
  misc_feature (1)..(140): Homolog of NCBI NO: 15232619 NR Description: glucosyltransferase-like protein; protein id: [Arabidopsis thaliana] >gi|11258173|pir||T45605
  misc_feature (129)..(431): Homolog of NCBI NO: 15232620 NR Description: glucuronosyl transferase-like protein; protein At3g46690.1 [Arabidopsis thaliana] >gi|7433909|pir||T12981
  misc_feature (129)..(431): Homolog of NCBI NO: 26449469 NR Description: putative glucuronosyl transferase [Arabidopsis
  misc_feature (1)..(174): Homolog of NCBI NO: 15232620 NR Description: glucuronosyl transferase-like protein; protein At3g46690.1 [Arabidopsis thaliana] >gi|7433909|pir||T12981
  misc_feature (1)..(174): Homolog of NCBI NO: 26449469 NR Description: putative glucuronosyl transferase [Arabidopsis
  misc_feature (115)..(430): Homolog of NCBI NO: 11258169 NR Description: glucosyltransferase-like protein - Arabidopsis
  misc_feature (115)..(430): Homolog of NCBI NO: 18408251 NR Description: glucosyltransferase-like protein; protein id: supported by cDNA: gi_15081808 [Arabidopsis thaliana]
  misc_feature (1)..(151): Homolog of NCBI NO: 11258169 NR Description: glucosyltransferase-like protein - Arabidopsis
MEAKRRIVLVPIPAQGHVTPLMQLGKVLNSKGFSITVVEGHFNQVSSSSQHFPGFQFVTIKESLPESEFEKLGGIESMITLNKTSEASFKDCISQLLLQQGNDIACIIYDEYMYFCGAAAKEFSIPSVIFSTQSAANYVSHPDMQDKVVENLYPLRYKDLPTSGMGPLDRFFELCREVANKRTASAVIINTVSCLESSSLSWLEQKVGISVYPLGPLHMTDSSPSSLLEEDRSCIEWLNKQKPKSVIYISIGTLGQMETKEVLEMSWGLCNSNQPFLWVIRAGSILGTNGIESLPEDVNKMVSERGYIVKRAPQIEVLGHPAVGGFWSHCGWNSILESIGEGVPMICKPFHGEQKLNAMYIESVWRIGFQVEGKVDRGEVERAVKRLIVDDEGAGMRERALVLKEKIKASVSSGGASYNALEDIVNYLKTKQRC

SEQ ID NO: 90803 - protein, 413 aa, Arabidopsis thaliana
  peptide (1)..(413): Ceres Seq. ID no. 12725352
  misc_feature (1)..(410): Pfam Name: UDP-glucoronosyl and UDP-glucosyl transferase Pfam Description: UDP-glucoronosyl and UDP-glucosyl transferase
  misc_feature (1)..(413): Homolog of NCBI NO: 15232598 NR Description: glucosyltransferase-like protein; protein id:
  misc_feature (121)..(407): Homolog of NCBI NO: 15232619 NR Description: glucosyltransferase-like protein; protein id: [Arabidopsis thaliana] >gi|11258173|pir||T45605
  misc_feature (1)..(119): Homolog of NCBI NO: 15232619 NR Description: glucosyltransferase-like protein; protein id: [Arabidopsis thaliana] >gi|11258173|pir||T45605
  misc_feature (108)..(410): Homolog of NCBI NO: 15232620 NR Description: glucuronosyl transferase-like protein; protein At3g46690.1 [Arabidopsis thaliana] >gi|7433909|pir||T12981
  misc_feature (108)..(410): Homolog of NCBI NO: 26449469 NR Description: putative glucuronosyl transferase [Arabidopsis
  misc_feature (1)..(153): Homolog of NCBI NO: 15232620 NR Description: glucuronosyl transferase-like protein; protein At3g46690.1 [Arabidopsis thaliana] >gi|7433909|pir||T12981
  misc_feature (1)..(153): Homolog of NCBI NO: 26449469 NR Description: putative glucuronosyl transferase [Arabidopsis
  misc_feature (94)..(409): Homolog of NCBI NO: 11258169 NR Description: glucosyltransferase-like protein - Arabidopsis
  misc_feature (94)..(409): Homolog of NCBI NO: 18408251 NR Description: glucosyltransferase-like protein; protein id: supported by cDNA: gi_15081808 [Arabidopsis thaliana]
  misc_feature (1)..(130): Homolog of NCBI NO: 11258169 NR Description: glucosyltransferase-like protein - Arabidopsis
MQLGKVLNSKGFSITVVEGHFNQVSSSSQHFPGFQFVTIKESLPESEFEKLGGIESMITLNKTSEASFKDCISQLLLQQGNDIACIIYDEYMYFCGAAAKEFSIPSVIFSTQSAANYVSHPDMQDKVVENLYPLRYKDLPTSGMGPLDRFFELCREVANKRTASAVIINTVSCLESSSLSWLEQKVGISVYPLGPLHMTDSSPSSLLEEDRSCIEWLNKQKPKSVIYISIGTLGQMETKEVLEMSWGLCNSNQPFLWVIRAGSILGTNGIESLPEDVNKMVSERGYIVKRAPQIEVLGHPAVGGFWSHCGWNSILESIGEGVPMICKPFHGEQKLNAMYIESVWRIGFQVEGKVDRGEVERAVKRLIVDDEGAGMRERALVLKEKIKASVSSGGASYNALEDIVNYLKTKQRC

SEQ ID NO: 90804 - DNA, 1662 bp, Arabidopsis thaliana
  misc_feature (1)..(1662): Ceres Seq. ID no. 12725353
  misc_feature: MA Experiment ID: 20000347 Result: Up-regulated in Transcription
  misc_feature: MA Experiment 20000347 PARAMETER Experiment Name: At_2mM_SA_Sub_P Parameter: Age (day) Value: 14
  misc_feature: MA Experiment 20000347 PARAMETER Experiment Name: At_2mM_SA_Sub_P Parameter: Organism Value: A. thaliana
  misc_feature: MA Experiment 20000347 PARAMETER Experiment Name: At_2mM_SA_Sub_P Parameter: Plant Line Value: WS
  misc_feature: MA Experiment 20000347 PARAMETER Experiment Name: At_2mM_SA_Sub_P Parameter: Timepoint (hr) Value: 6
  misc_feature: MA Experiment 20000347 PARAMETER Experiment Name: At_2mM_SA_Sub_P Parameter: Tissue Value: Aerial
  misc_feature: MA Experiment 20000347 PARAMETER Experiment Name: At_2mM_SA_Sub_P Parameter: Treatment Value: 2mM SA vs. No Treatment
  misc_feature: MA Experiment ID: 20000348 Result: Up-regulated in Transcription
  misc_feature: MA Experiment 20000348 PARAMETER Experiment Name: At_100uM_ABA_Sub_P Parameter: Age (day) Value: 14
  misc_feature: MA Experiment 20000348 PARAMETER Experiment Name: At_100uM_ABA_Sub_P Parameter: Organism Value: A. thaliana
  misc_feature: MA Experiment 20000348 PARAMETER Experiment Name: At_100uM_ABA_Sub_P Parameter: Plant Line Value: WS
  misc_feature: MA Experiment 20000348 PARAMETER Experiment Name: At_100uM_ABA_Sub_P Parameter: Timepoint (hr) Value: 1
  misc_feature: MA Experiment 20000348 PARAMETER Experiment Name: At_100uM_ABA_Sub_P Parameter: Tissue Value: Aerial
  misc_feature: MA Experiment 20000348 PARAMETER Experiment Name: At_100uM_ABA_Sub_P Parameter: Treatment Value: 100uM ABA vs. No Treatment
  misc_feature: MA Experiment ID: 20000355 Result: Up-regulated in Transcription
  misc_feature: MA Experiment 20000355 PARAMETER Experiment Name: At_Siliques_Sub_P Parameter: Age (day) Value: 21
  misc_feature: MA Experiment 20000355 PARAMETER Experiment Name: At_Siliques_Sub_P Parameter: Organism Value: A. thaliana
  misc_feature: MA Experiment 20000355 PARAMETER Experiment Name: At_Siliques_Sub_P Parameter: Plant Line Value: WS
  misc_feature: MA Experiment 20000355 PARAMETER Experiment Name: At_Siliques_Sub_P Parameter: Tissue Value: Less Than 5mm Siliques vs. Whole Plant
  misc_feature: MA Experiment ID: 20000440 Result: Up-regulated in Transcription
  misc_feature: MA Experiment 20000440 PARAMETER Experiment Name: At_Closed-Flower__Sub_P Parameter: Tissue Value: Closed Flower vs. Whole Plant
aacaccatccaccacatgattcacatgttgtgacgaagagagccaacaaaacgttcgagagtcagatactttatatatcggttaccgaagtgatcgaaaccgcgaaccacgaagctgagcaggatacttttaattagtagttcatgcaggttttgggaatggaggaaaagcctgcaaggagaagcgtagtgttggttccatttccagcacaaggacatatatctccaatgatgcaacttgccaaaacccttcacttaaagggtttctcgatcacagttgttcagactaagttcaattactttagcccttcagatgacttcactcatgattttcagttcgtcaccattccagaaagcttaccagagtctgatttcaagaatctcggaccaatacagtttctgtttaagctcaacaaagagtgtaaggtgagcttcaaggactgtttgggtcagttggtgctgcaacaaagtaatgagatctcatgtgtcatctacgatgagttcatgtactttgctgaagctgcagccaaagagtgtaagcttccaaacatcattttcagcacaacaagtgccacggctttcgcttgccgctctgtatttgacaaactatatgcaaacaatgtccaagctcccttgaaagaaactaaaggacaacaagaagagctagttccggagttttatcccttgagatataaagactttccagtttcacggtttgcatcattagagagcataatggaggtgtataggaatacagttgacaaacggacagcttcctcggtgataatcaacactgcgagctgtctagagagctcatctctgtcttttctgcaacaacaacagctacaaattccagtgtatcctataggccctcttcacatggtggcctcagctcctacaagtctgcttgaagagaacaagagctgcatcgaatggttgaacaaacaaaaggtaaactcggtgatatacataagcatgggaagcatagctttaatggaaatcaacgagataatggaagtcgcgtcaggattggctgctagcaaccaacacttcttatgggtgatccgaccagggtcaatacctggttccgagtggatagagtccatgcctgaagagtttagtaagatggttttggaccgaggttacattgtgaaatgggctccacagaaggaagtactttctcatcctgcagtaggagggttttggagccattgtggatggaactcgacactagaaagcatcggccaaggagttccaatgatctgcaggccattttcgggtgatcaaaaggtgaacgctagatacttggagtgtgtatggaaaattgggattcaagtggagggtgagctagacagaggagtggtcgagagagctgtgaagaggttaatggttgacgaagaaggagaggagatgaggaagagagctttcagtttaaaagagcaacttagagcctctgttaaaagtggaggctcttcacacaactcgctagaagagtttgtacacttcataaggactctatgaagacagttgtgtctactaaaacacacaaagcatcaagattcctttttcaaccattccaagtttgtttgcatagagtttatctgaacatcacttaaaaactcacctgcagaataacaaactataaaaattaatactttaccgc

SEQ ID NO: 90805 - protein, 458 aa, Arabidopsis thaliana
  peptide (1)..(458): Ceres Seq. ID no. 12725354
  misc_feature (14)..(458): Pfam Name: UDP-glucoronosyl and UDP-glucosyl transferase Pfam Description: UDP-glucoronosyl and UDP-glucosyl transferase
  misc_feature (1)..(458): Homolog of NCBI NO: 18408251 NR Description: glucosyltransferase-like protein; protein id: supported by cDNA: gi_15081808 [Arabidopsis thaliana]
  misc_feature (6)..(458): Homolog of NCBI NO: 11258169 NR Description: glucosyltransferase-like protein - Arabidopsis
  misc_feature (6)..(458): Homolog of NCBI NO: 15232618 NR Description: glucosyltransferase-like protein; protein id: supported by cDNA: 120105. [Arabidopsis thaliana]
  misc_feature (6)..(458): Homolog of NCBI NO: 21537102 NR Description: glucosyltransferase-like protein [Arabidopsis
  misc_feature (6)..(452): Homolog of NCBI NO: 15240822 NR Description: glucosyltransferase-like protein; protein id:
  misc_feature (6)..(452): Homolog of NCBI NO: 15240825 NR Description: glucosyltransferase-like protein; protein id:
  misc_feature (6)..(453): Homolog of NCBI NO: 15238467 NR Description: glucuronosyl transferase - like protein; protein
  misc_feature (6)..(457): Homolog of NCBI NO: 15232620 NR Description: glucuronosyl transferase-like protein; protein At3g46690.1 [Arabidopsis thaliana] >gi|7433909|pir||T12981
  misc_feature (138)..(458): Homolog of NCBI NO: 15232598 NR Description: glucosyltransferase-like protein; protein id:
  misc_feature (6)..(158): Homolog of NCBI NO: 15232598 NR Description: glucosyltransferase-like protein; protein id:
MQVLGMEEKPARRSVVLVPFPAQGHISPMMQLAKTLHLKGFSITVVQTKFNYFSPSDDFTHDFQFVTIPESLPESDFKNLGPIQFLFKLNKECKVSFKDCLGQLVLQQSNEISCVIYDEFMYFAEAAAKECKLPNIIFSTTSATAFACRSVFDKLYANNVQAPLKETKGQQEELVPEFYPLRYKDFPVSRFASLESIMEVYRNTVDKRTASSVIINTASCLESSSLSFLQQQQLQIPVYPIGPLHMVASAPTSLLEENKSCIEWLNKQKVNSVIYISMGSIALMEINEIMEVASGLAASNQHFLWVIRPGSIPGSEWIESMPEEFSKMVLDRGYIVKWAPQKEVLSHPAVGGFWSHCGWNSTLESIGQGVPMICRPFSGDQKVNARYLECVWKIGIQVEGELDRGVVERAVKRLMVDEEGEEMRKRAFSLKEQLRASVKSGGSSHNSLEEFVHFIRTL

SEQ ID NO: 90806 - protein, 453 aa, Arabidopsis thaliana
  peptide (1)..(453): Ceres Seq. ID no. 12725355
  misc_feature (9)..(453): Pfam Name: UDP-glucoronosyl and UDP-glucosyl transferase Pfam Description: UDP-glucoronosyl and UDP-glucosyl transferase
  misc_feature (1)..(453): Homolog of NCBI NO: 18408251 NR Description: glucosyltransferase-like protein; protein id: supported by cDNA: gi_15081808 [Arabidopsis thaliana]
  misc_feature (1)..(453): Homolog of NCBI NO: 11258169 NR Description: glucosyltransferase-like protein - Arabidopsis
  misc_feature (1)..(453): Homolog of NCBI NO: 15232618 NR Description: glucosyltransferase-like protein; protein id: supported by cDNA: 120105. [Arabidopsis thaliana]
  misc_feature (1)..(453): Homolog of NCBI NO: 21537102 NR Description: glucosyltransferase-like protein [Arabidopsis
  misc_feature (1)..(447): Homolog of NCBI NO: 15240822 NR Description: glucosyltransferase-like protein; protein id:
  misc_feature (1)..(447): Homolog of NCBI NO: 15240825 NR Description: glucosyltransferase-like protein; protein id:
  misc_feature (1)..(448): Homolog of NCBI NO: 15238467 NR Description: glucuronosyl transferase - like protein; protein
  misc_feature (1)..(452): Homolog of NCBI NO: 15232620 NR Description: glucuronosyl transferase-like protein; protein At3g46690.1 [Arabidopsis thaliana] >gi|7433909|pir||T12981
  misc_feature (133)..(453): Homolog of NCBI NO: 15232598 NR Description: glucosyltransferase-like protein; protein id:
  misc_feature (1)..(153): Homolog of NCBI NO: 15232598 NR Description: glucosyltransferase-like protein; protein id:
MEEKPARRSVVLVPFPAQGHISPMMQLAKTLHLKGFSITVVQTKFNYFSPSDDFTHDFQFVTIPESLPESDFKNLGPIQFLFKLNKECKVSFKDCLGQLVLQQSNEISCVIYDEFMYFAEAAAKECKLPNIIFSTTSATAFACRSVFDKLYANNVQAPLKETKGQQEELVPEFYPLRYKDFPVSRFASLESIMEVYRNTVDKRTASSVIINTASCLESSSLSFLQQQQLQIPVYPIGPLHMVASAPTSLLEENKSCIEWLNKQKVNSVIYISMGSIALMEINEIMEVASGLAASNQHFLWVIRPGSIPGSEWIESMPEEFSKMVLDRGYIVKWAPQKEVLSHPAVGGFWSHCGWNSTLESIGQGVPMICRPFSGDQKVNARYLECVWKIGIQVEGELDRGVVERAVKRLMVDEEGEEMRKRAFSLKEQLRASVKSGGSSHNSLEEFVHFIRTL

SEQ ID NO: 90807 - protein, 430 aa, Arabidopsis thaliana
  peptide (1)..(430): Ceres Seq. ID no. 12725356
  misc_feature (1)..(430): Pfam Name: UDP-glucoronosyl and UDP-glucosyl transferase Pfam Description: UDP-glucoronosyl and UDP-glucosyl transferase
  misc_feature (1)..(430): Homolog of NCBI NO: 18408251 NR Description: glucosyltransferase-like protein; protein id: supported by cDNA: gi_15081808 [Arabidopsis thaliana]
  misc_feature (1)..(430): Homolog of NCBI NO: 11258169 NR Description: glucosyltransferase-like protein - Arabidopsis
  misc_feature (1)..(430): Homolog of NCBI NO: 15232618 NR Description: glucosyltransferase-like protein; protein id: supported by cDNA: 120105. [Arabidopsis thaliana]
  misc_feature (1)..(430): Homolog of NCBI NO: 21537102 NR Description: glucosyltransferase-like protein [Arabidopsis
  misc_feature (1)..(424): Homolog of NCBI NO: 15240822 NR Description: glucosyltransferase-like protein; protein id:
  misc_feature (1)..(424): Homolog of NCBI NO: 15240825 NR Description: glucosyltransferase-like protein; protein id:
  misc_feature (1)..(425): Homolog of NCBI NO: 15238467 NR Description: glucuronosyl transferase - like protein; protein
  misc_feature (1)..(429): Homolog of NCBI NO: 15232620 NR Description: glucuronosyl transferase-like protein; protein At3g46690.1 [Arabidopsis thaliana] >gi|7433909|pir||T12981
  misc_feature (110)..(430): Homolog of NCBI NO: 15232598 NR Description: glucosyltransferase-like protein; protein id:
  misc_feature (1)..(130): Homolog of NCBI NO: 15232598 NR Description: glucosyltransferase-like protein; protein id:
MMQLAKTLHLKGFSITVVQTKFNYFSPSDDFTHDFQFVTIPESLPESDFKNLGPIQFLFKLNKECKVSFKDCLGQLVLQQSNEISCVIYDEFMYFAEAAAKECKLPNIIFSTTSATAFACRSVFDKLYANNVQAPLKETKGQQEELVPEFYPLRYKDFPVSRFASLESIMEVYRNTVDKRTASSVIINTASCLESSSLSFLQQQQLQIPVYPIGPLHMVASAPTSLLEENKSCIEWLNKQKVNSVIYISMGSIALMEINEIMEVASGLAASNQHFLWVIRPGSIPGSEWIESMPEEFSKMVLDRGYIVKWAPQKEVLSHPAVGGFWSHCGWNSTLESIGQGVPMICRPFSGDQKVNARYLECVWKIGIQVEGELDRGVVERAVKRLMVDEEGEEMRKRAFSLKEQLRASVKSGGSSHNSLEEFVHFIRTL

SEQ ID NO: 90808 - DNA, 1344 bp, Arabidopsis thaliana
  misc_feature (1)..(1344): Ceres Seq. ID no. 12725365
  misc_feature: MA Experiment ID: 20000439 Result: Up-regulated in Transcription
  misc_feature: MA Experiment 20000439 PARAMETER Experiment Name: At_Roots__P Parameter: Age (day) Value: 14 vs. 21
  misc_feature: MA Experiment 20000439 PARAMETER Experiment Name: At_Roots__P Parameter: Organism Value: A. thaliana
  misc_feature: MA Experiment 20000439 PARAMETER Experiment Name: At_Roots__P Parameter: Tissue Value: Roots vs. Whole Plant
  misc_feature: MA Experiment ID: 20000451 Result: Up-regulated in Transcription
  misc_feature: MA Experiment 20000451 PARAMETER Experiment Name: At_CS6879_Shoots-Roots_P Parameter: Age (day) Value: 14
  misc_feature: MA Experiment 20000451 PARAMETER Experiment Name: At_CS6879_Shoots-Roots_P Parameter: Organism Value: A. thaliana
  misc_feature: MA Experiment 20000451 PARAMETER Experiment Name: At_CS6879_Shoots-Roots_P Parameter: Plant Line Value: CS6879 vs. WS
  misc_feature: MA Experiment 20000451 PARAMETER Experiment Name: At_CS6879_Shoots-Roots_P Parameter: Tissue Value: Roots
atggagaaaaatgcagagaagaaaagaatagtgttggttccatttccattacaaggacatatcactccaatgatgcaacttggtcaagcacttaacctgaaaggcttctcgattaccgttgctcttggagattccaatcgagtaagttctacgcaacacttccctggttttcaatttgtcacaatacctgaaaccataccactatctcaacacgaggcactcggagttgtcgagtttgtggttacgctcaacaaaacaagcgagacaagtttcaaggactgtatagctcatttgttgctgcaacatggaaatgatattgcttgtatcatttacgacgagctcatgtacttctctgaagctacagctaaggatttaaggattcctagtgtcatattcaccactggtagtgctacaaatcatgtttgttcttgtattttaagcaaactcaacgccgagaagttcttgatcgacatgaaagatcctgaagtgcaaaacatggtggtggaaaatttacatccactaaaatacaaagacttaccaacttcaggaatggggccgctagagcgatttttggagatttgtgccgaagttgtcaacaaaagaacagcttccgctgttataatcaatacgtcaagttgtctagagagctcgtctctgtcatggctgaaacaagaactcagtattccagtgtatccattaggccctcttcacattacaacttcagcaaattttagtttacttgaagaggacaggagctgcattgaatggctgaacaagcagaaactgaggtcagttatatacataagcgtaggaagcatagctcacatggaaaccaaggaagtattggagatggcttggggattgtataatagcaaccaaccttttctatgggtaatccgacccggtacagagtcaatgccagtggaagtcagtaagattgtctcggaaagaggatgcattgtgaaatgggcgccacagaatgaagtacttgtgcatcctgcagtgggaggtttctggagccactgtggatggaactcaacactcgagagtattgtggaaggagttccaatgatttgcagaccgtttaacggtgagcagaagttaaacgcgatgtatatagaaagtgtttggagagtaggggttctgcttcaaggagaagtggagagaggatgtgtagagagagctgtgaagaggttgattgtggatgatgaaggtgtaggaatgagggagagagcccttgttttaaaagagaagctcaatgcctctgtaagaagtggaggctcttcatacaatgcattggatgagctcgtccattacttggaggcagagtatagaaatacttga

SEQ ID NO: 90809 - protein, 447 aa, Arabidopsis thaliana
  peptide (1)..(447): Ceres Seq. ID no. 12725366
  misc_feature (11)..(444): Pfam Name: UDP-glucoronosyl and UDP-glucosyl transferase Pfam Description: UDP-glucoronosyl and UDP-glucosyl transferase
  misc_feature (1)..(447): Homolog of NCBI NO: 15232623 NR Description: glucuronosyl transferase-like protein; protein At3g46720.1 [Arabidopsis thaliana] >gi|7433908|pir||T12978
  misc_feature (1)..(443): Homolog of NCBI NO: 15232620 NR Description: glucuronosyl transferase-like protein; protein At3g46690.1 [Arabidopsis thaliana] >gi|7433909|pir||T12981
  misc_feature (1)..(443): Homolog of NCBI NO: 26449469 NR Description: putative glucuronosyl transferase [Arabidopsis
  misc_feature (1)..(440): Homolog of NCBI NO: 15232619 NR Description: glucosyltransferase-like protein; protein id: [Arabidopsis thaliana] >gi|11258173|pir||T45605
  misc_feature (1)..(441): Homolog of NCBI NO: 30697251 NR Description: glycosyltransferase family [Arabidopsis thaliana]
  misc_feature (2)..(438): Homolog of NCBI NO: 15238467 NR Description: glucuronosyl transferase - like protein; protein
  misc_feature (1)..(440): Homolog of NCBI NO: 15232618 NR Description: glucosyltransferase-like protein; protein id: supported by cDNA: 120105. [Arabidopsis thaliana]
  misc_feature (1)..(440): Homolog of NCBI NO: 21537102 NR Description: glucosyltransferase-like protein [Arabidopsis
  misc_feature (1)..(440): Homolog of NCBI NO: 18408251 NR Description: glucosyltransferase-like protein; protein id: supported by cDNA: gi_15081808 [Arabidopsis thaliana]
  misc_feature (7)..(440): Homolog of NCBI NO: 34897378 NR Description: putative UDP-glucosyltransferase [Oryza sativa
MEKNAEKKRIVLVPFPLQGHITPMMQLGQALNLKGFSITVALGDSNRVSSTQHFPGFQFVTIPETIPLSQHEALGVVEFVVTLNKTSETSFKDCIAHLLLQHGNDIACIIYDELMYFSEATAKDLRIPSVIFTTGSATNHVCSCILSKLNAEKFLIDMKDPEVQNMVVENLHPLKYKDLPTSGMGPLERFLEICAEVVNKRTASAVIINTSSCLESSSLSWLKQELSIPVYPLGPLHITTSANFSLLEEDRSCIEWLNKQKLRSVIYISVGSIAHMETKEVLEMAWGLYNSNQPFLWVIRPGTESMPVEVSKIVSERGCIVKWAPQNEVLVHPAVGGFWSHCGWNSTLESIVEGVPMICRPFNGEQKLNAMYIESVWRVGVLLQGEVERGCVERAVKRLIVDDEGVGMRERALVLKEKLNASVRSGGSSYNALDELVHYLEAEYRNT

SEQ ID NO: 90810 - protein, 424 aa, Arabidopsis thaliana
  peptide (1)..(424): Ceres Seq. ID no. 12725367
  misc_feature (1)..(421): Pfam Name: UDP-glucoronosyl and UDP-glucosyl transferase Pfam Description: UDP-glucoronosyl and UDP-glucosyl transferase
  misc_feature (1)..(424): Homolog of NCBI NO: 15232623 NR Description: glucuronosyl transferase-like protein; protein At3g46720.1 [Arabidopsis thaliana] >gi|7433908|pir||T12978
  misc_feature (1)..(420): Homolog of NCBI NO: 15232620 NR Description: glucuronosyl transferase-like protein; protein At3g46690.1 [Arabidopsis thaliana] >gi|7433909|pir||T12981
  misc_feature (1)..(420): Homolog of NCBI NO: 26449469 NR Description: putative glucuronosyl transferase [Arabidopsis
  misc_feature (1)..(417): Homolog of NCBI NO: 15232619 NR Description: glucosyltransferase-like protein; protein id: [Arabidopsis thaliana] >gi|11258173|pir||T45605
  misc_feature (1)..(418): Homolog of NCBI NO: 30697251 NR Description: glycosyltransferase family [Arabidopsis thaliana]
  misc_feature (1)..(415): Homolog of NCBI NO: 15238467 NR Description: glucuronosyl transferase - like protein; protein
  misc_feature (1)..(417): Homolog of NCBI NO: 15232618 NR Description: glucosyltransferase-like protein; protein id: supported by cDNA: 120105. [Arabidopsis thaliana]
  misc_feature (1)..(417): Homolog of NCBI NO: 21537102 NR Description: glucosyltransferase-like protein [Arabidopsis
  misc_feature (1)..(417): Homolog of NCBI NO: 18408251 NR Description: glucosyltransferase-like protein; protein id: supported by cDNA: gi_15081808 [Arabidopsis thaliana]
  misc_feature (1)..(417): Homolog of NCBI NO: 34897378 NR Description: putative UDP-glucosyltransferase [Oryza sativa
MMQLGQALNLKGFSITVALGDSNRVSSTQHFPGFQFVTIPETIPLSQHEALGVVEFVVTLNKTSETSFKDCIAHLLLQHGNDIACIIYDELMYFSEATAKDLRIPSVIFTTGSATNHVCSCILSKLNAEKFLIDMKDPEVQNMVVENLHPLKYKDLPTSGMGPLERFLEICAEVVNKRTASAVIINTSSCLESSSLSWLKQELSIPVYPLGPLHITTSANFSLLEEDRSCIEWLNKQKLRSVIYISVGSIAHMETKEVLEMAWGLYNSNQPFLWVIRPGTESMPVEVSKIVSERGCIVKWAPQNEVLVHPAVGGFWSHCGWNSTLESIVEGVPMICRPFNGEQKLNAMYIESVWRVGVLLQGEVERGCVERAVKRLIVDDEGVGMRERALVLKEKLNASVRSGGSSYNALDELVHYLEAEYRNT

SEQ ID NO: 90811 - protein, 423 aa, Arabidopsis thaliana
  peptide (1)..(423): Ceres Seq. ID no. 12725368
  misc_feature (1)..(420): Pfam Name: UDP-glucoronosyl and UDP-glucosyl transferase Pfam Description: UDP-glucoronosyl and UDP-glucosyl transferase
  misc_feature (1)..(423): Homolog of NCBI NO: 15232623 NR Description: glucuronosyl transferase-like protein; protein At3g46720.1 [Arabidopsis thaliana] >gi|7433908|pir||T12978
  misc_feature (1)..(419): Homolog of NCBI NO: 15232620 NR Description: glucuronosyl transferase-like protein; protein At3g46690.1 [Arabidopsis thaliana] >gi|7433909|pir||T12981
  misc_feature (1)..(419): Homolog of NCBI NO: 26449469 NR Description: putative glucuronosyl transferase [Arabidopsis
  misc_feature (1)..(416): Homolog of NCBI NO: 15232619 NR Description: glucosyltransferase-like protein; protein id: [Arabidopsis thaliana] >gi|11258173|pir||T45605
  misc_feature (1)..(417): Homolog of NCBI NO: 30697251 NR Description: glycosyltransferase family [Arabidopsis thaliana]
  misc_feature (1)..(414): Homolog of NCBI NO: 15238467 NR Description: glucuronosyl transferase - like protein; protein
  misc_feature (1)..(416): Homolog of NCBI NO: 15232618 NR Description: glucosyltransferase-like protein; protein id: supported by cDNA: 120105. [Arabidopsis thaliana]
  misc_feature (1)..(416): Homolog of NCBI NO: 21537102 NR Description: glucosyltransferase-like protein [Arabidopsis
  misc_feature (1)..(416): Homolog of NCBI NO: 18408251 NR Description: glucosyltransferase-like protein; protein id: supported by cDNA: gi_15081808 [Arabidopsis thaliana]
  misc_feature (1)..(416): Homolog of NCBI NO: 34897378 NR Description: putative UDP-glucosyltransferase [Oryza sativa
MQLGQALNLKGFSITVALGDSNRVSSTQHFPGFQFVTIPETIPLSQHEALGVVEFVVTLNKTSETSFKDCIAHLLLQHGNDIACIIYDELMYFSEATAKDLRIPSVIFTTGSATNHVCSCILSKLNAEKFLIDMKDPEVQNMVVENLHPLKYKDLPTSGMGPLERFLEICAEVVNKRTASAVIINTSSCLESSSLSWLKQELSIPVYPLGPLHITTSANFSLLEEDRSCIEWLNKQKLRSVIYISVGSIAHMETKEVLEMAWGLYNSNQPFLWVIRPGTESMPVEVSKIVSERGCIVKWAPQNEVLVHPAVGGFWSHCGWNSTLESIVEGVPMICRPFNGEQKLNAMYIESVWRVGVLLQGEVERGCVERAVKRLIVDDEGVGMRERALVLKEKLNASVRSGGSSYNALDELVHYLEAEYRNT

SEQ ID NO: 90812 - DNA, 1760 bp, Arabidopsis thaliana
  misc_feature (1)..(1760): Ceres Seq. ID no. 12725373
  misc_feature: MA Experiment ID: 20000180 Result: Up-regulated in Transcription
  misc_feature: MA Experiment 20000180 PARAMETER Experiment Name: At_Germinating_Seeds_P Parameter: Age (hr) Value: 24 vs. 0
  misc_feature: MA Experiment 20000180 PARAMETER Experiment Name: At_Germinating_Seeds_P Parameter: Tissue Value: Germinating Seeds
  misc_feature: MA Experiment ID: 20000185 Result: Down-regulated in Transcription
  misc_feature: MA Experiment 20000185 PARAMETER Experiment Name: At_Roots__P Parameter: Age (day) Value: 7 vs. 21
  misc_feature: MA Experiment 20000185 PARAMETER Experiment Name: At_Roots__P Parameter: Organism Value: A. thaliana
  misc_feature: MA Experiment 20000185 PARAMETER Experiment Name: At_Roots__P Parameter: Tissue Value: Roots vs. Whole Plant
  misc_feature: MA Experiment ID: 20000264 Result: Down-regulated in Transcription
  misc_feature: MA Experiment 20000264 PARAMETER Experiment Name: At_Open_Flower_P Parameter: Age (day) Value: 21
  misc_feature: MA Experiment 20000264 PARAMETER Experiment Name: At_Open_Flower_P Parameter: Plant Line Value: WS
  misc_feature: MA Experiment 20000264 PARAMETER Experiment Name: At_Open_Flower_P Parameter: Tissue Value: Open Flower vs. Whole Plant
  misc_feature: MA Experiment ID: 20000286 Result: Down-regulated in Transcription
  misc_feature: MA Experiment 20000286 PARAMETER Experiment Name: At_Open_Flower_P Parameter: Age (day) Value: 21
  misc_feature: MA Experiment 20000286 PARAMETER Experiment Name: At_Open_Flower_P Parameter: Plant Line Value: WS
  misc_feature: MA Experiment 20000286 PARAMETER Experiment Name: At_Open_Flower_P Parameter: Tissue Value: Half Open vs. Whole Plant
  misc_feature: MA Experiment ID: 20000437 Result: Down-regulated in Transcription
  misc_feature: MA Experiment 20000437 PARAMETER Experiment Name: At_Drought_P Parameter: Age (day) Value: 8
  misc_feature: MA Experiment 20000437 PARAMETER Experiment Name: At_Drought_P Parameter: Organism Value: A. thaliana
  misc_feature: MA Experiment 20000437 PARAMETER Experiment Name: At_Drought_P Parameter: Plant Line Value: WS
  misc_feature: MA Experiment 20000437 PARAMETER Experiment Name: At_Drought_P Parameter: Timepoint (hr) Value: 24
  misc_feature: MA Experiment 20000437 PARAMETER Experiment Name: At_Drought_P Parameter: Tissue Value: Whole Plant
  misc_feature: MA Experiment 20000437 PARAMETER Experiment Name: At_Drought_P Parameter: Treatment Value: Drought vs. No Drought
  misc_feature: MA Experiment ID: 20000438 Result: Up-regulated in Transcription
  misc_feature: MA Experiment 20000438 PARAMETER Experiment Name: At_Shoots__P Parameter: Age (day) Value: 14
  misc_feature: MA Experiment 20000438 PARAMETER Experiment Name: At_Shoots__P Parameter: Tissue Value: Shoots vs. Whole Plant
  misc_feature: MA Experiment ID: 20000439 Result: Down-regulated in Transcription
  misc_feature: MA Experiment 20000439 PARAMETER Experiment Name: At_Roots__P Parameter: Age (day) Value: 14 vs. 21
  misc_feature: MA Experiment 20000439 PARAMETER Experiment Name: At_Roots__P Parameter: Organism Value: A. thaliana
  misc_feature: MA Experiment 20000439 PARAMETER Experiment Name: At_Roots__P Parameter: Tissue Value: Roots vs. Whole Plant
  misc_feature: MA Experiment ID: 20000573 Result: Down-regulated in Transcription
  misc_feature: MA Experiment 20000573 PARAMETER Experiment Name: At_100uM_ABA_Mutants__P Parameter: Organism Value: A. thaliana
  misc_feature: MA Experiment 20000573 PARAMETER Experiment Name: At_100uM_ABA_Mutants__P Parameter: Plant Line Value: CS22 vs. Ler wt
  misc_feature: MA Experiment 20000573 PARAMETER Experiment Name: At_100uM_ABA_Mutants__P Parameter: Timepoint (hr) Value: N/A
  misc_feature: MA Experiment 20000573 PARAMETER Experiment Name: At_100uM_ABA_Mutants__P Parameter: Tissue Value: Whole Plant
  misc_feature: MA Experiment 20000573 PARAMETER Experiment Name: At_100uM_ABA_Mutants__P Parameter: Treatment Value: None
  misc_feature: MA Experiment ID: 20000794 Result: Down-regulated in Transcription
  misc_feature: MA Experiment 20000794 PARAMETER Experiment Name: At_Petals_P Parameter: Age (day) Value: 23-25 days
  misc_feature: MA Experiment 20000794 PARAMETER Experiment Name: At_Petals_P Parameter: Plant Line Value: WS
  misc_feature: MA Experiment 20000794 PARAMETER Experiment Name: At_Petals_P Parameter: Tissue Value: Petals vs. Whole plant
  misc_feature: MA Experiment ID: 20001555 Result: Down-regulated in Transcription
  misc_feature: MA Experiment 20001555 PARAMETER Experiment Name: At_Drought_Soil_Dry_P Parameter: Age (day) Value: 24
  misc_feature: MA Experiment 20001555 PARAMETER Experiment Name: At_Drought_Soil_Dry_P Parameter: Organism Value: A. thaliana
  misc_feature: MA Experiment 20001555 PARAMETER Experiment Name: At_Drought_Soil_Dry_P Parameter: Plant Line Value: WS
  misc_feature: MA Experiment 20001555 PARAMETER Experiment Name: At_Drought_Soil_Dry_P Parameter: Post Timepoint (hr) Value: None
  misc_feature: MA Experiment 20001555 PARAMETER Experiment Name: At_Drought_Soil_Dry_P Parameter: Post-Treatment Value: None
  misc_feature: MA Experiment 20001555 PARAMETER Experiment Name: At_Drought_Soil_Dry_P Parameter: Timepoint (day) Value: 10
  misc_feature: MA Experiment 20001555 PARAMETER Experiment Name: At_Drought_Soil_Dry_P Parameter: Treatment Value: Drought vs. No Drought
  misc_feature: MA Experiment ID: 20001556 Result: Down-regulated in Transcription
  misc_feature: MA Experiment 20001556 PARAMETER Experiment Name: At_Drought_Soil_Dry_P Parameter: Age (day) Value: 26
  misc_feature: MA Experiment 20001556 PARAMETER Experiment Name: At_Drought_Soil_Dry_P Parameter: Organism Value: A. thaliana
  misc_feature: MA Experiment 20001556 PARAMETER Experiment Name: At_Drought_Soil_Dry_P Parameter: Plant Line Value: WS
  misc_feature: MA Experiment 20001556 PARAMETER Experiment Name: At_Drought_Soil_Dry_P Parameter: Post Timepoint (hr) Value: None
  misc_feature: MA Experiment 20001556 PARAMETER Experiment Name: At_Drought_Soil_Dry_P Parameter: Post-Treatment Value: None
  misc_feature: MA Experiment 20001556 PARAMETER Experiment Name: At_Drought_Soil_Dry_P Parameter: Timepoint (day) Value: 12
  misc_feature: MA Experiment 20001556 PARAMETER Experiment Name: At_Drought_Soil_Dry_P Parameter: Treatment Value: Drought vs. No Drought
  misc_feature: MA Experiment ID: 20001557 Result: Down-regulated in Transcription
  misc_feature: MA Experiment 20001557 PARAMETER Experiment Name: At_Drought_Soil_Dry_P Parameter: Age (day) Value: 27
  misc_feature: MA Experiment 20001557 PARAMETER Experiment Name: At_Drought_Soil_Dry_P Parameter: Organism Value: A. thaliana
  misc_feature: MA Experiment 20001557 PARAMETER Experiment Name: At_Drought_Soil_Dry_P Parameter: Plant Line Value: WS
  misc_feature: MA Experiment 20001557 PARAMETER Experiment Name: At_Drought_Soil_Dry_P Parameter: Post Timepoint (hr) Value: 3
  misc_feature: MA Experiment 20001557 PARAMETER Experiment Name: At_Drought_Soil_Dry_P Parameter: Post-Treatment Value: Re-Water vs. No Drought
  misc_feature: MA Experiment 20001557 PARAMETER Experiment Name: At_Drought_Soil_Dry_P Parameter: Timepoint (day) Value: 13
  misc_feature: MA Experiment 20001557 PARAMETER Experiment Name: At_Drought_Soil_Dry_P Parameter: Treatment Value: Drought vs. No Drought
  misc_feature: MA Experiment ID: 20001558 Result: Down-regulated in Transcription
  misc_feature: MA Experiment 20001558 PARAMETER Experiment Name: At_Drought_Soil_Dry_P Parameter: Age (day) Value: 27
  misc_feature: MA Experiment 20001558 PARAMETER Experiment Name: At_Drought_Soil_Dry_P Parameter: Organism Value: A. thaliana
  misc_feature: MA Experiment 20001558 PARAMETER Experiment Name: At_Drought_Soil_Dry_P Parameter: Plant Line Value: WS
  misc_feature: MA Experiment 20001558 PARAMETER Experiment Name: At_Drought_Soil_Dry_P Parameter: Post Timepoint (hr) Value: 6
  misc_feature: MA Experiment 20001558 PARAMETER Experiment Name: At_Drought_Soil_Dry_P Parameter: Post-Treatment Value: Re-Water vs. No Drought
  misc_feature: MA Experiment 20001558 PARAMETER Experiment Name: At_Drought_Soil_Dry_P Parameter: Timepoint (day) Value: 13
  misc_feature: MA Experiment 20001558 PARAMETER Experiment Name: At_Drought_Soil_Dry_P Parameter: Treatment Value: Drought vs. No Drought
  misc_feature: MA Experiment ID: 20001559 Result: Down-regulated in Transcription
  misc_feature: MA Experiment 20001559 PARAMETER Experiment Name: At_Drought_Soil_Dry_P Parameter: Age (day) Value: 28
  misc_feature: MA Experiment 20001559 PARAMETER Experiment Name: At_Drought_Soil_Dry_P Parameter: Organism Value: A. thaliana
  misc_feature: MA Experiment 20001559 PARAMETER Experiment Name: At_Drought_Soil_Dry_P Parameter: Plant Line Value: WS
  misc_feature: MA Experiment 20001559 PARAMETER Experiment Name: At_Drought_Soil_Dry_P Parameter: Post Timepoint (hr) Value: 29
  misc_feature: MA Experiment 20001559 PARAMETER Experiment Name: At_Drought_Soil_Dry_P Parameter: Post-Treatment Value: Re-Water vs. No Drought
  misc_feature: MA Experiment 20001559 PARAMETER Experiment Name: At_Drought_Soil_Dry_P Parameter: Timepoint (day) Value: 14
  misc_feature: MA Experiment 20001559 PARAMETER Experiment Name: At_Drought_Soil_Dry_P Parameter: Treatment Value: Drought vs. No Drought
  misc_feature: MA Experiment ID: 20001757 Result: Up-regulated in Transcription
  misc_feature: MA Experiment 20001757 PARAMETER Experiment Name: At_50mM_NH4NO3_L-to-H_P Parameter: Timepoint (hr) Value: 6
  misc_feature: MA Experiment 20001757 PARAMETER Experiment Name: At_50mM_NH4NO3_L-to-H_P Parameter: Tissue Value: Leaf
  misc_feature: MA Experiment 20001757 PARAMETER Experiment Name: At_50mM_NH4NO3_L-to-H_P Parameter: Treatment Value: 50mM NH4NO3 vs 100mM Mannitol
  misc_feature: MA Experiment ID: 20001904 Result: Down-regulated in Transcription
  misc_feature: MA Experiment 20001904 PARAMETER Experiment Name: At_Drought_Reproduction_P Parameter: Age (day) Value: 37
  misc_feature: MA Experiment 20001904 PARAMETER Experiment Name: At_Drought_Reproduction_P Parameter: Organism Value: A. thaliana
  misc_feature: MA Experiment 20001904 PARAMETER Experiment Name: At_Drought_Reproduction_P Parameter: Plant Line Value: WS
  misc_feature: MA Experiment 20001904 PARAMETER Experiment Name: At_Drought_Reproduction_P Parameter: Timepoint (day) Value: 7
  misc_feature: MA Experiment 20001904 PARAMETER Experiment Name: At_Drought_Reproduction_P Parameter: Tissue Value: Rosettes
  misc_feature: MA Experiment 20001904 PARAMETER Experiment Name: At_Drought_Reproduction_P Parameter: Treatment Value: Drought vs. No Drought
  misc_feature: MA Experiment ID: 20001905 Result: Down-regulated in Transcription
  misc_feature: MA Experiment 20001905 PARAMETER Experiment Name: At_Drought_Reproduction_P Parameter: Age (day) Value: 40
  misc_feature: MA Experiment 20001905 PARAMETER Experiment Name: At_Drought_Reproduction_P Parameter: Organism Value: A. thaliana
  misc_feature: MA Experiment 20001905 PARAMETER Experiment Name: At_Drought_Reproduction_P Parameter: Plant Line Value: WS
  misc_feature: MA Experiment 20001905 PARAMETER Experiment Name: At_Drought_Reproduction_P Parameter: Timepoint (day) Value: 10
  misc_feature: MA Experiment 20001905 PARAMETER Experiment Name: At_Drought_Reproduction_P Parameter: Tissue Value: Rosettes
  misc_feature: MA Experiment 20001905 PARAMETER Experiment Name: At_Drought_Reproduction_P Parameter: Treatment Value: Drought vs. No Drought
  misc_feature: MA Experiment ID: 20001906 Result: Down-regulated in Transcription
  misc_feature: MA Experiment 20001906 PARAMETER Experiment Name: At_Drought_Reproduction_P Parameter: Age (day) Value: 35
  misc_feature: MA Experiment 20001906 PARAMETER Experiment Name: At_Drought_Reproduction_P Parameter: Organism Value: A. thaliana
  misc_feature: MA Experiment 20001906 PARAMETER Experiment Name: At_Drought_Reproduction_P Parameter: Plant Line Value: WS
  misc_feature: MA Experiment 20001906 PARAMETER Experiment Name: At_Drought_Reproduction_P Parameter: Timepoint (day) Value: 5
  misc_feature: MA Experiment 20001906 PARAMETER Experiment Name: At_Drought_Reproduction_P Parameter: Tissue Value: Siliques
  misc_feature: MA Experiment 20001906 PARAMETER Experiment Name: At_Drought_Reproduction_P Parameter: Treatment Value: Drought vs. No Drought
  misc_feature: MA Experiment ID: 20001908 Result: Down-regulated in Transcription
  misc_feature: MA Experiment 20001908 PARAMETER Experiment Name: At_Drought_Reproduction_P Parameter: Age (day) Value: 40
  misc_feature: MA Experiment 20001908 PARAMETER Experiment Name: At_Drought_Reproduction_P Parameter: Organism Value: A. thaliana
  misc_feature: MA Experiment 20001908 PARAMETER Experiment Name: At_Drought_Reproduction_P Parameter: Plant Line Value: WS
  misc_feature: MA Experiment 20001908 PARAMETER Experiment Name: At_Drought_Reproduction_P Parameter: Timepoint (day) Value: 10
  misc_feature: MA Experiment 20001908 PARAMETER Experiment Name: At_Drought_Reproduction_P Parameter: Tissue Value: Siliques
  misc_feature: MA Experiment 20001908 PARAMETER Experiment Name: At_Drought_Reproduction_P Parameter: Treatment Value: Drought vs. No Drought
gcactcgccatggtgtctcatcttcaatgtatggcatccacattgtttacttgaggtacaagcaaaacgtctaagctcgtcgacctcctcttaatggcttcaagttcaacttcattcccgttaaccaccgcgccaccgcagggtgtcaggtttaaccggagaaaaccgaggttaaccgtgtgggctaagcaaacggcgtttcaactcgggaaaacgaagggtgatgatgactcggaggggaaacaaaaagggaagaacccgttccagtttgatttcggtaagttaccggacatgaagtcactgataccggttgtgacgaatccttctaccggtttagtgtttggtaataacagaaagaaagatcctggtactatttttgtggctggtgctacgggacaagctggtatacgcatagctcaaacgctcttacaacgaggattcagtgttcgagccggtgttcctgaccttggagctgcccaggacctagctcgtgtcgcggctacttacaagattttatcaaatgatgaagtcaagaggctaaacgcagttcaatcccccttccaagacgctgaatcaatagcaaaagcgattggaaacgcaaccaaagttgttgttacggtcggggcaacagagaatggtccggacgcccaagtttcgacctcagacgcattgctcgtggtccaagcagctgagctagccggcgtaagccacgtggcgatagtctacgacggcaccatcagcgggtccacatacaacgtgctcgacgggattacttcgtttttcggcaatcttttcgcaaaatctcagccattgactatctctgacctcatcgagaaagtagctcaaaccgacgtggcctacacactcataaagacgagtttgacggaggatttctctccggagaaagcttataacgtcgtcgtttcagctgaagggagtaacagcggcagtggcagtagttcgtccgaggcctacaaagtaatgtaatgttccgaagttgaagattgcgtcgctggttgcagacatttttgcgaatacggccgtggcagaaaataaggtggtggaagtttctacagatccatcagcaccatcgcggccagtggacgagcttttcagtgtaatcccggaagatgggaggagaaaagtgtacgcagatgcgatcgcaagggaaagagcagaggaagaagctaaagttgcagctgacaaagctcgagaggcagcagaagcagcgaaagagtttgagaagcaaatgcaaaagctctctgagaaagaagcagaagctgcaagcttagctgaggatgcgcagcagaaagcagatgccgtgggagtcacagtggacggtttatttaacaaggcgaaagatatcagctcaggtctctcctggaataaactcggctctcagttcgcaactgcgattcagaacgcttcagagacgcctaaagtacaggttgctacggtcagaggacaagcaaaagcgagaaacttgccacccaagaaagcagtggtgaagcagagaccatcatctccgtttgcatccaaaccgaaagaagaacgtccgaagaagccggagaaagaggtgaggaaagtgttcggaggattgtttaagcaagagaccatctacatcgacgatgattgaaaaggccatatgcgatgtccttttgaagttccgtacagtttccttttttctctttccttctgtttcaagttaaaattctgtaatcgtatgacaaaattatacataaaaaaccatcattctctct

SEQ ID NO: 90813 - protein, 297 aa, Arabidopsis thaliana
  peptide (1)..(297): Ceres Seq. ID no. 12725374
  misc_feature (1)..(296): Homolog of NCBI NO: 7487756 NR Description: hypothetical protein T6H20.190 - Arabidopsis >gi|5541681|emb|CAB51187.1| putative protein [Arabidopsis
  misc_feature (1)..(297): Homolog of NCBI NO: 18408279 NR Description: putative protein; protein id: At3g46780.1, by cDNA: gi_13605913 [Arabidopsis thaliana] AT3g46780/T6H20_190 [Arabidopsis thaliana]
  misc_feature (73)..(180): Homolog of NCBI NO: 30685117 NR Description: expressed protein [Arabidopsis thaliana] Unknown protein [Arabidopsis thaliana]
  misc_feature (73)..(180): Homolog of NCBI NO: 9294698 NR Description: gb|AAC26697.1~gene_id:MCB22.6~similar to unknown
  misc_feature (89)..(297): Homolog of NCBI NO: 21616072 NR Description: Tic62 protein [Pisum sativum]
  misc_feature (89)..(297): Homolog of NCBI NO: 37530302 NR Description: putative dehydrogenase [Oryza sativa (japonica group)] >gi|18481961|gb|AAL73559.1| Unknown protein [Oryza >gi|19920208|gb|AAM08640.1| Putative dehydrogenase [Oryza sativa]
MASSSTSFPLTTAPPQGVRFNRRKPRLTVWAKQTAFQLGKTKGDDDSEGKQKGKNPFQFDFGKLPDMKSLIPVVTNPSTGLVFGNNRKKDPGTIFVAGATGQAGIRIAQTLLQRGFSVRAGVPDLGAAQDLARVAATYKILSNDEVKRLNAVQSPFQDAESIAKAIGNATKVVVTVGATENGPDAQVSTSDALLVVQAAELAGVSHVAIVYDGTISGSTYNVLDGITSFFGNLFAKSQPLTISDLIEKVAQTDVAYTLIKTSLTEDFSPEKAYNVVVSAEGSNSGSGSSSSEAYKVM

SEQ ID NO: 90814 - protein, 231 aa, Arabidopsis thaliana
  peptide (1)..(231): Ceres Seq. ID no. 12725375
  misc_feature (1)..(230): Homolog of NCBI NO: 7487756 NR Description: hypothetical protein T6H20.190 - Arabidopsis >gi|5541681|emb|CAB51187.1| putative protein [Arabidopsis
  misc_feature (1)..(231): Homolog of NCBI NO: 18408279 NR Description: putative protein; protein id: At3g46780.1, by cDNA: gi_13605913 [Arabidopsis thaliana] AT3g46780/T6H20_190 [Arabidopsis thaliana]
  misc_feature (7)..(114): Homolog of NCBI NO: 30685117 NR Description: expressed protein [Arabidopsis thaliana] Unknown protein [Arabidopsis thaliana]
  misc_feature (7)..(114): Homolog of NCBI NO: 9294698 NR Description: gb|AAC26697.1~gene_id:MCB22.6~similar to unknown
  misc_feature (23)..(231): Homolog of NCBI NO: 21616072 NR Description: Tic62 protein [Pisum sativum]
  misc_feature (23)..(231): Homolog of NCBI NO: 37530302 NR Description: putative dehydrogenase [Oryza sativa (japonica group)] >gi|18481961|gb|AAL73559.1| Unknown protein [Oryza >gi|19920208|gb|AAM08640.1| Putative dehydrogenase [Oryza sativa]
MKSLIPVVTNPSTGLVFGNNRKKDPGTIFVAGATGQAGIRIAQTLLQRGFSVRAGVPDLGAAQDLARVAATYKILSNDEVKRLNAVQSPFQDAESIAKAIGNATKVVVTVGATENGPDAQVSTSDALLVVQAAELAGVSHVAIVYDGTISGSTYNVLDGITSFFGNLFAKSQPLTISDLIEKVAQTDVAYTLIKTSLTEDFSPEKAYNVVVSAEGSNSGSGSSSSEAYKVM

SEQ ID NO: 90815 - DNA, 615 bp, Arabidopsis thaliana
  misc_feature (1)..(615): Ceres Seq. ID no. 12725395
atggcaatctccaatggcgccgtggaatttctccggcgacgactcctcccaactacactaatccacgtcacggctatagacggcatcgtgaacgttaattcactcttctcgcttgctcttttcctcggcctaaccacaagtggaaacatcactttcccggtttcctcatcagcctccgagaaccaccatctccgccgatgtatctctgcaaaaggtcccgcattagcggagaggctagtatcaagccatgtttactccttcagtttattcctcttctccagtctcatcgctatgtctctcaagcaagcaattaggacaacaacaacaacaacaaacgggaactgtttagaggaggaggcgcgtgtgttgaacgcgggagaggggcgtgtgaacttggcagctttaagggttgggattgttgcttcgtgtgttgcgtcggttttgggatgtgggttcttgacaatggcgttagtggatcttgttcagattaaacttggacctttggaatgtaagagaagctttcatgcacttgcagctattgttcctcttgttgtacttgttccttctgcacttattatctatgtgttccttgtgctctacgcatttatctattaa

SEQ ID NO: 90816 - protein, 204 aa, Arabidopsis thaliana
  peptide (1)..(204): Ceres Seq. ID no. 12725396
  misc_feature (1)..(204): Homolog of NCBI NO: 15232676 NR Description: putative protein; protein id: At3g46890.1
  misc_feature (18)..(202): Homolog of NCBI NO: 15239293 NR Description: putative protein; protein id: At5g05950.1, by cDNA: 252000. [Arabidopsis thaliana] gene_id:K18J17.12~pir||T12959~similar to unknown protein
  misc_feature (19)..(202): Homolog of NCBI NO: 34395171 NR Description: unknown protein [Oryza sativa (japonica
  misc_feature (19)..(202): Homolog of NCBI NO: 34900646 NR Description: hypothetical protein~similar to Arabidopsis
  misc_feature (30)..(202): Homolog of NCBI NO: 6041846 NR Description: unknown protein [Arabidopsis thaliana]
  misc_feature (30)..(202): Homolog of NCBI NO: 18397969 NR Description: expressed protein; protein id: At3g07510.1, by cDNA: gi_13877548, supported by cDNA: gi_20148734 [Arabidopsis >gi|13877549|gb|AAK43852.1|AF370475_1 Unknown protein
  misc_feature (77)..(202): Homolog of NCBI NO: 15226312 NR Description: hypothetical protein; protein id: At2g01580.1
  misc_feature (72)..(204): Homolog of NCBI NO: 37531676 NR Description: hypothetical protein [Oryza sativa (japonica group)] >gi|21671930|gb|AAM74292.1| Hypothetical protein [Oryza
  misc_feature (21)..(204): Homolog of NCBI NO: 38345578 NR Description: OSJNBa0027H06.14 [Oryza sativa (japonica
  misc_feature (16)..(196): Homolog of NCBI NO: 6041846 NR Description: unknown protein [Arabidopsis thaliana]
MAISNGAVEFLRRRLLPTTLIHVTAIDGIVNVNSLFSLALFLGLTTSGNITFPVSSSASENHHLRRCISAKGPALAERLVSSHVYSFSLFLFSSLIAMSLKQAIRTTTTTTNGNCLEEEARVLNAGEGRVNLAALRVGIVASCVASVLGCGFLTMALVDLVQIKLGPLECKRSFHALAAIVPLVVLVPSALIIYVFLVLYAFIY

SEQ ID NO: 90817 - protein, 107 aa, Arabidopsis thaliana
  peptide (1)..(107): Ceres Seq. ID no. 12725397
  misc_feature (1)..(107): Homolog of NCBI NO: 15232676 NR Description: putative protein; protein id: At3g46890.1
  misc_feature (1)..(105): Homolog of NCBI NO: 15239293 NR Description: putative protein; protein id: At5g05950.1, by cDNA: 252000. [Arabidopsis thaliana] gene_id:K18J17.12~pir||T12959~similar to unknown protein
  misc_feature (1)..(105): Homolog of NCBI NO: 34395171 NR Description: unknown protein [Oryza sativa (japonica
  misc_feature (1)..(105): Homolog of NCBI NO: 34900646 NR Description: hypothetical protein~similar to Arabidopsis
  misc_feature (1)..(105): Homolog of NCBI NO: 6041846 NR Description: unknown protein [Arabidopsis thaliana]
  misc_feature (1)..(105): Homolog of NCBI NO: 18397969 NR Description: expressed protein; protein id: At3g07510.1, by cDNA: gi_13877548, supported by cDNA: gi_20148734 [Arabidopsis >gi|13877549|gb|AAK43852.1|AF370475_1 Unknown protein
  misc_feature (1)..(105): Homolog of NCBI NO: 15226312 NR Description: hypothetical protein; protein id: At2g01580.1
  misc_feature (1)..(107): Homolog of NCBI NO: 37531676 NR Description: hypothetical protein [Oryza sativa (japonica group)] >gi|21671930|gb|AAM74292.1| Hypothetical protein [Oryza
  misc_feature (1)..(107): Homolog of NCBI NO: 38345578 NR Description: OSJNBa0027H06.14 [Oryza sativa (japonica
  misc_feature (1)..(99): Homolog of NCBI NO: 6041846 NR Description: unknown protein [Arabidopsis thaliana]
MSLKQAIRTTTTTTNGNCLEEEARVLNAGEGRVNLAALRVGIVASCVASVLGCGFLTMALVDLVQIKLGPLECKRSFHALAAIVPLVVLVPSALIIYVFLVLYAFIY

SEQ ID NO: 90818 - DNA, 1593 bp, Arabidopsis thaliana
  misc_feature (1)..(1593): Ceres Seq. ID no. 12725402
  misc_feature: MA Experiment ID: 108461 Result: Down-regulated in Transcription
  misc_feature: MA Experiment 108461 PARAMETER Experiment Name: At_Germinating_Seeds_cDNA_P Parameter: Age (day) Value: 1 vs. 0
  misc_feature: MA Experiment 108461 PARAMETER Experiment Name: At_Germinating_Seeds_cDNA_P Parameter: Tissue Value: Germinating Seeds
  misc_feature: MA Experiment ID: 108462 Result: Down-regulated in Transcription
  misc_feature: MA Experiment 108462 PARAMETER Experiment Name: At_Germinating_Seeds_cDNA_P Parameter: Age (day) Value: 2 vs. 0
  misc_feature: MA Experiment 108462 PARAMETER Experiment Name: At_Germinating_Seeds_cDNA_P Parameter: Tissue Value: Germinating Seeds
  misc_feature: MA Experiment ID: 108463 Result: Down-regulated in Transcription
  misc_feature: MA Experiment 108463 PARAMETER Experiment Name: At_Germinating_Seeds_cDNA_P Parameter: Age (day) Value: 3 vs. 0
  misc_feature: MA Experiment 108463 PARAMETER Experiment Name: At_Germinating_Seeds_cDNA_P Parameter: Tissue Value: Germinating Seeds
  misc_feature: MA Experiment ID: 108464 Result: Down-regulated in Transcription
  misc_feature: MA Experiment 108464 PARAMETER Experiment Name: At_Germinating_Seeds_cDNA_P Parameter: Age (day) Value: 4 vs. 0
  misc_feature: MA Experiment 108464 PARAMETER Experiment Name: At_Germinating_Seeds_cDNA_P Parameter: Tissue Value: Germinating Seeds
  misc_feature: MA Experiment ID: 20000171 Result: Down-regulated in Transcription
  misc_feature: MA Experiment 20000171 PARAMETER Experiment Name: At_42deg_Heat_P Parameter: Age (day) Value: 14
  misc_feature: MA Experiment 20000171 PARAMETER Experiment Name: At_42deg_Heat_P Parameter: Organism Value: A. thaliana
  misc_feature: MA Experiment 20000171 PARAMETER Experiment Name: At_42deg_Heat_P Parameter: Plant Line Value: WS
  misc_feature: MA Experiment 20000171 PARAMETER Experiment Name: At_42deg_Heat_P Parameter: Temperature (deg C) Value: 42 vs. 22
  misc_feature: MA Experiment 20000171 PARAMETER Experiment Name: At_42deg_Heat_P Parameter: Timepoint (hr) Value: 1
  misc_feature: MA Experiment 20000171 PARAMETER Experiment Name: At_42deg_Heat_P Parameter: Tissue Value: Aerial
  misc_feature: MA Experiment ID: 20000180 Result: Down-regulated in Transcription
  misc_feature: MA Experiment 20000180 PARAMETER Experiment Name: At_Germinating_Seeds_P Parameter: Age (hr) Value: 24 vs. 0
  misc_feature: MA Experiment 20000180 PARAMETER Experiment Name: At_Germinating_Seeds_P Parameter: Tissue Value: Germinating Seeds
  misc_feature: MA Experiment ID: 20000224 Result: Down-regulated in Transcription
  misc_feature: MA Experiment ID: 20000265 Result: Up-regulated in Transcription
  misc_feature: MA Experiment 20000265 PARAMETER Experiment Name: At_Open_Flower_P Parameter: Age (day) Value: 21
  misc_feature: MA Experiment 20000265 PARAMETER Experiment Name: At_Open_Flower_P Parameter: Plant Line Value: WS
  misc_feature: MA Experiment 20000265 PARAMETER Experiment Name: At_Open_Flower_P Parameter: Tissue Value: Closed Flower vs. Whole Plant
  misc_feature: MA Experiment ID: 20001247 Result: Down-regulated in Transcription
  misc_feature: MA Experiment 20001247 PARAMETER Experiment Name: At_Far-red-induction_P Parameter: Age (day) Value: 7
  misc_feature: MA Experiment 20001247 PARAMETER Experiment Name: At_Far-red-induction_P Parameter: Light Value: Far-red vs. White
  misc_feature: MA Experiment 20001247 PARAMETER Experiment Name: At_Far-red-induction_P Parameter: Organism Value: A. thaliana
  misc_feature: MA Experiment 20001247 PARAMETER Experiment Name: At_Far-red-induction_P Parameter: Plant Line Value: Columbia
  misc_feature: MA Experiment 20001247 PARAMETER Experiment Name: At_Far-red-induction_P Parameter: Timepoint (hr) Value: 1
  misc_feature: MA Experiment 20001247 PARAMETER Experiment Name: At_Far-red-induction_P Parameter: Tissue Value: Whole Plant
  misc_feature: MA Experiment ID: 20001558 Result: Up-regulated in Transcription
  misc_feature: MA Experiment 20001558 PARAMETER Experiment Name: At_Drought_Soil_Dry_P Parameter: Age (day) Value: 27
  misc_feature: MA Experiment 20001558 PARAMETER Experiment Name: At_Drought_Soil_Dry_P Parameter: Organism Value: A. thaliana
  misc_feature: MA Experiment 20001558 PARAMETER Experiment Name: At_Drought_Soil_Dry_P Parameter: Plant Line Value: WS
  misc_feature: MA Experiment 20001558 PARAMETER Experiment Name: At_Drought_Soil_Dry_P Parameter: Post Timepoint (hr) Value: 6
  misc_feature: MA Experiment 20001558 PARAMETER Experiment Name: At_Drought_Soil_Dry_P Parameter: Post-Treatment Value: Re-Water vs. No Drought
  misc_feature: MA Experiment 20001558 PARAMETER Experiment Name: At_Drought_Soil_Dry_P Parameter: Timepoint (day) Value: 13
  misc_feature: MA Experiment 20001558 PARAMETER Experiment Name: At_Drought_Soil_Dry_P Parameter: Treatment Value: Drought vs. No Drought
  misc_feature: MA Experiment ID: 20001757 Result: Up-regulated in Transcription
  misc_feature: MA Experiment 20001757 PARAMETER Experiment Name: At_50mM_NH4NO3_L-to-H_P Parameter: Timepoint (hr) Value: 6
  misc_feature: MA Experiment 20001757 PARAMETER Experiment Name: At_50mM_NH4NO3_L-to-H_P Parameter: Tissue Value: Leaf
  misc_feature: MA Experiment 20001757 PARAMETER Experiment Name: At_50mM_NH4NO3_L-to-H_P Parameter: Treatment Value: 50mM NH4NO3 vs 100mM Mannitol
agggtttatatgaatttatgattcttcctcttaaaccctaatttcgtattcttactccttcctcgccaatcttcatcttcctcatgttttctctaattctccatggaagaaagtctgtggaattacagaaatggcgtaatttaagagttacagtgagcattgtgcaaaatgcatttccttttaccaccaaatcgttctcttctacaatagctaaagattcgagtccaaagggaagtactttcacagtctcttatctcgttgaatcattgggtttgactaaaaaacttgcagaaacaatctcaaagaaagtcaccttcgaagacaaggtaaatccagattctgttctgaatcttcttagaagtaatgggtttaaagattctcagatatctaggatcataagggcttacccacgattgcttgtaacagatgctgagaaatctcttcgtccaaagcttcagtttttaaagtctagaggagcttcaagctctgaggtcatagagattgtttcgaatgttccaacaatcttggataagaaaggtgaagaatctgttagtttatactatgatttcgttaaggacattatgcaagatggtaaaagtttgtgtatttcttgtccagagggaaagaaaggtaacagaattcgaaatatatcggttttgagagaattgggagtacctcagaagttgttgttttcattgcttatatctagatatcaacctgtttgtggtaaagagaagtttgaagaaagtttaaagaaagttgttgatatgggttttgatccggctaaatccaagtttgtggaagctttgcatgtagtttacgaaatgagcgagaaaacgatagaagagaaagtgaatgtgtataagaggttaggctttagtgaagccgagatatgggcgattttcaagaagtggccttactttttaaaattctctgagaagaagataattctgatgtttgaaacactgaagaagtgtggtttggtagaggaagagattatttcggtgttgaagagtcgtccacaatgcatacgatcttctgagcagaagatattagactctattgaaatgttcttaggcttaggattcagtagagatgatttcaagatgatggttaagcgatatccttgttgcactgcatattctggcgagacgctgaggaagaagtttgaggttttggtgaagatgatgaattggccgctagaggctgtggtcatgatccctacggtacttggatacagcttggagaagaggatagtgccaaggtctaacgtgatcaaagctctcatgtcgaaaggattgatcggaagtgaaaaccctccgatttcatctgtcttggtatgtactgatcaggagttcttgaaaaggtatgtgatgaagcatgacaagctagtgcctaagttgatggctatcttcaacagaggtcgtgtttcatagttaatcttttaacgcgtgaatagaactgaggaagaggagtttttatttactagtgtctgttaatgtctaaactgaaatccatttctgtaatagtcgtaacgaaaaatttaactactatatttgtggacatgtttagtgatttgaatttcaagttaag

SEQ ID NO: 90819 - protein, 450 aa, Arabidopsis thaliana
  peptide (1)..(450): Ceres Seq. ID no. 12725403
  misc_feature (88)..(427): Pfam Name: mTERF Pfam Description: mTERF
  misc_feature (1)..(450): Homolog of NCBI NO: 15232683 NR Description: putative protein; protein id: At3g46950.1, by cDNA: gi_15028090 [Arabidopsis thaliana]
  misc_feature (1)..(444): Homolog of NCBI NO: 15220660 NR Description: hypothetical protein; protein id: At1g61960.1
  misc_feature (1)..(444): Homolog of NCBI NO: 26450011 NR Description: unknown protein [Arabidopsis thaliana]
  misc_feature (1)..(450): Homolog of NCBI NO: 25345734 NR Description: hypothetical protein F19K23.4 [imported] - thaliana >gi|2160136|gb|AAB60758.1| F19K23.4 gene product
  misc_feature (1)..(450): Homolog of NCBI NO: 30696656 NR Description: expressed protein [Arabidopsis thaliana] unknown protein [Arabidopsis thaliana]
  misc_feature (22)..(450): Homolog of NCBI NO: 15220696 NR Description: hypothetical protein; protein id: At1g62090.1
  misc_feature (3)..(450): Homolog of NCBI NO: 15220717 NR Description: hypothetical protein; protein id: At1g62150.1 thaliana] >gi|26452931|dbj|BAC43542.1| unknown protein thaliana] >gi|28973555|gb|AAO64102.1| unknown protein
  misc_feature (3)..(450): Homolog of NCBI NO: 25345736 NR Description: hypothetical protein F19K23.9 [imported] - thaliana >gi|2160140|gb|AAB60762.1| F19K23.9 gene product
  misc_feature (1)..(444): Homolog of NCBI NO: 15237856 NR Description: putative protein; protein id: At5g23930.1 thaliana] >gi|10176860|dbj|BAB10066.1|
  misc_feature (124)..(300): Homolog of NCBI NO: 15221482 NR Description: hypothetical protein; protein id: At1g62490.1
MFSLILHGRKSVELQKWRNLRVTVSIVQNAFPFTTKSFSSTIAKDSSPKGSTFTVSYLVESLGLTKKLAETISKKVTFEDKVNPDSVLNLLRSNGFKDSQISRIIRAYPRLLVTDAEKSLRPKLQFLKSRGASSSEVIEIVSNVPTILDKKGEESVSLYYDFVKDIMQDGKSLCISCPEGKKGNRIRNISVLRELGVPQKLLFSLLISRYQPVCGKEKFEESLKKVVDMGFDPAKSKFVEALHVVYEMSEKTIEEKVNVYKRLGFSEAEIWAIFKKWPYFLKFSEKKIILMFETLKKCGLVEEEIISVLKSRPQCIRSSEQKILDSIEMFLGLGFSRDDFKMMVKRYPCCTAYSGETLRKKFEVLVKMMNWPLEAVVMIPTVLGYSLEKRIVPRSNVIKALMSKGLIGSENPPISSVLVCTDQEFLKRYVMKHDKLVPKLMAIFNRGRVS

SEQ ID NO: 90820 - protein, 284 aa, Arabidopsis thaliana
  peptide (1)..(284): Ceres Seq. ID no. 12725404
  misc_feature (1)..(261): Pfam Name: mTERF Pfam Description: mTERF
  misc_feature (1)..(284): Homolog of NCBI NO: 15232683 NR Description: putative protein; protein id: At3g46950.1, by cDNA: gi_15028090 [Arabidopsis thaliana]
  misc_feature (1)..(278): Homolog of NCBI NO: 15220660 NR Description: hypothetical protein; protein id: At1g61960.1
  misc_feature (1)..(278): Homolog of NCBI NO: 26450011 NR Description: unknown protein [Arabidopsis thaliana]
  misc_feature (1)..(284): Homolog of NCBI NO: 25345734 NR Description: hypothetical protein F19K23.4 [imported] - thaliana >gi|2160136|gb|AAB60758.1| F19K23.4 gene product
  misc_feature (1)..(284): Homolog of NCBI NO: 30696656 NR Description: expressed protein [Arabidopsis thaliana] unknown protein [Arabidopsis thaliana]
  misc_feature (1)..(284): Homolog of NCBI NO: 15220696 NR Description: hypothetical protein; protein id: At1g62090.1
  misc_feature (1)..(284): Homolog of NCBI NO: 15220717 NR Description: hypothetical protein; protein id: At1g62150.1 thaliana] >gi|26452931|dbj|BAC43542.1| unknown protein thaliana] >gi|28973555|gb|AAO64102.1| unknown protein
  misc_feature (1)..(284): Homolog of NCBI NO: 25345736 NR Description: hypothetical protein F19K23.9 [imported] - thaliana >gi|2160140|gb|AAB60762.1| F19K23.9 gene product
  misc_feature (1)..(278): Homolog of NCBI NO: 15237856 NR Description: putative protein; protein id: At5g23930.1 thaliana] >gi|10176860|dbj|BAB10066.1|
  misc_feature (1)..(134): Homolog of NCBI NO: 15221482 NR Description: hypothetical protein; protein id: At1g62490.1
MQDGKSLCISCPEGKKGNRIRNISVLRELGVPQKLLFSLLISRYQPVCGKEKFEESLKKVVDMGFDPAKSKFVEALHVVYEMSEKTIEEKVNVYKRLGFSEAEIWAIFKKWPYFLKFSEKKIILMFETLKKCGLVEEEIISVLKSRPQCIRSSEQKILDSIEMFLGLGFSRDDFKMMVKRYPCCTAYSGETLRKKFEVLVKMMNWPLEAVVMIPTVLGYSLEKRIVPRSNVIKALMSKGLIGSENPPISSVLVCTDQEFLKRYVMKHDKLVPKLMAIFNRGRVS

SEQ ID NO: 90821 - DNA, 2775 bp, Arabidopsis thaliana
  misc_feature (1)..(2775): Ceres Seq. ID no. 12725424
  misc_feature: MA Experiment ID: 20000315 Result: Down-regulated in Transcription
  misc_feature: MA Experiment 20000315 PARAMETER Experiment Name: At_14day_Shoots-Roots_Sub_P Parameter: Age (day) Value: 14
  misc_feature: MA Experiment 20000315 PARAMETER Experiment Name: At_14day_Shoots-Roots_Sub_P Parameter: Organism Value: A. thaliana
  misc_feature: MA Experiment 20000315 PARAMETER Experiment Name: At_14day_Shoots-Roots_Sub_P Parameter: Plant Line Value: WS
  misc_feature: MA Experiment 20000315 PARAMETER Experiment Name: At_14day_Shoots-Roots_Sub_P Parameter: Tissue Value: Shoots vs. Whole Plant
  misc_feature: MA Experiment ID: 20000327 Result: Down-regulated in Transcription
  misc_feature: MA Experiment 20000327 PARAMETER Experiment Name: At_42deg_Heat_Sub_P Parameter: Age (day) Value: 14
  misc_feature: MA Experiment 20000327 PARAMETER Experiment Name: At_42deg_Heat_Sub_P Parameter: Organism Value: A. thaliana
  misc_feature: MA Experiment 20000327 PARAMETER Experiment Name: At_42deg_Heat_Sub_P Parameter: Plant Line Value: WS
  misc_feature: MA Experiment 20000327 PARAMETER Experiment Name: At_42deg_Heat_Sub_P Parameter: Temperature (deg C) Value: 42 vs. 22
  misc_feature: MA Experiment 20000327 PARAMETER Experiment Name: At_42deg_Heat_Sub_P Parameter: Timepoint (hr) Value: 1
  misc_feature: MA Experiment 20000327 PARAMETER Experiment Name: At_42deg_Heat_Sub_P Parameter: Tissue Value: Aerial
  misc_feature: MA Experiment ID: 20000328 Result: Down-regulated in Transcription
  misc_feature: MA Experiment 20000328 PARAMETER Experiment Name: At_42deg_Heat_Sub_P Parameter: Age (day) Value: 14
  misc_feature: MA Experiment 20000328 PARAMETER Experiment Name: At_42deg_Heat_Sub_P Parameter: Organism Value: A. thaliana
  misc_feature: MA Experiment 20000328 PARAMETER Experiment Name: At_42deg_Heat_Sub_P Parameter: Plant Line Value: WS
  misc_feature: MA Experiment 20000328 PARAMETER Experiment Name: At_42deg_Heat_Sub_P Parameter: Temperature (deg C) Value: 42 vs. 22
  misc_feature: MA Experiment 20000328 PARAMETER Experiment Name: At_42deg_Heat_Sub_P Parameter: Timepoint (hr) Value: 6
  misc_feature: MA Experiment 20000328 PARAMETER Experiment Name: At_42deg_Heat_Sub_P Parameter: Tissue Value: Aerial
agggtttcgaaataatgactactacattcgaatttctgcaaccaagaatccacggatttgcaacttgttgtagtagtaatagtctattgtactcgaaagcttcgagatttttcaacgatcgttgtagggtttatcgccaaaatccgaatcggtttgtctccaattcaatcacgcttcctctgcagaagaaacaagttacagtgttgagaaatcacgaaaggtttaatctttgggatgggttttcaagaaagaagagtagattagttgtgaattgtcaagaagatgatcagaacgagagttctagtgaggaggaagaaagcagtcagagtactccggcgaagtcggagaggaaaagagagaagaaagaagataaggtgtggtggtcaaagggcaagaaatggcagtggcagccaataatccaagcgcaagggattggagttttgttgttgcaattgagtgttgttatgtttgtgatgcgattgcttcgacctggtatacctttacctggatcggagcctcgaattcagacgacttttgtgagtgtaccgtatagtgagttcttaagtaaagttaacagtaaccaggtgcagaaagtggaggttgatggggttcaagttttgtttaagttaagagatgatgggaagtggcaagagagtgaaactagtaggttgtctcagtcgtctgaatcgttgttaagaactgtggctcctacgaaaagggttgtgtattccactactaggccgggtgatatcaaaacaccgtatgagaagatgcttgggaataatgtggaatttggatcgcctgagaagcgttctggtggcttcttcaactctgcattgatagctcttttctacatagcggtacttgctgggcttattcgattccctgttagcttctccacgagttcaaccggccagcttaggacccgaaaggctggtggtcctgatgggggaaaagtctctggtggaggtgaaacaatcacttttgcggatgttgcaggtgttgatgaagcaaaggaagagctagaagaaatcgtggaatttcttaggaatcctgaaaagtatgtccgtctaggtgcacgtcctccgcgtggtgtcctattggttggtcttcccggaacagggaaaacccttcttgcaaaggctgttgctggggaagctgaagtccccttcataagttgctctgcaagtgagtttgtagagctgtatgtcggtatgggtgcctcacgtgtaagggatctttttgcacgggccaagaaggaagctccatcgattatatttattgatgagatagatgctgtggcaaaaagccgtgatggtaaattccgaatggggagcaacgatgaaagggagcaaactttaaatcagttgctcactgagatggatggttttgacagcaattctgcggttatcgttcttggagctacaaatcgtgccgatgtcttagatccggccctgcgtcgtcctgggagatttgatcgtgttgttacggtggaaacgccagacaaaattggaagagaatccattttgagagtacatgtgtcaaagaaagagcttcctttgggagatgatgtcaacctcggtagtattgcctcaatgaccactggtttcacgggggcagatcttgcaaacttggtaaatgaggctgccttgctagctggaagaaagaacaagacgaacgttgagaaaattgacttcattcaagctgtggagcgatcaatagcgggcatagagaagaaatctgcaagattaaaaggcaatgagaaggcagtggtcgcaaggcatgaagctgggcatgcagtggttggtaccgctgttgcaaatcttcttactggacagccacgtgttgagaaattaagcatattgccaagaacaggaggggcattgggatttacatacattcctcctactagtgaagacagatatttactcttcattgatgagctgcttgggcgtttagttacccttcttggaggtcgtgcagctgaagaagttgtttactcagggcgtatatcaacaggtgcatttgatgatataaggcgggcaactgatatggcatacaaggcagtagctgaatacggtcttaaccaaaaaatcggacctgtgtctgtggctacactttctggtggtgggattgacgattctggaggctcgccatggggaagagatcaggggaaactagttgatcttgttcaaaaagaagtgacaattttgttacaatctgctctcgatgttgcgctgtctgttgtacgcgctaatccagatgtattggaagggcttggtgctcaacttgaagagaaagagaaagtagaaggtgaagaactgcagaagtggttaagcatggtggttgcaccagaagaactcgcagtctttgtcgaaggaaagcaagagcttttgctcccagcacaagctagctccagttaacaactactctgttctatcatcaattatagctataaagacagtatctaacacggatcatcagctctttccttgctgccttctgtatctccaggtcagatctggttatcaccattgccctttagcatccatggttccagcatgcatagaacacttgaatcaaacttgaagaaccatattgggatatgacttttggtgataactcatagattttggtggatgtgttttaagatttggtattcttgctagatacagtctctttaacttggcaaaaaagtgtataattgattcatatgtataaaaagccagactgatatgtgtaaagatcttaaagacccccacaaaaggttgcaac

SEQ ID NO: 90822 - protein, 806 aa, Arabidopsis thaliana
  peptide (1)..(806): Ceres Seq. ID no. 12725425
  misc_feature (560)..(777): Pfam Name: Peptidase family M41 Pfam Description: Peptidase family M41
  misc_feature (231)..(794): Homolog of NCBI NO: 17232428 NR Description: cell division protein [Nostoc sp. PCC 7120]
  misc_feature (216)..(781): Homolog of NCBI NO: 23124397 NR Description: hypothetical protein [Nostoc punctiforme]
  misc_feature (216)..(784): Homolog of NCBI NO: 22298071 NR Description: cell division protein [Thermosynechococcus BP-1] >gi|22294249|dbj|BAC08080.1| cell division protein
  misc_feature (241)..(788): Homolog of NCBI NO: 33866121 NR Description: cell division protein FtsH3 [Synechococcus sp. WH >gi|33639096|emb|CAE08102.1| cell division protein FtsH3
  misc_feature (241)..(784): Homolog of NCBI NO: 33861820 NR Description: cell division protein FtsH3 [Prochlorococcus subsp. pastoris str. CCMP1378] >gi|33640188|emb|CAE19723.1| cell protein FtsH3 [Prochlorococcus marinus subsp. pastoris str.
  misc_feature (217)..(786): Homolog of NCBI NO: 33240787 NR Description: Cell division protein FtsH [Prochlorococcus subsp. marinus str. CCMP1375] >gi|33238316|gb|AAQ00382.1| Cell protein FtsH [Prochlorococcus marinus subsp. marinus str.
  misc_feature (181)..(789): Homolog of NCBI NO: 16330069 NR Description: cell division protein; FtsH [Synechocystis sp.
  misc_feature (243)..(789): Homolog of NCBI NO: 33862651 NR Description: cell division protein FtsH3 [Prochlorococcus str. MIT 9313] >gi|33634567|emb|CAE20553.1| cell division protein
  misc_feature (322)..(783): Homolog of NCBI NO: 37522710 NR Description: cell division protein [Gloeobacter violaceus]
  misc_feature (255)..(784): Homolog of NCBI NO: 23043520 NR Description: hypothetical protein [Trichodesmium erythraeum
GFEIMTTTFEFLQPRIHGFATCCSSNSLLYSKASRFFNDRCRVYRQNPNRFVSNSITLPLQKKQVTVLRNHERFNLWDGFSRKKSRLVVNCQEDDQNESSSEEEESSQSTPAKSERKREKKEDKVWWSKGKKWQWQPIIQAQGIGVLLLQLSVVMFVMRLLRPGIPLPGSEPRIQTTFVSVPYSEFLSKVNSNQVQKVEVDGVQVLFKLRDDGKWQESETSRLSQSSESLLRTVAPTKRVVYSTTRPGDIKTPYEKMLGNNVEFGSPEKRSGGFFNSALIALFYIAVLAGLIRFPVSFSTSSTGQLRTRKAGGPDGGKVSGGGETITFADVAGVDEAKEELEEIVEFLRNPEKYVRLGARPPRGVLLVGLPGTGKTLLAKAVAGEAEVPFISCSASEFVELYVGMGASRVRDLFARAKKEAPSIIFIDEIDAVAKSRDGKFRMGSNDEREQTLNQLLTEMDGFDSNSAVIVLGATNRADVLDPALRRPGRFDRVVTVETPDKIGRESILRVHVSKKELPLGDDVNLGSIASMTTGFTGADLANLVNEAALLAGRKNKTNVEKIDFIQAVERSIAGIEKKSARLKGNEKAVVARHEAGHAVVGTAVANLLTGQPRVEKLSILPRTGGALGFTYIPPTSEDRYLLFIDELLGRLVTLLGGRAAEEVVYSGRISTGAFDDIRRATDMAYKAVAEYGLNQKIGPVSVATLSGGGIDDSGGSPWGRDQGKLVDLVQKEVTILLQSALDVALSVVRANPDVLEGLGAQLEEKEKVEGEELQKWLSMVVAPEELAVFVEGKQELLLPAQASSS

SEQ ID NO: 90823 - protein, 802 aa, Arabidopsis thaliana
  peptide (1)..(802): Ceres Seq. ID no. 12725426
  misc_feature (556)..(773): Pfam Name: Peptidase family M41 Pfam Description: Peptidase family M41
  misc_feature (227)..(790): Homolog of NCBI NO: 17232428 NR Description: cell division protein [Nostoc sp. PCC 7120]
  misc_feature (212)..(777): Homolog of NCBI NO: 23124397 NR Description: hypothetical protein [Nostoc punctiforme]
  misc_feature (212)..(780): Homolog of NCBI NO: 22298071 NR Description: cell division protein [Thermosynechococcus BP-1] >gi|22294249|dbj|BAC08080.1| cell division protein
  misc_feature (237)..(784): Homolog of NCBI NO: 33866121 NR Description: cell division protein FtsH3 [Synechococcus sp. WH >gi|33639096|emb|CAE08102.1| cell division protein FtsH3
  misc_feature (237)..(780): Homolog of NCBI NO: 33861820 NR Description: cell division protein FtsH3 [Prochlorococcus subsp. pastoris str. CCMP1378] >gi|33640188|emb|CAE19723.1| cell protein FtsH3 [Prochlorococcus marinus subsp. pastoris str.
  misc_feature (213)..(782): Homolog of NCBI NO: 33240787 NR Description: Cell division protein FtsH [Prochlorococcus subsp. marinus str. CCMP1375] >gi|33238316|gb|AAQ00382.1| Cell protein FtsH [Prochlorococcus marinus subsp. marinus str.
  misc_feature (177)..(785): Homolog of NCBI NO: 16330069 NR Description: cell division protein; FtsH [Synechocystis sp.
  misc_feature (239)..(785): Homolog of NCBI NO: 33862651 NR Description: cell division protein FtsH3 [Prochlorococcus str. MIT 9313] >gi|33634567|emb|CAE20553.1| cell division protein
  misc_feature (318)..(779): Homolog of NCBI NO: 37522710 NR Description: cell division protein [Gloeobacter violaceus]
  misc_feature (251)..(780): Homolog of NCBI NO: 23043520 NR Description: hypothetical protein [Trichodesmium erythraeum
MTTTFEFLQPRIHGFATCCSSNSLLYSKASRFFNDRCRVYRQNPNRFVSNSITLPLQKKQVTVLRNHERFNLWDGFSRKKSRLVVNCQEDDQNESSSEEEESSQSTPAKSERKREKKEDKVWWSKGKKWQWQPIIQAQGIGVLLLQLSVVMFVMRLLRPGIPLPGSEPRIQTTFVSVPYSEFLSKVNSNQVQKVEVDGVQVLFKLRDDGKWQESETSRLSQSSESLLRTVAPTKRVVYSTTRPGDIKTPYEKMLGNNVEFGSPEKRSGGFFNSALIALFYIAVLAGLIRFPVSFSTSSTGQLRTRKAGGPDGGKVSGGGETITFADVAGVDEAKEELEEIVEFLRNPEKYVRLGARPPRGVLLVGLPGTGKTLLAKAVAGEAEVPFISCSASEFVELYVGMGASRVRDLFARAKKEAPSIIFIDEIDAVAKSRDGKFRMGSNDEREQTLNQLLTEMDGFDSNSAVIVLGATNRADVLDPALRRPGRFDRVVTVETPDKIGRESILRVHVSKKELPLGDDVNLGSIASMTTGFTGADLANLVNEAALLAGRKNKTNVEKIDFIQAVERSIAGIEKKSARLKGNEKAVVARHEAGHAVVGTAVANLLTGQPRVEKLSILPRTGGALGFTYIPPTSEDRYLLFIDELLGRLVTLLGGRAAEEVVYSGRISTGAFDDIRRATDMAYKAVAEYGLNQKIGPVSVATLSGGGIDDSGGSPWGRDQGKLVDLVQKEVTILLQSALDVALSVVRANPDVLEGLGAQLEEKEKVEGEELQKWLSMVVAPEELAVFVEGKQELLLPAQASSS

SEQ ID NO: 90824 - protein, 652 aa, Arabidopsis thaliana
  peptide (1)..(652): Ceres Seq. ID no. 12725427
  misc_feature (406)..(623): Pfam Name: Peptidase family M41 Pfam Description: Peptidase family M41
  misc_feature (77)..(640): Homolog of NCBI NO: 17232428 NR Description: cell division protein [Nostoc sp. PCC 7120]
  misc_feature (62)..(627): Homolog of NCBI NO: 23124397 NR Description: hypothetical protein [Nostoc punctiforme]
  misc_feature (62)..(630): Homolog of NCBI NO: 22298071 NR Description: cell division protein [Thermosynechococcus BP-1] >gi|22294249|dbj|BAC08080.1| cell division protein
  misc_feature (87)..(634): Homolog of NCBI NO: 33866121 NR Description: cell division protein FtsH3 [Synechococcus sp. WH >gi|33639096|emb|CAE08102.1| cell division protein FtsH3
  misc_feature (87)..(630): Homolog of NCBI NO: 33861820 NR Description: cell division protein FtsH3 [Prochlorococcus subsp. pastoris str. CCMP1378] >gi|33640188|emb|CAE19723.1| cell protein FtsH3 [Prochlorococcus marinus subsp. pastoris str.
  misc_feature (63)..(632): Homolog of NCBI NO: 33240787 NR Description: Cell division protein FtsH [Prochlorococcus subsp. marinus str. CCMP1375] >gi|33238316|gb|AAQ00382.1| Cell protein FtsH [Prochlorococcus marinus subsp. marinus str.
  misc_feature (27)..(635): Homolog of NCBI NO: 16330069 NR Description: cell division protein; FtsH [Synechocystis sp.
  misc_feature (89)..(635): Homolog of NCBI NO: 33862651 NR Description: cell division protein FtsH3 [Prochlorococcus str. MIT 9313] >gi|33634567|emb|CAE20553.1| cell division protein
  misc_feature (168)..(629): Homolog of NCBI NO: 37522710 NR Description: cell division protein [Gloeobacter violaceus]
  misc_feature (101)..(630): Homolog of NCBI NO: 23043520 NR Description: hypothetical protein [Trichodesmium erythraeum
MFVMRLLRPGIPLPGSEPRIQTTFVSVPYSEFLSKVNSNQVQKVEVDGVQVLFKLRDDGKWQESETSRLSQSSESLLRTVAPTKRVVYSTTRPGDIKTPYEKMLGNNVEFGSPEKRSGGFFNSALIALFYIAVLAGLIRFPVSFSTSSTGQLRTRKAGGPDGGKVSGGGETITFADVAGVDEAKEELEEIVEFLRNPEKYVRLGARPPRGVLLVGLPGTGKTLLAKAVAGEAEVPFISCSASEFVELYVGMGASRVRDLFARAKKEAPSIIFIDEIDAVAKSRDGKFRMGSNDEREQTLNQLLTEMDGFDSNSAVIVLGATNRADVLDPALRRPGRFDRVVTVETPDKIGRESILRVHVSKKELPLGDDVNLGSIASMTTGFTGADLANLVNEAALLAGRKNKTNVEKIDFIQAVERSIAGIEKKSARLKGNEKAVVARHEAGHAVVGTAVANLLTGQPRVEKLSILPRTGGALGFTYIPPTSEDRYLLFIDELLGRLVTLLGGRAAEEVVYSGRISTGAFDDIRRATDMAYKAVAEYGLNQKIGPVSVATLSGGGIDDSGGSPWGRDQGKLVDLVQKEVTILLQSALDVALSVVRANPDVLEGLGAQLEEKEKVEGEELQKWLSMVVAPEELAVFVEGKQELLLPAQASSS

SEQ ID NO: 90825 - DNA, 3030 bp, Arabidopsis thaliana
  misc_feature (1)..(3030): Ceres Seq. ID no. 12725428
  misc_feature: MA Experiment ID: 20000347 Result: Up-regulated in Transcription
  misc_feature: MA Experiment 20000347 PARAMETER Experiment Name: At_2mM_SA_Sub_P Parameter: Age (day) Value: 14
  misc_feature: MA Experiment 20000347 PARAMETER Experiment Name: At_2mM_SA_Sub_P Parameter: Organism Value: A. thaliana
  misc_feature: MA Experiment 20000347 PARAMETER Experiment Name: At_2mM_SA_Sub_P Parameter: Plant Line Value: WS
  misc_feature: MA Experiment 20000347 PARAMETER Experiment Name: At_2mM_SA_Sub_P Parameter: Timepoint (hr) Value: 6
  misc_feature: MA Experiment 20000347 PARAMETER Experiment Name: At_2mM_SA_Sub_P Parameter: Tissue Value: Aerial
  misc_feature: MA Experiment 20000347 PARAMETER Experiment Name: At_2mM_SA_Sub_P Parameter: Treatment Value: 2mM SA vs. No Treatment
  misc_feature: MA Experiment ID: 20000348 Result: Down-regulated in Transcription
  misc_feature: MA Experiment 20000348 PARAMETER Experiment Name: At_100uM_ABA_Sub_P Parameter: Age (day) Value: 14
  misc_feature: MA Experiment 20000348 PARAMETER Experiment Name: At_100uM_ABA_Sub_P Parameter: Organism Value: A. thaliana
  misc_feature: MA Experiment 20000348 PARAMETER Experiment Name: At_100uM_ABA_Sub_P Parameter: Plant Line Value: WS
  misc_feature: MA Experiment 20000348 PARAMETER Experiment Name: At_100uM_ABA_Sub_P Parameter: Timepoint (hr) Value: 1
  misc_feature: MA Experiment 20000348 PARAMETER Experiment Name: At_100uM_ABA_Sub_P Parameter: Tissue Value: Aerial
  misc_feature: MA Experiment 20000348 PARAMETER Experiment Name: At_100uM_ABA_Sub_P Parameter: Treatment Value: 100uM ABA vs. No Treatment
atgagactatttcttttacttgctttcaatgctctcatgcaactcgaagcatatggttttaccgatgaaagtgataggcaagcgttgttggagatcaagtctcaagtttctgaaagcaaaagggatgccttgtccgcgtggaataactcattccctctctgcagctggaagtgggttagatgtggccgcaaacacaagagagttactcgtttggacctcggaggattgcagttgggaggagtgatatcaccatctattggtaatctttcgtttctcatatatcttgacctctctaataactcttttggtggaaccatccctcaagagatgggaaacttgtttagacttaaatatttggctgtgggctttaattatctggaaggagagattccagccagtttgtccaactgctctagattgttgtaccttgatttattttcaaacaatcttggagacggtgttccttcagaactagggtcattgagaaagcttctttatctatatcttggtctaaacgacctcaaaggaaagttccccgtatttatacgaaacttgacgtctctaatagtgctcaacttgggatataatcatctggaaggagaaattccagatgatatagctatgctgagtcaaatggtgtctcttacattaacaatgaacaacttctctggcgtttttcctcctgctttctacaacttgtcctcacttgagaatttatacctccttggtaatggtttctcgggtaacttgaagcctgattttggtaatctgctaccaaacattcatgagttatctttgcatggaaattttctaacaggagccatcccaacaacacttgccaatatttcaactctggaaatgtttggaattggtaaaaacaggatgacaggaagtatctctcccaactttggaaaactagagaatttgcattacctagaacttgctaacaattctttgggaagttactcttttggagatcttgcatttcttgatgctttgactaattgctcccatttgcatgggttatctgtgagttacaataggcttgggggtgctttgcctacatccattgtcaatatgtccacggaactcaccgttttgaaccttaaaggaaacctcatttatggaagcattcctcatgatattggaaatctcataggcctacaatcacttttgttggcagataatctattaacaggaccactcccaacctctcttggaaatcttgtagggctcggggaattaattttgttttcaaataggttttctggagagataccctcttttataggcaaccttactcagttagtaaaactatatttatccaacaatagttttgaaggaatcgttcctccgagtcttggtgattgtagtcacatgctcgacttacagattgggtataataagttaaatgggactatacctaaggagatcatgcaaatcccaacccttgttcacctcaacatggaatctaattctttgagtggctctctaccaaacgatattggaagattacaaaatcttgttgagctattacttgggaataataacttatcaggacatctcccacaaactttgggaaaatgtctttcgatggaagttatttatctacaagaaaaccattttgatggaaccattccagatataaaagggttgatgggtgttaaaaacgttgatttgtcaaacaataatctctctggaagtatatctgaatattttgaaaacttttccaagttggaatatctcaatctatccgataacaatttcgagggaagagtcccaacagaaggaatatttcaaaatgctactttagtttcagtattcggaaacaaaaatctttgtggaagcatcaaggaactgaaactaaagccatgcattgcccaagcaccaccagtggagacaaggcatccatctcttttgaagaaagttgcgattggggtcagcgtaggcatagctttgcttttgctattgttcatagtttctctaagctggttcaaaaaaagaaagaacaaccagaagatcaataattcagctccttttacattggagattttccatgaaaagctaagttatggagatctacgaaatgcgacagatggcttctcttcgagcaatatagttgggtcaggtagttttggtactgtgtttaaggcattgctccagacggagaacaagattgttgcagtgaaagttctaaacatgcagagacgtggagctatgaagagctttatggcagaatgtgaatctttgaaggatataaggcatcgtaatctcgtgaaactattgacagcttgcgctagtattgatttccaaggtaacgaattcagagctctcatctatgagttcatgccgaatggaagtttggataaatggctgcacccagaggaagtcgaagagattcataggccctcaagaactttgacacttcttgaaaggcttaacattgccatagacgtggcttctgttttggactatcttcatgttcactgtcatgagcctatagctcattgcgatcttaagccaagcaacatacttctcgacgatgatctaactgcccatgttagcgacttcggtctcgctcgtcttctcctcaaattcgaccaggagtctttcttcaaccaactaagctcagctggtgttagaggaaccattgggtatgccgcaccagaatatggaatgggaggacaaccgtcaatacacggtgatgtatatagctttggggttctcgttttggaaatgttcactggaaaaagaccaaccaatgagttatttggaggaaactttaccctgaacagctacaccaaggcggccttgccagaaagagttttggacattgcagacaaatcgattcttcatagtggtctcagagttggtttccctgtacttgagtgcttgaaagggattttggatgtgggacttagatgttgtgaagaatctccgctgaaccggttggcaacgagtgaagcagccaaggagttaatctcaatcagagagagattctttaaaacccggagaacagccagacgttga

SEQ ID NO: 90826 - protein, 1009 aa, Arabidopsis thaliana
  peptide (1)..(1009): Ceres Seq. ID no. 12725429
  misc_feature (1)..(1006): Homolog of NCBI NO: 15241369 NR Description: leucine-rich repeat transmembrane protein kinase, protein id: At5g20480.1, supported by cDNA: gi_18700170
  misc_feature (1)..(1006): Homolog of NCBI NO: 18700171 NR Description: AT5g20480/F7C8_70 [Arabidopsis thaliana]
  misc_feature (21)..(1006): Homolog of NCBI NO: 15232728 NR Description: leucine-rich repeat transmembrane protein kinase, protein id: At3g47110.1 [Arabidopsis thaliana]
  misc_feature (3)..(998): Homolog of NCBI NO: 2130082 NR Description: protein kinase Xa21 (EC 2.7.1.-), receptor type
  misc_feature (25)..(998): Homolog of NCBI NO: 30421165 NR Description: putative receptor kinase [Hordeum vulgare]
  misc_feature (67)..(996): Homolog of NCBI NO: 37533650 NR Description: putative Receptor-like protein kinase [Oryza
  misc_feature (71)..(1000): Homolog of NCBI NO: 34904254 NR Description: Oryza sativa leucine rich repeat containing
  misc_feature (68)..(923): Homolog of NCBI NO: 37530616 NR Description: putative protein kinase [Oryza sativa (japonica group)] >gi|16924042|gb|AAL31654.1| Putative protein kinase sativa] >gi|20042880|gb|AAM08708.1| Putative protein kinase
  misc_feature (64)..(919): Homolog of NCBI NO: 18086327 NR Description: AT4g08850/T32A17_160 [Arabidopsis thaliana]
  misc_feature (64)..(919): Homolog of NCBI NO: 25407456 NR Description: receptor protein kinase-like protein [imported] -
MRLFLLLAFNALMQLEAYGFTDESDRQALLEIKSQVSESKRDALSAWNNSFPLCSWKWVRCGRKHKRVTRLDLGGLQLGGVISPSIGNLSFLIYLDLSNNSFGGTIPQEMGNLFRLKYLAVGFNYLEGEIPASLSNCSRLLYLDLFSNNLGDGVPSELGSLRKLLYLYLGLNDLKGKFPVFIRNLTSLIVLNLGYNHLEGEIPDDIAMLSQMVSLTLTMNNFSGVFPPAFYNLSSLENLYLLGNGFSGNLKPDFGNLLPNIHELSLHGNFLTGAIPTTLANISTLEMFGIGKNRMTGSISPNFGKLENLHYLELANNSLGSYSFGDLAFLDALTNCSHLHGLSVSYNRLGGALPTSIVNMSTELTVLNLKGNLIYGSIPHDIGNLIGLQSLLLADNLLTGPLPTSLGNLVGLGELILFSNRFSGEIPSFIGNLTQLVKLYLSNNSFEGIVPPSLGDCSHMLDLQIGYNKLNGTIPKEIMQIPTLVHLNMESNSLSGSLPNDIGRLQNLVELLLGNNNLSGHLPQTLGKCLSMEVIYLQENHFDGTIPDIKGLMGVKNVDLSNNNLSGSISEYFENFSKLEYLNLSDNNFEGRVPTEGIFQNATLVSVFGNKNLCGSIKELKLKPCIAQAPPVETRHPSLLKKVAIGVSVGIALLLLLFIVSLSWFKKRKNNQKINNSAPFTLEIFHEKLSYGDLRNATDGFSSSNIVGSGSFGTVFKALLQTENKIVAVKVLNMQRRGAMKSFMAECESLKDIRHRNLVKLLTACASIDFQGNEFRALIYEFMPNGSLDKWLHPEEVEEIHRPSRTLTLLERLNIAIDVASVLDYLHVHCHEPIAHCDLKPSNILLDDDLTAHVSDFGLARLLLKFDQESFFNQLSSAGVRGTIGYAAPEYGMGGQPSIHGDVYSFGVLVLEMFTGKRPTNELFGGNFTLNSYTKAALPERVLDIADKSILHSGLRVGFPVLECLKGILDVGLRCCEESPLNRLATSEAAKELISIRERFFKTRRTARR

SEQ ID NO: 90827 - protein, 997 aa, Arabidopsis thaliana
  peptide (1)..(997): Ceres Seq. ID no. 12725430
  misc_feature (1)..(994): Homolog of NCBI NO: 15241369 NR Description: leucine-rich repeat transmembrane protein kinase, protein id: At5g20480.1, supported by cDNA: gi_18700170
  misc_feature (1)..(994): Homolog of NCBI NO: 18700171 NR Description: AT5g20480/F7C8_70 [Arabidopsis thaliana]
  misc_feature (9)..(994): Homolog of NCBI NO: 15232728 NR Description: leucine-rich repeat transmembrane protein kinase, protein id: At3g47110.1 [Arabidopsis thaliana]
  misc_feature (1)..(986): Homolog of NCBI NO: 2130082 NR Description: protein kinase Xa21 (EC 2.7.1.-), receptor type
  misc_feature (13)..(986): Homolog of NCBI NO: 30421165 NR Description: putative receptor kinase [Hordeum vulgare]
  misc_feature (55)..(984): Homolog of NCBI NO: 37533650 NR Description: putative Receptor-like protein kinase [Oryza
  misc_feature (59)..(988): Homolog of NCBI NO: 34904254 NR Description: Oryza sativa leucine rich repeat containing
  misc_feature (56)..(911): Homolog of NCBI NO: 37530616 NR Description: putative protein kinase [Oryza sativa (japonica group)] >gi|16924042|gb|AAL31654.1| Putative protein kinase sativa] >gi|20042880|gb|AAM08708.1| Putative protein kinase
  misc_feature (52)..(907): Homolog of NCBI NO: 18086327 NR Description: AT4g08850/T32A17_160 [Arabidopsis thaliana]
  misc_feature (52)..(907): Homolog of NCBI NO: 25407456 NR Description: receptor protein kinase-like protein [imported] -
MQLEAYGFTDESDRQALLEIKSQVSESKRDALSAWNNSFPLCSWKWVRCGRKHKRVTRLDLGGLQLGGVISPSIGNLSFLIYLDLSNNSFGGTIPQEMGNLFRLKYLAVGFNYLEGEIPASLSNCSRLLYLDLFSNNLGDGVPSELGSLRKLLYLYLGLNDLKGKFPVFIRNLTSLIVLNLGYNHLEGEIPDDIAMLSQMVSLTLTMNNFSGVFPPAFYNLSSLENLYLLGNGFSGNLKPDFGNLLPNIHELSLHGNFLTGAIPTTLANISTLEMFGIGKNRMTGSISPNFGKLENLHYLELANNSLGSYSFGDLAFLDALTNCSHLHGLSVSYNRLGGALPTSIVNMSTELTVLNLKGNLIYGSIPHDIGNLIGLQSLLLADNLLTGPLPTSLGNLVGLGELILFSNRFSGEIPSFIGNLTQLVKLYLSNNSFEGIVPPSLGDCSHMLDLQIGYNKLNGTIPKEIMQIPTLVHLNMESNSLSGSLPNDIGRLQNLVELLLGNNNLSGHLPQTLGKCLSMEVIYLQENHFDGTIPDIKGLMGVKNVDLSNNNLSGSISEYFENFSKLEYLNLSDNNFEGRVPTEGIFQNATLVSVFGNKNLCGSIKELKLKPCIAQAPPVETRHPSLLKKVAIGVSVGIALLLLLFIVSLSWFKKRKNNQKINNSAPFTLEIFHEKLSYGDLRNATDGFSSSNIVGSGSFGTVFKALLQTENKIVAVKVLNMQRRGAMKSFMAECESLKDIRHRNLVKLLTACASIDFQGNEFRALIYEFMPNGSLDKWLHPEEVEEIHRPSRTLTLLERLNIAIDVASVLDYLHVHCHEPIAHCDLKPSNILLDDDLTAHVSDFGLARLLLKFDQESFFNQLSSAGVRGTIGYAAPEYGMGGQPSIHGDVYSFGVLVLEMFTGKRPTNELFGGNFTLNSYTKAALPERVLDIADKSILHSGLRVGFPVLECLKGILDVGLRCCEESPLNRLATSEAAKELISIRERFFKTRRTARR

SEQ ID NO: 90828 - protein, 900 aa, Arabidopsis thaliana
  peptide (1)..(900): Ceres Seq. ID no. 12725431
  misc_feature (1)..(897): Homolog of NCBI NO: 15241369 NR Description: leucine-rich repeat transmembrane protein kinase, protein id: At5g20480.1, supported by cDNA: gi_18700170
  misc_feature (1)..(897): Homolog of NCBI NO: 18700171 NR Description: AT5g20480/F7C8_70 [Arabidopsis thaliana]
  misc_feature (1)..(897): Homolog of NCBI NO: 15232728 NR Description: leucine-rich repeat transmembrane protein kinase, protein id: At3g47110.1 [Arabidopsis thaliana]
  misc_feature (1)..(889): Homolog of NCBI NO: 2130082 NR Description: protein kinase Xa21 (EC 2.7.1.-), receptor type
  misc_feature (1)..(889): Homolog of NCBI NO: 30421165 NR Description: putative receptor kinase [Hordeum vulgare]
  misc_feature (1)..(887): Homolog of NCBI NO: 37533650 NR Description: putative Receptor-like protein kinase [Oryza
  misc_feature (1)..(891): Homolog of NCBI NO: 34904254 NR Description: Oryza sativa leucine rich repeat containing
  misc_feature (1)..(814): Homolog of NCBI NO: 37530616 NR Description: putative protein kinase [Oryza sativa (japonica group)] >gi|16924042|gb|AAL31654.1| Putative protein kinase sativa] >gi|20042880|gb|AAM08708.1| Putative protein kinase
  misc_feature (1)..(810): Homolog of NCBI NO: 18086327 NR Description: AT4g08850/T32A17_160 [Arabidopsis thaliana]
  misc_feature (1)..(810): Homolog of NCBI NO: 25407456 NR Description: receptor protein kinase-like protein [imported] -
MGNLFRLKYLAVGFNYLEGEIPASLSNCSRLLYLDLFSNNLGDGVPSELGSLRKLLYLYLGLNDLKGKFPVFIRNLTSLIVLNLGYNHLEGEIPDDIAMLSQMVSLTLTMNNFSGVFPPAFYNLSSLENLYLLGNGFSGNLKPDFGNLLPNIHELSLHGNFLTGAIPTTLANISTLEMFGIGKNRMTGSISPNFGKLENLHYLELANNSLGSYSFGDLAFLDALTNCSHLHGLSVSYNRLGGALPTSIVNMSTELTVLNLKGNLIYGSIPHDIGNLIGLQSLLLADNLLTGPLPTSLGNLVGLGELILFSNRFSGEIPSFIGNLTQLVKLYLSNNSFEGIVPPSLGDCSHMLDLQIGYNKLNGTIPKEIMQIPTLVHLNMESNSLSGSLPNDIGRLQNLVELLLGNNNLSGHLPQTLGKCLSMEVIYLQENHFDGTIPDIKGLMGVKNVDLSNNNLSGSISEYFENFSKLEYLNLSDNNFEGRVPTEGIFQNATLVSVFGNKNLCGSIKELKLKPCIAQAPPVETRHPSLLKKVAIGVSVGIALLLLLFIVSLSWFKKRKNNQKINNSAPFTLEIFHEKLSYGDLRNATDGFSSSNIVGSGSFGTVFKALLQTENKIVAVKVLNMQRRGAMKSFMAECESLKDIRHRNLVKLLTACASIDFQGNEFRALIYEFMPNGSLDKWLHPEEVEEIHRPSRTLTLLERLNIAIDVASVLDYLHVHCHEPIAHCDLKPSNILLDDDLTAHVSDFGLARLLLKFDQESFFNQLSSAGVRGTIGYAAPEYGMGGQPSIHGDVYSFGVLVLEMFTGKRPTNELFGGNFTLNSYTKAALPERVLDIADKSILHSGLRVGFPVLECLKGILDVGLRCCEESPLNRLATSEAAKELISIRERFFKTRRTARR

SEQ ID NO: 90829 - DNA, 3078 bp, Arabidopsis thaliana
  misc_feature (1)..(3078): Ceres Seq. ID no. 12725432
  misc_feature: MA Experiment ID: 20000180 Result: Down-regulated in Transcription
  misc_feature: MA Experiment 20000180 PARAMETER Experiment Name: At_Germinating_Seeds_P Parameter: Age (hr) Value: 24 vs. 0
  misc_feature: MA Experiment 20000180 PARAMETER Experiment Name: At_Germinating_Seeds_P Parameter: Tissue Value: Germinating Seeds
  misc_feature: MA Experiment ID: 20000439 Result: Up-regulated in Transcription
  misc_feature: MA Experiment 20000439 PARAMETER Experiment Name: At_Roots__P Parameter: Age (day) Value: 14 vs. 21
  misc_feature: MA Experiment 20000439 PARAMETER Experiment Name: At_Roots__P Parameter: Organism Value: A. thaliana
  misc_feature: MA Experiment 20000439 PARAMETER Experiment Name: At_Roots__P Parameter: Tissue Value: Roots vs. Whole Plant
atgggggttccttgtattgttatgagactgattcttgtatctgctttacttgtctctgtgtcacttgaacattcagatatggtctgtgcacaaacaatcagattgacggaggagactgataaacaagcattgcttgagttcaagtctcaagtttctgaaacaagtagagttgtgttgggctcgtggaatgactccctgcctctctgtagctggaccggtgttaagtgtggcctcaaacacaggagagtaactggtgtggatcttggaggactaaaactaaccggtgtagtctctccctttgttggtaacctctcatttcttagatctttgaatcttgcagacaactttttccatggtgccatcccttcagaggttggaaacttgttcaggcttcaatatttgaacatgagcaataatttatttggaggggtgattccggttgttctgtcgaactgctctagcctgtcaacacttgatttatcatcaaatcatcttgaacaaggcgtgcctttggagtttggttcgctgtctaagcttgtccttctctctcttggtagaaacaatctaacagggaagtttcctgcctcattgggaaacctgacatcactccagatgctcgattttatatataaccaaatagaaggagagatccctggggatatagccagactgaaacagatgatctttttccgaatagcattaaacaagtttaatggggttttccctcctccaatttacaacctgtcttcactaatattcctgtccattaccggcaacagtttctctggcacccttagacctgactttggttctcttctccctaaccttcaaatactatatatggggataaatagtttcacgggtaccattccagagacactttccaatatctcaagtcttcgacaacttgatattccgtctaaccatcttactggaaagataccattgagtttcggaagacttcagaatctattactgctaggccttaataataactctctgggaaactactcttctggtgatcttgattttcttggtgcactgactaactgcagtcagttgcagtatttgaatgttggcttcaacaaactcggcggtcagttgcctgtctttatagccaatctctccacccaattaactgagctctctcttggtggaaatctcatctctggaagtattcctcatggcatagggaatcttgtaagcctgcaaacattagacttgggcgaaaatctgttgacaggcaaacttcctccctcattgggagaactttctgaattgagaaaagtcttgctctattcaaatggactgtctggagagataccatcttccttggggaatatcagtgggctaacatacctgtatctgcttaacaacagttttgaaggaagcatcccttcaagtcttggaagttgcagctaccttctagacttgaacctcggtactaataagttgaatggcagcataccccatgagcttatggaacttccatctcttgtcgtcttaaatgtctcatttaatttgttggttggccctttgagacaagacattggaaagcttaaatttctattagctctagacgtttcatacaataaactatcaggacagattccacaaaccttggcgaattgtctctcactagaattccttttgctgcaagggaattcatttgttgggcccattccagatataagagggttgactggcctcagattcctagatctgtcgaagaataatctctctggtacaatacctgaatatatggcgaacttttccaaactgcagaacctgaatctctctttgaacaacttcgacggagctgtgccaacggaaggggtatttcgtaataccagtgcgatgtcggtctttggtaacataaacctctgtggaggcatcccgtcattacagcttcagccatgctctgttgaattaccaagaaggcattcatcagtcagaaagataatcaccatttgtgtcagtgcagttatggcagcacttttgcttctatgtctgtgtgtggtttatctatgctggtacaaactgagagtgaagagtgtcagagctaataataatgagaatgatcggtctttctccccagtgaaatcgttttatgaaaagataagttatgatgagctctacaagacaaccggtggcttctcttccagcaatttgattgggtcgggtaactttggggctgtgtttaaaggatttcttgggtccaagaacaaggctgttgccattaaagttttgaatctctgcaaacgtggtgctgcaaagagtttcatagcggaatgtgaagcattaggaggtataaggcatcgcaaccttgtgaagttggttactatctgttcaagttctgattttgaaggaaatgattttagagctctagtgtatgagttcatgcctaatggaaacttggacatgtggctgcacccggatgaaatagaagaaactggcaatccctcgagaaccctgggcctttttgcgagactcaacattgccatagatgttgcttcggctctggtttatcttcatacttattgtcacaaccctatagcccactgtgatattaagccaagcaatattctactagacaaagatttgactgctcatgtaagcgactttggtttggcacaactcctactaaaatttgatcgggatacattccatattcaattcagctctgcaggtgttcgtggaaccattggctatgctgcaccagaatatggtatgggaggtcatccatcaattatgggagacgtgtacagttttggtattgtcctattggagattttcactggaaaaagacccaccaataagttattcgtggacggtttaactctacatagttttactaaatcagcattgcagaaacgacaagcactagatatcacagacgaaactattctccgtggtgcatatgctcagcatttcaatatggtcgaatgcttgacccttgtgtttcgggtgggagtcagttgttcagaagaatcaccggtaaaccggatatcaatggctgaggctataagcaagctggtctctatcagagaaagttttttcagagacgaggagacttaa

SEQ ID NO: 90830 - protein, 1025 aa, Arabidopsis thaliana
  peptide (1)..(1025): Ceres Seq. ID no. 12725433
  misc_feature (36)..(1025): Homolog of NCBI NO: 15228201 NR Description: leucine-rich repeat transmembrane protein kinase, protein id: At3g47580.1, supported by cDNA: gi_16604568
  misc_feature (36)..(1025): Homolog of NCBI NO: 15232726 NR Description: leucine-rich repeat transmembrane protein kinase, protein id: At3g47090.1 [Arabidopsis thaliana]
  misc_feature (22)..(1025): Homolog of NCBI NO: 17381114 NR Description: putative receptor kinase [Arabidopsis thaliana]
  misc_feature (22)..(1025): Homolog of NCBI NO: 18408454 NR Description: leucine-rich repeat transmembrane protein kinase, protein id: At3g47570.1, supported by cDNA: gi_15810450,
  misc_feature (22)..(971): Homolog of NCBI NO: 11260272 NR Description: receptor-kinase like protein - Arabidopsis
  misc_feature (923)..(1025): Homolog of NCBI NO: 11260272 NR Description: receptor-kinase like protein - Arabidopsis
  misc_feature (7)..(1017): Homolog of NCBI NO: 30421165 NR Description: putative receptor kinase [Hordeum vulgare]
  misc_feature (6)..(1018): Homolog of NCBI NO: 2130082 NR Description: protein kinase Xa21 (EC 2.7.1.-), receptor type
  misc_feature (81)..(823): Homolog of NCBI NO: 38424017 NR Description: putative protein kinase Xa21 [Oryza sativa
  misc_feature (38)..(640): Homolog of NCBI NO: 34915202 NR Description: putative receptor-like protein kinase 1 [Oryza
MGVPCIVMRLILVSALLVSVSLEHSDMVCAQTIRLTEETDKQALLEFKSQVSETSRVVLGSWNDSLPLCSWTGVKCGLKHRRVTGVDLGGLKLTGVVSPFVGNLSFLRSLNLADNFFHGAIPSEVGNLFRLQYLNMSNNLFGGVIPVVLSNCSSLSTLDLSSNHLEQGVPLEFGSLSKLVLLSLGRNNLTGKFPASLGNLTSLQMLDFIYNQIEGEIPGDIARLKQMIFFRIALNKFNGVFPPPIYNLSSLIFLSITGNSFSGTLRPDFGSLLPNLQILYMGINSFTGTIPETLSNISSLRQLDIPSNHLTGKIPLSFGRLQNLLLLGLNNNSLGNYSSGDLDFLGALTNCSQLQYLNVGFNKLGGQLPVFIANLSTQLTELSLGGNLISGSIPHGIGNLVSLQTLDLGENLLTGKLPPSLGELSELRKVLLYSNGLSGEIPSSLGNISGLTYLYLLNNSFEGSIPSSLGSCSYLLDLNLGTNKLNGSIPHELMELPSLVVLNVSFNLLVGPLRQDIGKLKFLLALDVSYNKLSGQIPQTLANCLSLEFLLLQGNSFVGPIPDIRGLTGLRFLDLSKNNLSGTIPEYMANFSKLQNLNLSLNNFDGAVPTEGVFRNTSAMSVFGNINLCGGIPSLQLQPCSVELPRRHSSVRKIITICVSAVMAALLLLCLCVVYLCWYKLRVKSVRANNNENDRSFSPVKSFYEKISYDELYKTTGGFSSSNLIGSGNFGAVFKGFLGSKNKAVAIKVLNLCKRGAAKSFIAECEALGGIRHRNLVKLVTICSSSDFEGNDFRALVYEFMPNGNLDMWLHPDEIEETGNPSRTLGLFARLNIAIDVASALVYLHTYCHNPIAHCDIKPSNILLDKDLTAHVSDFGLAQLLLKFDRDTFHIQFSSAGVRGTIGYAAPEYGMGGHPSIMGDVYSFGIVLLEIFTGKRPTNKLFVDGLTLHSFTKSALQKRQALDITDETILRGAYAQHFNMVECLTLVFRVGVSCSEESPVNRISMAEAISKLVSIRESFFRDEET

SEQ ID NO: 90831 - protein, 1018 aa, Arabidopsis thaliana
  peptide (1)..(1018): Ceres Seq. ID no. 12725434
  misc_feature (29)..(1018): Homolog of NCBI NO: 15228201 NR Description: leucine-rich repeat transmembrane protein kinase, protein id: At3g47580.1, supported by cDNA: gi_16604568
  misc_feature (29)..(1018): Homolog of NCBI NO: 15232726 NR Description: leucine-rich repeat transmembrane protein kinase, protein id: At3g47090.1 [Arabidopsis thaliana]
  misc_feature (15)..(1018): Homolog of NCBI NO: 17381114 NR Description: putative receptor kinase [Arabidopsis thaliana]
  misc_feature (15)..(1018): Homolog of NCBI NO: 18408454 NR Description: leucine-rich repeat transmembrane protein kinase, protein id: At3g47570.1, supported by cDNA: gi_15810450,
  misc_feature (15)..(964): Homolog of NCBI NO: 11260272 NR Description: receptor-kinase like protein - Arabidopsis
  misc_feature (916)..(1018): Homolog of NCBI NO: 11260272 NR Description: receptor-kinase like protein - Arabidopsis
  misc_feature (1)..(1010): Homolog of NCBI NO: 30421165 NR Description: putative receptor kinase [Hordeum vulgare]
  misc_feature (1)..(1011): Homolog of NCBI NO: 2130082 NR Description: protein kinase Xa21 (EC 2.7.1.-), receptor type
  misc_feature (74)..(816): Homolog of NCBI NO: 38424017 NR Description: putative protein kinase Xa21 [Oryza sativa
  misc_feature (31)..(633): Homolog of NCBI NO: 34915202 NR Description: putative receptor-like protein kinase 1 [Oryza
MRLILVSALLVSVSLEHSDMVCAQTIRLTEETDKQALLEFKSQVSETSRVVLGSWNDSLPLCSWTGVKCGLKHRRVTGVDLGGLKLTGVVSPFVGNLSFLRSLNLADNFFHGAIPSEVGNLFRLQYLNMSNNLFGGVIPVVLSNCSSLSTLDLSSNHLEQGVPLEFGSLSKLVLLSLGRNNLTGKFPASLGNLTSLQMLDFIYNQIEGEIPGDIARLKQMIFFRIALNKFNGVFPPPIYNLSSLIFLSITGNSFSGTLRPDFGSLLPNLQILYMGINSFTGTIPETLSNISSLRQLDIPSNHLTGKIPLSFGRLQNLLLLGLNNNSLGNYSSGDLDFLGALTNCSQLQYLNVGFNKLGGQLPVFIANLSTQLTELSLGGNLISGSIPHGIGNLVSLQTLDLGENLLTGKLPPSLGELSELRKVLLYSNGLSGEIPSSLGNISGLTYLYLLNNSFEGSIPSSLGSCSYLLDLNLGTNKLNGSIPHELMELPSLVVLNVSFNLLVGPLRQDIGKLKFLLALDVSYNKLSGQIPQTLANCLSLEFLLLQGNSFVGPIPDIRGLTGLRFLDLSKNNLSGTIPEYMANFSKLQNLNLSLNNFDGAVPTEGVFRNTSAMSVFGNINLCGGIPSLQLQPCSVELPRRHSSVRKIITICVSAVMAALLLLCLCVVYLCWYKLRVKSVRANNNENDRSFSPVKSFYEKISYDELYKTTGGFSSSNLIGSGNFGAVFKGFLGSKNKAVAIKVLNLCKRGAAKSFIAECEALGGIRHRNLVKLVTICSSSDFEGNDFRALVYEFMPNGNLDMWLHPDEIEETGNPSRTLGLFARLNIAIDVASALVYLHTYCHNPIAHCDIKPSNILLDKDLTAHVSDFGLAQLLLKFDRDTFHIQFSSAGVRGTIGYAAPEYGMGGHPSIMGDVYSFGIVLLEIFTGKRPTNKLFVDGLTLHSFTKSALQKRQALDITDETILRGAYAQHFNMVECLTLVFRVGVSCSEESPVNRISMAEAISKLVSIRESFFRDEET

SEQ ID NO: 90832 - protein, 999 aa, Arabidopsis thaliana
  peptide (1)..(999): Ceres Seq. ID no. 12725435
  misc_feature (10)..(999): Homolog of NCBI NO: 15228201 NR Description: leucine-rich repeat transmembrane protein kinase, protein id: At3g47580.1, supported by cDNA: gi_16604568
  misc_feature (10)..(999): Homolog of NCBI NO: 15232726 NR Description: leucine-rich repeat transmembrane protein kinase, protein id: At3g47090.1 [Arabidopsis thaliana]
  misc_feature (1)..(999): Homolog of NCBI NO: 17381114 NR Description: putative receptor kinase [Arabidopsis thaliana]
  misc_feature (1)..(999): Homolog of NCBI NO: 18408454 NR Description: leucine-rich repeat transmembrane protein kinase, protein id: At3g47570.1, supported by cDNA: gi_15810450,
  misc_feature (1)..(945): Homolog of NCBI NO: 11260272 NR Description: receptor-kinase like protein - Arabidopsis
  misc_feature (897)..(999): Homolog of NCBI NO: 11260272 NR Description: receptor-kinase like protein - Arabidopsis
  misc_feature (1)..(991): Homolog of NCBI NO: 30421165 NR Description: putative receptor kinase [Hordeum vulgare]
  misc_feature (1)..(992): Homolog of NCBI NO: 2130082 NR Description: protein kinase Xa21 (EC 2.7.1.-), receptor type
  misc_feature (55)..(797): Homolog of NCBI NO: 38424017 NR Description: putative protein kinase Xa21 [Oryza sativa
  misc_feature (12)..(614): Homolog of NCBI NO: 34915202 NR Description: putative receptor-like protein kinase 1 [Oryza
MVCAQTIRLTEETDKQALLEFKSQVSETSRVVLGSWNDSLPLCSWTGVKCGLKHRRVTGVDLGGLKLTGVVSPFVGNLSFLRSLNLADNFFHGAIPSEVGNLFRLQYLNMSNNLFGGVIPVVLSNCSSLSTLDLSSNHLEQGVPLEFGSLSKLVLLSLGRNNLTGKFPASLGNLTSLQMLDFIYNQIEGEIPGDIARLKQMIFFRIALNKFNGVFPPPIYNLSSLIFLSITGNSFSGTLRPDFGSLLPNLQILYMGINSFTGTIPETLSNISSLRQLDIPSNHLTGKIPLSFGRLQNLLLLGLNNNSLGNYSSGDLDFLGALTNCSQLQYLNVGFNKLGGQLPVFIANLSTQLTELSLGGNLISGSIPHGIGNLVSLQTLDLGENLLTGKLPPSLGELSELRKVLLYSNGLSGEIPSSLGNISGLTYLYLLNNSFEGSIPSSLGSCSYLLDLNLGTNKLNGSIPHELMELPSLVVLNVSFNLLVGPLRQDIGKLKFLLALDVSYNKLSGQIPQTLANCLSLEFLLLQGNSFVGPIPDIRGLTGLRFLDLSKNNLSGTIPEYMANFSKLQNLNLSLNNFDGAVPTEGVFRNTSAMSVFGNINLCGGIPSLQLQPCSVELPRRHSSVRKIITICVSAVMAALLLLCLCVVYLCWYKLRVKSVRANNNENDRSFSPVKSFYEKISYDELYKTTGGFSSSNLIGSGNFGAVFKGFLGSKNKAVAIKVLNLCKRGAAKSFIAECEALGGIRHRNLVKLVTICSSSDFEGNDFRALVYEFMPNGNLDMWLHPDEIEETGNPSRTLGLFARLNIAIDVASALVYLHTYCHNPIAHCDIKPSNILLDKDLTAHVSDFGLAQLLLKFDRDTFHIQFSSAGVRGTIGYAAPEYGMGGHPSIMGDVYSFGIVLLEIFTGKRPTNKLFVDGLTLHSFTKSALQKRQALDITDETILRGAYAQHFNMVECLTLVFRVGVSCSEESPVNRISMAEAISKLVSIRESFFRDEET

SEQ ID NO: 90833 - DNA, 1747 bp, Arabidopsis thaliana
  misc_feature (1)..(1747): Ceres Seq. ID no. 12725463
  misc_feature: MA Experiment ID: 20000314 Result: Down-regulated in Transcription
  misc_feature: MA Experiment 20000314 PARAMETER Experiment Name: At_14day_Shoots-Roots_Sub_P Parameter: Age (day) Value: 14
  misc_feature: MA Experiment 20000314 PARAMETER Experiment Name: At_14day_Shoots-Roots_Sub_P Parameter: Organism Value: A. thaliana
  misc_feature: MA Experiment 20000314 PARAMETER Experiment Name: At_14day_Shoots-Roots_Sub_P Parameter: Plant Line Value: WS
  misc_feature: MA Experiment 20000314 PARAMETER Experiment Name: At_14day_Shoots-Roots_Sub_P Parameter: Tissue Value: Roots vs. Whole Plant
  misc_feature: MA Experiment ID: 20000355 Result: Down-regulated in Transcription
  misc_feature: MA Experiment 20000355 PARAMETER Experiment Name: At_Siliques_Sub_P Parameter: Age (day) Value: 21
  misc_feature: MA Experiment 20000355 PARAMETER Experiment Name: At_Siliques_Sub_P Parameter: Organism Value: A. thaliana
  misc_feature: MA Experiment 20000355 PARAMETER Experiment Name: At_Siliques_Sub_P Parameter: Plant Line Value: WS
  misc_feature: MA Experiment 20000355 PARAMETER Experiment Name: At_Siliques_Sub_P Parameter: Tissue Value: Less Than 5mm Siliques vs. Whole Plant
  misc_feature: MA Experiment ID: 20000440 Result: Down-regulated in Transcription
  misc_feature: MA Experiment 20000440 PARAMETER Experiment Name: At_Closed-Flower__Sub_P Parameter: Tissue Value: Closed Flower vs. Whole Plant
gcccttggtaagatttcatcaacggttctccaaccaaactcttttattgaatttgaattgaatttgaaatttgataatcaaatatagatgatctgaatccaggaaaacaggatccaagtggggttgaattatggaggatgagacgagatcaacgtcatcactttccgatatagctattagtattatcgacgaaggtcctctttctccattacgacaacgtagtgaaagaagtgttgtatctcatatcaaacgcaacttacagtcatcggggaaaccactgattcttttggaatcagctggtaaggcgtcctgctgcatcttcagaatccctgatagcctcgcagaggtgaatcctaaagcctataagcccaaagttgtttccattggtccttatcattacggagaaaatcacctccaaatgattcagcagcacaagtttcggtttctggagcttttcgtagacagggcaacaaagaaaggaatggacgaaaacgtcttgtatgcggcagtaggtgctttgcaacacaagataagagcttcttattctgaggaacttaggatagaaaaatcagaactggtgtctatgatgattttggatgggtgcttcattctcatgttgttacttatcgtgtcaagaaagatagatttggatatgaataaggatccaatcttcacgatcccctggattttggcatctattcagagtgatcttctcctcttggaaaatcaggtccctttctttgttcttcgaactatatttgataaatcaggaatagggtcacctggtgatctaaacaggatggcgtttagcttcttcaacctctcaatagataaaccagatacatattgggcgaaacacagagaccgcggggctaaacatcttcttgacctcaaccgtaagaccttcatacctagcatgagatctatgggtgaatcagaaacaacaccatcctcgaaatttcaacactctaagggtaaatccggagaagtatcatcgtcagagtctacatttccgttgatactgtcggccaaaagacttcgcctccaagggataaagttcaggttaaggagtgatgctgaatcaatattagatataaaattaaagaagaacaagcttcagataccactgttaagattggatggtttcatcagctcaatcttcctcaactgtgttgcctttgaacagttttacacagagagtaccaacgacataacaagctacgtggttttcatgggatgtcttctaaacgatcaggaagatgctactttcttgaacaacgacaagcggatcatagagaactactttggcaacgagaatgaggtatcacagtttttcaaaactatatgtaaagatgttgtatttgacacacgtagaagttacttacggaatgtgtttgagggagttaacgagtacacctccaaaacgtacaatggagtatgggctggctttaggcacacgcactttgagtcaccatggactgctctgtcatcctttgctgttgttttcgttattcttcttaccatgacgcaagccgcttatgcgattcgttcctactatcacgatacagagtgagatggaaactcagcttctccataggggcttccttcgggaaaatcacgtgaactacttgttctgttttatccgctacaaatgtcattcgcgctttaattagacccgcacatacgtgcaggatttcatatttttaaaaatatggtgtattaaatttatattcaatttagttttttc

SEQ ID NO: 90834 - protein, 480 aa, Arabidopsis thaliana; identical to SEQ ID NO: 77000
  peptide (1)..(480): Ceres Seq. ID no. 12725464
  misc_feature (56)..(465): Pfam Name: Plant protein of unknown function Pfam Description: Plant protein of unknown function
  misc_feature (1)..(480): Homolog of NCBI NO: 15232754 NR Description: putative protein; protein id: At3g47250.1, by cDNA: gi_17528937, supported by cDNA: gi_20465944 [Arabidopsis >gi|6706134|emb|CAB61971.2| putative protein [Arabidopsis
  misc_feature (1)..(480): Homolog of NCBI NO: 22655194 NR Description: unknown protein [Arabidopsis thaliana]
  misc_feature (1)..(480): Homolog of NCBI NO: 11291796 NR Description: hypothetical protein F13I12.300 - Arabidopsis
  misc_feature (41)..(480): Homolog of NCBI NO: 15232748 NR Description: putative protein; protein id: At3g47200.1
  misc_feature (23)..(434): Homolog of NCBI NO: 15232749 NR Description: putative protein; protein id: At3g47210.1, by cDNA: gi_17978925 [Arabidopsis thaliana]
  misc_feature (35)..(476): Homolog of NCBI NO: 15242911 NR Description: putative protein; protein id: At5g22540.1 thaliana] >gi|9758660|dbj|BAB09126.1|
  misc_feature (245)..(477): Homolog of NCBI NO: 15230487 NR Description: putative protein; protein id: At3g44710.1
  misc_feature (44)..(263): Homolog of NCBI NO: 15230487 NR Description: putative protein; protein id: At3g44710.1
  misc_feature (264)..(476): Homolog of NCBI NO: 9758661 NR Description: emb|CAB72473.1~gene_id:MQJ16.9~strong similarity
  misc_feature (49)..(262): Homolog of NCBI NO: 9758661 NR Description: emb|CAB72473.1~gene_id:MQJ16.9~strong similarity

SEQ ID NO: 90835 - protein, 384 aa, Arabidopsis thaliana; identical to SEQ ID NO: 77001
  peptide (1)..(384): Ceres Seq. ID no. 12725465
  misc_feature (1)..(369): Pfam Name: Plant protein of unknown function Pfam Description: Plant protein of unknown function
  misc_feature (1)..(384): Homolog of NCBI NO: 15232754 NR Description: putative protein; protein id: At3g47250.1, by cDNA: gi_17528937, supported by cDNA: gi_20465944 [Arabidopsis >gi|6706134|emb|CAB61971.2| putative protein [Arabidopsis
  misc_feature (1)..(384): Homolog of NCBI NO: 22655194 NR Description: unknown protein [Arabidopsis thaliana]
  misc_feature (1)..(384): Homolog of NCBI NO: 11291796 NR Description: hypothetical protein F13I12.300 - Arabidopsis
  misc_feature (1)..(384): Homolog of NCBI NO: 15232748 NR Description: putative protein; protein id: At3g47200.1
  misc_feature (1)..(338): Homolog of NCBI NO: 15232749 NR Description: putative protein; protein id: At3g47210.1, by cDNA: gi_17978925 [Arabidopsis thaliana]
  misc_feature (1)..(380): Homolog of NCBI NO: 15242911 NR Description: putative protein; protein id: At5g22540.1 thaliana] >gi|9758660|dbj|BAB09126.1|
  misc_feature (149)..(381): Homolog of NCBI NO: 15230487 NR Description: putative protein; protein id: At3g44710.1
  misc_feature (1)..(167): Homolog of NCBI NO: 15230487 NR Description: putative protein; protein id: At3g44710.1
  misc_feature (168)..(380): Homolog of NCBI NO: 9758661 NR Description: emb|CAB72473.1~gene_id:MQJ16.9~strong similarity
  misc_feature (1)..(166): Homolog of NCBI NO: 9758661 NR Description: emb|CAB72473.1~gene_id:MQJ16.9~strong similarity

SEQ ID NO: 90836 - protein, 363 aa, Arabidopsis thaliana; identical to SEQ ID NO: 77002
  peptide (1)..(363): Ceres Seq. ID no. 12725466
  misc_feature (1)..(348): Pfam Name: Plant protein of unknown function Pfam Description: Plant protein of unknown function
  misc_feature (1)..(363): Homolog of NCBI NO: 15232754 NR Description: putative protein; protein id: At3g47250.1, by cDNA: gi_17528937, supported by cDNA: gi_20465944 [Arabidopsis >gi|6706134|emb|CAB61971.2| putative protein [Arabidopsis
  misc_feature (1)..(363): Homolog of NCBI NO: 22655194 NR Description: unknown protein [Arabidopsis thaliana]
  misc_feature (1)..(363): Homolog of NCBI NO: 11291796 NR Description: hypothetical protein F13I12.300 - Arabidopsis
  misc_feature (1)..(363): Homolog of NCBI NO: 15232748 NR Description: putative protein; protein id: At3g47200.1
  misc_feature (1)..(317): Homolog of NCBI NO: 15232749 NR Description: putative protein; protein id: At3g47210.1, by cDNA: gi_17978925 [Arabidopsis thaliana]
  misc_feature (1)..(359): Homolog of NCBI NO: 15242911 NR Description: putative protein; protein id: At5g22540.1 thaliana] >gi|9758660|dbj|BAB09126.1|
  misc_feature (128)..(360): Homolog of NCBI NO: 15230487 NR Description: putative protein; protein id: At3g44710.1
  misc_feature (1)..(146): Homolog of NCBI NO: 15230487 NR Description: putative protein; protein id: At3g44710.1
  misc_feature (147)..(359): Homolog of NCBI NO: 9758661 NR Description: emb|CAB72473.1~gene_id:MQJ16.9~strong similarity
  misc_feature (1)..(145): Homolog of NCBI NO: 9758661 NR Description: emb|CAB72473.1~gene_id:MQJ16.9~strong similarity

SEQ ID NO: 90837 - DNA, 930 bp, Arabidopsis thaliana
  misc_feature (1)..(930): Ceres Seq. ID no. 12725478
  misc_feature: MA Experiment ID: 20000185 Result: Up-regulated in Transcription
  misc_feature: MA Experiment 20000185 PARAMETER Experiment Name: At_Roots__P Parameter: Age (day) Value: 7 vs. 21
  misc_feature: MA Experiment 20000185 PARAMETER Experiment Name: At_Roots__P Parameter: Organism Value: A. thaliana
  misc_feature: MA Experiment 20000185 PARAMETER Experiment Name: At_Roots__P Parameter: Tissue Value: Roots vs. Whole Plant
  misc_feature: MA Experiment ID: 20000265 Result: Up-regulated in Transcription
  misc_feature: MA Experiment 20000265 PARAMETER Experiment Name: At_Open_Flower_P Parameter: Age (day) Value: 21
  misc_feature: MA Experiment 20000265 PARAMETER Experiment Name: At_Open_Flower_P Parameter: Plant Line Value: WS
  misc_feature: MA Experiment 20000265 PARAMETER Experiment Name: At_Open_Flower_P Parameter: Tissue Value: Closed Flower vs. Whole Plant
  misc_feature: MA Experiment ID: 20000437 Result: Up-regulated in Transcription
  misc_feature: MA Experiment 20000437 PARAMETER Experiment Name: At_Drought_P Parameter: Age (day) Value: 8
  misc_feature: MA Experiment 20000437 PARAMETER Experiment Name: At_Drought_P Parameter: Organism Value: A. thaliana
  misc_feature: MA Experiment 20000437 PARAMETER Experiment Name: At_Drought_P Parameter: Plant Line Value: WS
  misc_feature: MA Experiment 20000437 PARAMETER Experiment Name: At_Drought_P Parameter: Timepoint (hr) Value: 24
  misc_feature: MA Experiment 20000437 PARAMETER Experiment Name: At_Drought_P Parameter: Tissue Value: Whole Plant
  misc_feature: MA Experiment 20000437 PARAMETER Experiment Name: At_Drought_P Parameter: Treatment Value: Drought vs. No Drought
  misc_feature: MA Experiment ID: 20000439 Result: Up-regulated in Transcription
  misc_feature: MA Experiment 20000439 PARAMETER Experiment Name: At_Roots__P Parameter: Age (day) Value: 14 vs. 21
  misc_feature: MA Experiment 20000439 PARAMETER Experiment Name: At_Roots__P Parameter: Organism Value: A. thaliana
  misc_feature: MA Experiment 20000439 PARAMETER Experiment Name: At_Roots__P Parameter: Tissue Value: Roots vs. Whole Plant
  misc_feature: MA Experiment ID: 20000443 Result: Down-regulated in Transcription
  misc_feature: MA Experiment 20000443 PARAMETER Experiment Name: At_1uM_BR-BRZ__P Parameter: Tissue Value: Shoot Apices
  misc_feature: MA Experiment 20000443 PARAMETER Experiment Name: At_1uM_BR-BRZ__P Parameter: Treatment Value: 1uM BRZ vs. No Treatment
  misc_feature: MA Experiment ID: 20000495 Result: Up-regulated in Transcription
  misc_feature: MA Experiment 20000495 PARAMETER Experiment Name: At_Guard_Cells_P Parameter: Harvest Date Value: 8/2/2002
  misc_feature: MA Experiment 20000495 PARAMETER Experiment Name: At_Guard_Cells_P Parameter: Organism Value: A. thaliana
  misc_feature: MA Experiment 20000495 PARAMETER Experiment Name: At_Guard_Cells_P Parameter: Tissue Value: Guard Cells vs. Leaves
  misc_feature: MA Experiment ID: 20000573 Result: Down-regulated in Transcription
  misc_feature: MA Experiment 20000573 PARAMETER Experiment Name: At_100uM_ABA_Mutants__P Parameter: Organism Value: A. thaliana
  misc_feature: MA Experiment 20000573 PARAMETER Experiment Name: At_100uM_ABA_Mutants__P Parameter: Plant Line Value: CS22 vs. Ler wt
  misc_feature: MA Experiment 20000573 PARAMETER Experiment Name: At_100uM_ABA_Mutants__P Parameter: Timepoint (hr) Value: N/A
  misc_feature: MA Experiment 20000573 PARAMETER Experiment Name: At_100uM_ABA_Mutants__P Parameter: Tissue Value: Whole Plant
  misc_feature: MA Experiment 20000573 PARAMETER Experiment Name: At_100uM_ABA_Mutants__P Parameter: Treatment Value: None
  misc_feature: MA Experiment ID: 20000574 Result: Down-regulated in Transcription
  misc_feature: MA Experiment 20000574 PARAMETER Experiment Name: At_100uM_ABA_Mutants__P Parameter: Organism Value: A. thaliana
  misc_feature: MA Experiment 20000574 PARAMETER Experiment Name: At_100uM_ABA_Mutants__P Parameter: Plant Line Value: CS23 vs. Ler wt
  misc_feature: MA Experiment 20000574 PARAMETER Experiment Name: At_100uM_ABA_Mutants__P Parameter: Timepoint (hr) Value: N/A
  misc_feature: MA Experiment 20000574 PARAMETER Experiment Name: At_100uM_ABA_Mutants__P Parameter: Tissue Value: Whole Plant
  misc_feature: MA Experiment 20000574 PARAMETER Experiment Name: At_100uM_ABA_Mutants__P Parameter: Treatment Value: None
atggatatacttaccaccattctcaatcttcttcttcctcctcttactatcatctttctcttcctgttttacccattttatcttttgatcaaacttgtgctttgtcttcgtaagaaccttcacttcgaaaacgtagccagaaaagtagttctaatcaccggagcttcctctggcatcggagagcatgtggcatacgaatacgcaaagaaaggagcatatttggctcttgttgctcgaagaagggatcgtctagagattgtagcagaaacatcacgtcaattaggatctggtaatgtcatcatcatacctggtgatgtttctaatgttgaggactgcaagaagttcatcgatgagacgattcgtcatttcggaaaactagaccacctgatcaataatgctggtgtatttcaaactgttcttttcgaagatttcacacaaattcaagacgcaaatcctataatggacatcaacttttggggtacaacatacatcacctattttgcaattcctcatcttcgaaagagtaaaggaaaaatcgtcgcgattacatcgggttcagcaaatatacctttgccattggcaagcatctatgcagcaagcaaagcagccttattaagattctttgagacattaagaatagagctaagtcctgatatcaaaataacaattgttctcccaggagttgtatcaacagatatgaccactcctcactgtatagagaagtatggttcggattttattctatcggaatcagtgagtaaatgcgcaaaggcaatcttcagaggtattggcagaggagagacatacatagaagaaccatcttggatgaaatggctgtttataatgaaaaatgtatgtcccgaaatcgttgattacggacttaactatctatttgttagttatctaaaaccttatttcaagcgtgattga

SEQ ID NO: 90838 - protein, 309 aa, Arabidopsis thaliana
  peptide (1)..(309): Ceres Seq. ID no. 12725479
  misc_feature (1)..(309): Homolog of NCBI NO: 15232779 NR Description: putative protein; protein id: At3g47360.1
  misc_feature (1)..(309): Homolog of NCBI NO: 15232777 NR Description: putative protein; protein id: At3g47350.1
  misc_feature (1)..(290): Homolog of NCBI NO: 15241203 NR Description: 11-beta-hydroxysteroid dehydrogenase-like;
  misc_feature (1)..(290): Homolog of NCBI NO: 8777392 NR Description: 11-beta-hydroxysteroid dehydrogenase-like
  misc_feature (1)..(300): Homolog of NCBI NO: 18423187 NR Description: 11-beta-hydroxysteroid dehydrogenase-like; id: At5g50600.1, supported by cDNA: gi_15450584, supported by gi_17065383, supported by cDNA: gi_17386149, supported by cDNA:
  misc_feature (1)..(300): Homolog of NCBI NO: 15824408 NR Description: steroleosin [Sesamum indicum]
  misc_feature (1)..(306): Homolog of NCBI NO: 15241261 NR Description: putative protein; protein id: At5g50770.1 thaliana] >gi|8777400|dbj|BAA96990.1| contains similarity to
  misc_feature (1)..(300): Homolog of NCBI NO: 21311775 NR Description: steroleosin-B [Sesamum indicum]
  misc_feature (1)..(297): Homolog of NCBI NO: 15234888 NR Description: putative oxidoreductase; protein id: At4g10020.1
  misc_feature (43)..(229): Homolog of NCBI NO: 24372033 NR Description: oxidoreductase, short chain
MDILTTILNLLLPPLTIIFLFLFYPFYLLIKLVLCLRKNLHFENVARKVVLITGASSGIGEHVAYEYAKKGAYLALVARRRDRLEIVAETSRQLGSGNVIIIPGDVSNVEDCKKFIDETIRHFGKLDHLINNAGVFQTVLFEDFTQIQDANPIMDINFWGTTYITYFAIPHLRKSKGKIVAITSGSANIPLPLASIYAASKAALLRFFETLRIELSPDIKITIVLPGVVSTDMTTPHCIEKYGSDFILSESVSKCAKAIFRGIGRGETYIEEPSWMKWLFIMKNVCPEIVDYGLNYLFVSYLKPYFKRD

SEQ ID NO: 90839 - protein, 156 aa, Arabidopsis thaliana; identical to SEQ ID NO: 84779
  peptide (1)..(156): Ceres Seq. ID no. 12725480
  misc_feature (1)..(156): Homolog of NCBI NO: 15232779 NR Description: putative protein; protein id: At3g47360.1
  misc_feature (1)..(156): Homolog of NCBI NO: 15232777 NR Description: putative protein; protein id: At3g47350.1
  misc_feature (1)..(137): Homolog of NCBI NO: 15241203 NR Description: 11-beta-hydroxysteroid dehydrogenase-like;
  misc_feature (1)..(137): Homolog of NCBI NO: 8777392 NR Description: 11-beta-hydroxysteroid dehydrogenase-like
  misc_feature (1)..(147): Homolog of NCBI NO: 18423187 NR Description: 11-beta-hydroxysteroid dehydrogenase-like; id: At5g50600.1, supported by cDNA: gi_15450584, supported by gi_17065383, supported by cDNA: gi_17386149, supported by cDNA:
  misc_feature (1)..(147): Homolog of NCBI NO: 15824408 NR Description: steroleosin [Sesamum indicum]
  misc_feature (1)..(153): Homolog of NCBI NO: 15241261 NR Description: putative protein; protein id: At5g50770.1 thaliana] >gi|8777400|dbj|BAA96990.1| contains similarity to
  misc_feature (1)..(147): Homolog of NCBI NO: 21311775 NR Description: steroleosin-B [Sesamum indicum]
  misc_feature (1)..(144): Homolog of NCBI NO: 15234888 NR Description: putative oxidoreductase; protein id: At4g10020.1
  misc_feature (1)..(76): Homolog of NCBI NO: 24372033 NR Description: oxidoreductase, short chain

SEQ ID NO: 90840 - DNA, 776 bp, Arabidopsis thaliana
  misc_feature (1)..(776): Ceres Seq. ID no. 12725481
  misc_feature: MA Experiment ID: 20000169 Result: Down-regulated in Transcription
  misc_feature: MA Experiment 20000169 PARAMETER Experiment Name: At_100uM_ABA_P Parameter: Age (day) Value: 14
  misc_feature: MA Experiment 20000169 PARAMETER Experiment Name: At_100uM_ABA_P Parameter: Organism Value: A. thaliana
  misc_feature: MA Experiment 20000169 PARAMETER Experiment Name: At_100uM_ABA_P Parameter: Plant Line Value: WS
  misc_feature: MA Experiment 20000169 PARAMETER Experiment Name: At_100uM_ABA_P Parameter: Timepoint (hr) Value: 6
  misc_feature: MA Experiment 20000169 PARAMETER Experiment Name: At_100uM_ABA_P Parameter: Tissue Value: Aerial
  misc_feature: MA Experiment 20000169 PARAMETER Experiment Name: At_100uM_ABA_P Parameter: Treatment Value: 100uM ABA vs. No Treatment
  misc_feature: MA Experiment ID: 20000182 Result: Up-regulated in Transcription
  misc_feature: MA Experiment 20000182 PARAMETER Experiment Name: At_2mM_SA_P Parameter: Age (day) Value: 14
  misc_feature: MA Experiment 20000182 PARAMETER Experiment Name: At_2mM_SA_P Parameter: Organism Value: A. thaliana
  misc_feature: MA Experiment 20000182 PARAMETER Experiment Name: At_2mM_SA_P Parameter: Plant Line Value: WS
  misc_feature: MA Experiment 20000182 PARAMETER Experiment Name: At_2mM_SA_P Parameter: Timepoint (hr) Value: 6
  misc_feature: MA Experiment 20000182 PARAMETER Experiment Name: At_2mM_SA_P Parameter: Tissue Value: Aerial
  misc_feature: MA Experiment 20000182 PARAMETER Experiment Name: At_2mM_SA_P Parameter: Treatment Value: 2mM SA vs. No Treatment
  misc_feature: MA Experiment ID: 20000264 Result: Down-regulated in Transcription
  misc_feature: MA Experiment 20000264 PARAMETER Experiment Name: At_Open_Flower_P Parameter: Age (day) Value: 21
  misc_feature: MA Experiment 20000264 PARAMETER Experiment Name: At_Open_Flower_P Parameter: Plant Line Value: WS
  misc_feature: MA Experiment 20000264 PARAMETER Experiment Name: At_Open_Flower_P Parameter: Tissue Value: Open Flower vs. Whole Plant
  misc_feature: MA Experiment ID: 20000265 Result: Down-regulated in Transcription
  misc_feature: MA Experiment 20000265 PARAMETER Experiment Name: At_Open_Flower_P Parameter: Age (day) Value: 21
  misc_feature: MA Experiment 20000265 PARAMETER Experiment Name: At_Open_Flower_P Parameter: Plant Line Value: WS
  misc_feature: MA Experiment 20000265 PARAMETER Experiment Name: At_Open_Flower_P Parameter: Tissue Value: Closed Flower vs. Whole Plant
  misc_feature: MA Experiment ID: 20000267 Result: Down-regulated in Transcription
  misc_feature: MA Experiment 20000267 PARAMETER Experiment Name: At_Drought_P Parameter: Age (day) Value: 7
  misc_feature: MA Experiment 20000267 PARAMETER Experiment Name: At_Drought_P Parameter: Organism Value: A. thaliana
  misc_feature: MA Experiment 20000267 PARAMETER Experiment Name: At_Drought_P Parameter: Plant Line Value: WS
  misc_feature: MA Experiment 20000267 PARAMETER Experiment Name: At_Drought_P Parameter: Timepoint (hr) Value: 6
  misc_feature: MA Experiment 20000267 PARAMETER Experiment Name: At_Drought_P Parameter: Tissue Value: Whole Plant
  misc_feature: MA Experiment 20000267 PARAMETER Experiment Name: At_Drought_P Parameter: Treatment Value: Drought vs. No Drought
  misc_feature: MA Experiment ID: 20000286 Result: Down-regulated in Transcription
  misc_feature: MA Experiment 20000286 PARAMETER Experiment Name: At_Open_Flower_P Parameter: Age (day) Value: 21
  misc_feature: MA Experiment 20000286 PARAMETER Experiment Name: At_Open_Flower_P Parameter: Plant Line Value: WS
  misc_feature: MA Experiment 20000286 PARAMETER Experiment Name: At_Open_Flower_P Parameter: Tissue Value: Half Open vs. Whole Plant
  misc_feature: MA Experiment ID: 20000436 Result: Down-regulated in Transcription
  misc_feature: MA Experiment 20000436 PARAMETER Experiment Name: At_Drought_P Parameter: Age (day) Value: 7
  misc_feature: MA Experiment 20000436 PARAMETER Experiment Name: At_Drought_P Parameter: Organism Value: A. thaliana
  misc_feature: MA Experiment 20000436 PARAMETER Experiment Name: At_Drought_P Parameter: Plant Line Value: WS
  misc_feature: MA Experiment 20000436 PARAMETER Experiment Name: At_Drought_P Parameter: Timepoint (hr) Value: 12
  misc_feature: MA Experiment 20000436 PARAMETER Experiment Name: At_Drought_P Parameter: Tissue Value: Whole Plant
  misc_feature: MA Experiment 20000436 PARAMETER Experiment Name: At_Drought_P Parameter: Treatment Value: Drought vs. No Drought
  misc_feature: MA Experiment ID: 20000437 Result: Down-regulated in Transcription
  misc_feature: MA Experiment 20000437 PARAMETER Experiment Name: At_Drought_P Parameter: Age (day) Value: 8
  misc_feature: MA Experiment 20000437 PARAMETER Experiment Name: At_Drought_P Parameter: Organism Value: A. thaliana
  misc_feature: MA Experiment 20000437 PARAMETER Experiment Name: At_Drought_P Parameter: Plant Line Value: WS
  misc_feature: MA Experiment 20000437 PARAMETER Experiment Name: At_Drought_P Parameter: Timepoint (hr) Value: 24
  misc_feature: MA Experiment 20000437 PARAMETER Experiment Name: At_Drought_P Parameter: Tissue Value: Whole Plant
  misc_feature: MA Experiment 20000437 PARAMETER Experiment Name: At_Drought_P Parameter: Treatment Value: Drought vs. No Drought
  misc_feature: MA Experiment ID: 20000445 Result: Down-regulated in Transcription
  misc_feature: MA Experiment 20000445 PARAMETER Experiment Name: At_100uM_NAA__P Parameter: Age (day) Value: 14
  misc_feature: MA Experiment 20000445 PARAMETER Experiment Name: At_100uM_NAA__P Parameter: Organism Value: A. thaliana
  misc_feature: MA Experiment 20000445 PARAMETER Experiment Name: At_100uM_NAA__P Parameter: Plant Line Value: WS
  misc_feature: MA Experiment 20000445 PARAMETER Experiment Name: At_100uM_NAA__P Parameter: Timepoint (hr) Value: 6
  misc_feature: MA Experiment 20000445 PARAMETER Experiment Name: At_100uM_NAA__P Parameter: Tissue Value: Aerial
  misc_feature: MA Experiment 20000445 PARAMETER Experiment Name: At_100uM_NAA__P Parameter: Treatment Value: 100uM NAA vs. No Treatment
  misc_feature: MA Experiment ID: 20000451 Result: Up-regulated in Transcription
  misc_feature: MA Experiment 20000451 PARAMETER Experiment Name: At_CS6879_Shoots-Roots_P Parameter: Age (day) Value: 14
  misc_feature: MA Experiment 20000451 PARAMETER Experiment Name: At_CS6879_Shoots-Roots_P Parameter: Organism Value: A. thaliana
  misc_feature: MA Experiment 20000451 PARAMETER Experiment Name: At_CS6879_Shoots-Roots_P Parameter: Plant Line Value: CS6879 vs. WS
  misc_feature: MA Experiment 20000451 PARAMETER Experiment Name: At_CS6879_Shoots-Roots_P Parameter: Tissue Value: Roots
  misc_feature: MA Experiment ID: 20000496 Result: Up-regulated in Transcription
  misc_feature: MA Experiment 20000496 PARAMETER Experiment Name: At_Guard_Cells_P Parameter: Harvest Date Value: 7/19/2002
  misc_feature: MA Experiment 20000496 PARAMETER Experiment Name: At_Guard_Cells_P Parameter: Organism Value: Canola
  misc_feature: MA Experiment 20000496 PARAMETER Experiment Name: At_Guard_Cells_P Parameter: Tissue Value: Guard Cells vs. Leaves
  misc_feature: MA Experiment ID: 20000794 Result: Down-regulated in Transcription
  misc_feature: MA Experiment 20000794 PARAMETER Experiment Name: At_Petals_P Parameter: Age (day) Value: 23-25 days
  misc_feature: MA Experiment 20000794 PARAMETER Experiment Name: At_Petals_P Parameter: Plant Line Value: WS
  misc_feature: MA Experiment 20000794 PARAMETER Experiment Name: At_Petals_P Parameter: Tissue Value: Petals vs. Whole plant
  misc_feature: MA Experiment ID: 20001248 Result: Down-regulated in Transcription
  misc_feature: MA Experiment 20001248 PARAMETER Experiment Name: At_Far-red-induction_P Parameter: Age (day) Value: 7
  misc_feature: MA Experiment 20001248 PARAMETER Experiment Name: At_Far-red-induction_P Parameter: Light Value: Far-red vs. White
  misc_feature: MA Experiment 20001248 PARAMETER Experiment Name: At_Far-red-induction_P Parameter: Organism Value: A. thaliana
  misc_feature: MA Experiment 20001248 PARAMETER Experiment Name: At_Far-red-induction_P Parameter: Plant Line Value: Columbia
  misc_feature: MA Experiment 20001248 PARAMETER Experiment Name: At_Far-red-induction_P Parameter: Timepoint (hr) Value: 4
  misc_feature: MA Experiment 20001248 PARAMETER Experiment Name: At_Far-red-induction_P Parameter: Tissue Value: Whole Plant
  misc_feature: MA Experiment ID: 20001450 Result: Down-regulated in Transcription
  misc_feature: MA Experiment 20001450 PARAMETER Experiment Name: At_Far-red-induction_P Parameter: Age (day) Value: 7
  misc_feature: MA Experiment 20001450 PARAMETER Experiment Name: At_Far-red-induction_P Parameter: Light Value: Far-red vs. White
  misc_feature: MA Experiment 20001450 PARAMETER Experiment Name: At_Far-red-induction_P Parameter: Organism Value: A. thaliana
  misc_feature: MA Experiment 20001450 PARAMETER Experiment Name: At_Far-red-induction_P Parameter: Plant Line Value: Columbia
  misc_feature: MA Experiment 20001450 PARAMETER Experiment Name: At_Far-red-induction_P Parameter: Timepoint (hr) Value: 8
  misc_feature: MA Experiment 20001450 PARAMETER Experiment Name: At_Far-red-induction_P Parameter: Tissue Value: Whole Plant
  misc_feature: MA Experiment ID: 20001451 Result: Down-regulated in Transcription
  misc_feature: MA Experiment 20001451 PARAMETER Experiment Name: At_Far-red-induction_P Parameter: Age (day) Value: 7
  misc_feature: MA Experiment 20001451 PARAMETER Experiment Name: At_Far-red-induction_P Parameter: Light Value: Far-red vs. White
  misc_feature: MA Experiment 20001451 PARAMETER Experiment Name: At_Far-red-induction_P Parameter: Organism Value: A. thaliana
  misc_feature: MA Experiment 20001451 PARAMETER Experiment Name: At_Far-red-induction_P Parameter: Plant Line Value: Columbia
  misc_feature: MA Experiment 20001451 PARAMETER Experiment Name: At_Far-red-induction_P Parameter: Timepoint (hr) Value: 24
  misc_feature: MA Experiment 20001451 PARAMETER Experiment Name: At_Far-red-induction_P Parameter: Tissue Value: Whole Plant
  misc_feature: MA Experiment ID: 20001554 Result: Down-regulated in Transcription
  misc_feature: MA Experiment 20001554 PARAMETER Experiment Name: At_Drought_Soil_Dry_P Parameter: Age (day) Value: 21
  misc_feature: MA Experiment 20001554 PARAMETER Experiment Name: At_Drought_Soil_Dry_P Parameter: Organism Value: A. thaliana
  misc_feature: MA Experiment 20001554 PARAMETER Experiment Name: At_Drought_Soil_Dry_P Parameter: Plant Line Value: WS
  misc_feature: MA Experiment 20001554 PARAMETER Experiment Name: At_Drought_Soil_Dry_P Parameter: Post Timepoint (hr) Value: None
  misc_feature: MA Experiment 20001554 PARAMETER Experiment Name: At_Drought_Soil_Dry_P Parameter: Post-Treatment Value: None
  misc_feature: MA Experiment 20001554 PARAMETER Experiment Name: At_Drought_Soil_Dry_P Parameter: Timepoint (day) Value: 7
  misc_feature: MA Experiment 20001554 PARAMETER Experiment Name: At_Drought_Soil_Dry_P Parameter: Treatment Value: Drought vs. No Drought
  misc_feature: MA Experiment ID: 20001560 Result: Up-regulated in Transcription
  misc_feature: MA Experiment 20001560 PARAMETER Experiment Name: At_Drought_Soil_Dry_P Parameter: Age (day) Value: 28
  misc_feature: MA Experiment 20001560 PARAMETER Experiment Name: At_Drought_Soil_Dry_P Parameter: Organism Value: A. thaliana
  misc_feature: MA Experiment 20001560 PARAMETER Experiment Name: At_Drought_Soil_Dry_P Parameter: Plant Line Value: WS
  misc_feature: MA Experiment 20001560 PARAMETER Experiment Name: At_Drought_Soil_Dry_P Parameter: Post Timepoint (hr) Value: None
  misc_feature: MA Experiment 20001560 PARAMETER Experiment Name: At_Drought_Soil_Dry_P Parameter: Post-Treatment Value: None
  misc_feature: MA Experiment 20001560 PARAMETER Experiment Name: At_Drought_Soil_Dry_P Parameter: Timepoint (day) Value: 14
  misc_feature: MA Experiment 20001560 PARAMETER Experiment Name: At_Drought_Soil_Dry_P Parameter: Treatment Value: Drought vs. No Drought
  misc_feature: MA Experiment ID: 20001768 Result: Down-regulated in Transcription
  misc_feature: MA Experiment 20001768 PARAMETER Experiment Name: At_Far-red-enriched-adult_P Parameter: Age (day) Value: 28
  misc_feature: MA Experiment 20001768 PARAMETER Experiment Name: At_Far-red-enriched-adult_P Parameter: Light Value: Far-red enriched vs. White
  misc_feature: MA Experiment 20001768 PARAMETER Experiment Name: At_Far-red-enriched-adult_P Parameter: Organism Value: A. thaliana
  misc_feature: MA Experiment 20001768 PARAMETER Experiment Name: At_Far-red-enriched-adult_P Parameter: Plant Line Value: Columbia
  misc_feature: MA Experiment 20001768 PARAMETER Experiment Name: At_Far-red-enriched-adult_P Parameter: Timepoint (hr) Value: 1
  misc_feature: MA Experiment 20001768 PARAMETER Experiment Name: At_Far-red-enriched-adult_P Parameter: Tissue Value: Aerial
  misc_feature: MA Experiment ID: 20001771 Result: Down-regulated in Transcription
  misc_feature: MA Experiment 20001771 PARAMETER Experiment Name: At_Far-red-enriched-adult_P Parameter: Age (day) Value: 28
  misc_feature: MA Experiment 20001771 PARAMETER Experiment Name: At_Far-red-enriched-adult_P Parameter: Light Value: Far-red enriched vs. White
  misc_feature: MA Experiment 20001771 PARAMETER Experiment Name: At_Far-red-enriched-adult_P Parameter: Organism Value: A. thaliana
  misc_feature: MA Experiment 20001771 PARAMETER Experiment Name: At_Far-red-enriched-adult_P Parameter: Plant Line Value: Columbia
  misc_feature: MA Experiment 20001771 PARAMETER Experiment Name: At_Far-red-enriched-adult_P Parameter: Timepoint (hr) Value: 16
  misc_feature: MA Experiment 20001771 PARAMETER Experiment Name: At_Far-red-enriched-adult_P Parameter: Tissue Value: Aerial
atggcaaaacaaatattctacactctctttctattcctcttatccacggctattctcacggcgtcgtcctccgcccccagagccgcaataacttcaaaacgtgctataaacttcatacaagcctcttgcaaagccacaacatacccaaccgtatgcgtcaactctctcaccggttacgccaactccatccaaacaagccctcgacgtctagccgagaccgcactcaatgtgaccgtgactcaggcccagtccaccaaggtcttcgtctggcgcttggggcgtttcactagtctcaagaaacgagagattcaagccgttaaggactgcatcgaggagatccatgatgccgttgaccgtttgaccatgtcgatccatgaagtgaagatgtgtggtagtgctaaaggtcgtgaccagttttggttccacatgagcaatgctcaaacgtggaccagcgctgctttgactaatgcaaacacttgctccgatgggtttgcgggtcgggtcatggatgggcgggtaaagaactcagtaagggcacggatcttgaatttgggaagaggaactagtaacgctttagccttgatcaatgctttcgctaaaaaatactaaataatgtaatacattttctttttgttcttaattctgtaatttgagctacgaatgtgtggatcagctcgagggaaattttatttcttaaaatgtttcatgcataatccgatgtaattctggataaattttgattaaaaatgaatgtacaagtataacattgttaagtt

SEQ ID NO: 90841 - protein, 202 aa, Arabidopsis thaliana
  peptide (1)..(202): Ceres Seq. ID no. 12725482
  misc_feature (1)..(202): Homolog of NCBI NO: 15232790 NR Description: putative protein; protein id: At3g47380.1
  misc_feature (1)..(202): Homolog of NCBI NO: 15241799 NR Description: ripening-related protein - like; protein id: supported by cDNA: 9669., supported by cDNA: gi_14423453,
  misc_feature (1)..(202): Homolog of NCBI NO: 21618088 NR Description: ripening-related protein-like [Arabidopsis
  misc_feature (51)..(202): Homolog of NCBI NO: 11127599 NR Description: DC 1.2 homolog [Arabidopsis thaliana]
  misc_feature (8)..(201): Homolog of NCBI NO: 7406663 NR Description: putative ripening-related protein [Vitis vinifera]
  misc_feature (11)..(202): Homolog of NCBI NO: 112717 NR Description: 21 KD PROTEIN PRECURSOR (1.2 PROTEIN)
  misc_feature (7)..(202): Homolog of NCBI NO: 7488727 NR Description: 21K protein precursor - alfalfa
  misc_feature (9)..(202): Homolog of NCBI NO: 15234547 NR Description: putative protein; protein id: At4g12390.1, by cDNA: 27615., supported by cDNA: gi_15450853, supported by
  misc_feature (7)..(202): Homolog of NCBI NO: 21555297 NR Description: unknown [Arabidopsis thaliana]
  misc_feature (1)..(202): Homolog of NCBI NO: 15234982 NR Description: putative protein; protein id: At4g25260.1, by cDNA: gi_16604469, supported by cDNA: gi_18958029 [Arabidopsis
MAKQIFYTLFLFLLSTAILTASSSAPRAAITSKRAINFIQASCKATTYPTVCVNSLTGYANSIQTSPRRLAETALNVTVTQAQSTKVFVWRLGRFTSLKKREIQAVKDCIEEIHDAVDRLTMSIHEVKMCGSAKGRDQFWFHMSNAQTWTSAALTNANTCSDGFAGRVMDGRVKNSVRARILNLGRGTSNALALINAFAKKY

SEQ ID NO: 90842 - DNA, 1785 bp, Arabidopsis thaliana
  misc_feature (1)..(1785): Ceres Seq. ID no. 12725483
  misc_feature: MA Experiment ID: 20000307 Result: Up-regulated in Transcription
  misc_feature: MA Experiment 20000307 PARAMETER Experiment Name: At_Germinating_Seeds_Sub_P Parameter: Age (hr) Value: 24 vs. 0
  misc_feature: MA Experiment 20000307 PARAMETER Experiment Name: At_Germinating_Seeds_Sub_P Parameter: Organism Value: A. thaliana
  misc_feature: MA Experiment 20000307 PARAMETER Experiment Name: At_Germinating_Seeds_Sub_P Parameter: Plant Line Value: WS
  misc_feature: MA Experiment 20000307 PARAMETER Experiment Name: At_Germinating_Seeds_Sub_P Parameter: Tissue Value: Germinating Seeds
  misc_feature: MA Experiment ID: 20000355 Result: Up-regulated in Transcription
  misc_feature: MA Experiment 20000355 PARAMETER Experiment Name: At_Siliques_Sub_P Parameter: Age (day) Value: 21
  misc_feature: MA Experiment 20000355 PARAMETER Experiment Name: At_Siliques_Sub_P Parameter: Organism Value: A. thaliana
  misc_feature: MA Experiment 20000355 PARAMETER Experiment Name: At_Siliques_Sub_P Parameter: Plant Line Value: WS
  misc_feature: MA Experiment 20000355 PARAMETER Experiment Name: At_Siliques_Sub_P Parameter: Tissue Value: Less Than 5mm Siliques vs. Whole Plant
  misc_feature: MA Experiment ID: 20000440 Result: Up-regulated in Transcription
  misc_feature: MA Experiment 20000440 PARAMETER Experiment Name: At_Closed-Flower__Sub_P Parameter: Tissue Value: Closed Flower vs. Whole Plant
atgcttagaggcatctttcacatttgcctcttggcctcatttcttcttctaccgttctcctccgccgtacatgatagtggcttcaccggtggtaccgatgctcctcctccgtgggaccataatgtttccccaccaccagaaaccgcaccatccccaacccccacctcgagtccctctacaacctcaccgccatctcctggaccggtggctgcgccatctccgatcaacaacggctctgtctccggggacatgacatggtggtgcaacaagactccacacgctgagacatgcaattactacttccggaagagctcacaaaacaacattaacctacgaccaccaaggttccggtccgagttcttacggatgctggtcaaggtagcacttgaccaagccgtgatcacacacagtcaaaccgttaagtttggaccgagctgcaccaacaaccaaaggaaagccgcttggtcagactgcgtaaatctcttccaaaacacggtggctcagctgaaccgaacgctcaagggacttaacccggcggcttcgagtgatgtcaaatgtacggacttcgacgcacaaacgtggctcagcacggctcagaccaacatcgagacgtgccgttccggatccgaggatcttaacgtctcggatttcgtcatgccggtgatatccaacaagaacttgtcggatttgattggaaactgcttggccgtcaatggagttctcatgaagcaacatgatcatacgactactgctaaccacaaagaatacttcccaagctgggtttcaagacatgagagacgattactcgtatcagcctctttagcgaaatcgagtccccacctagtggtggcacaagacaggtccggccatttccggtcgatccaagctgccataaacttcgcagcgagaaggagattcaagtcaagatttgtgatatatgtgaagaaaggtgtttaccgagagaacattgatgtcggcaatgataaccacaacatcatgctcgtcggagatggcgagagaaaaacaatcatcacaagtggccgaagcgtccagcatggctacaccacctataactctgcaaccggcggctttggaggccaaaggtttgtagcaaaagacatgacattcatcaacacggccgggccattacgtgggcaagctgttgcggttcgatcatcctctgacctctctgttttctaccgtgtcggtatccatggattccaagacaccctctacatccattcacaacgccagttctttagggaatgttatatctcaggcaccatcgacttcatcttcggaaatgcagctgttgtcttccagaactgcatgattctcgtccggcgccctcttcatggccaagccaacatcataacagctcaaggtcgtggtgacccttttcagaacacaggaataacaatccatagctcaaggataattgcagcttctgatttgaagcctgtgatccgagcttacaagacctatttaggccgaccgtggcaagcttattcacgcgtcacaatcatgaagacctatatagataactcgatcagccccttgggatggtctccttggttaagaggatccaattttgctcttaatacagttttctatggagagtataaaaattttggaccggggtcttccacaagatggcgggtccggtggaaaggattccacgccataacgagcaccgcggttgcttctcggtttacggttggaagccttatagccggcggttcatggttgccagccactggcgtgcctttcaagtcagggttgtga

SEQ ID NO: 90843 - protein, 594 aa, Arabidopsis thaliana
  peptide (1)..(594): Ceres Seq. ID no. 12725484
  misc_feature (280)..(581): Pfam Name: Pectinesterase Pfam Description: Pectinesterase
  misc_feature (85)..(594): Homolog of NCBI NO: 15242109 NR Description: pectinesterase family; protein id: At5g51490.1 thaliana] >gi|9758191|dbj|BAB08665.1| pectinesterase [Arabidopsis
  misc_feature (68)..(594): Homolog of NCBI NO: 15242110 NR Description: pectinesterase family; protein id: At5g51500.1 thaliana] >gi|9758192|dbj|BAB08666.1| pectinesterase [Arabidopsis
  misc_feature (172)..(594): Homolog of NCBI NO: 6174914 NR Description: Pectinesterase 2.1 precursor (Pectin
  misc_feature (172)..(594): Homolog of NCBI NO: 7447381 NR Description: pectinesterase (EC 3.1.1.11) PECS-c2 - sweet
  misc_feature (162)..(594): Homolog of NCBI NO: 18406733 NR Description: pectinesterase family; protein id: At2g45220.1, by cDNA: gi_13605695 [Arabidopsis thaliana] At2g45220/F4L23.27 [Arabidopsis thaliana]
  misc_feature (162)..(594): Homolog of NCBI NO: 25313433 NR Description: probable pectinesterase [imported] - Arabidopsis
  misc_feature (150)..(594): Homolog of NCBI NO: 8671350 NR Description: pectin methylesterase [Nicotiana tabacum]
  misc_feature (150)..(594): Homolog of NCBI NO: 6174912 NR Description: Pectinesterase 1.1 precursor (Pectin
  misc_feature (150)..(594): Homolog of NCBI NO: 2098711 NR Description: pectinesterase [Citrus sinensis]
  misc_feature (88)..(594): Homolog of NCBI NO: 6689892 NR Description: pectin methyl esterase [Solanum tuberosum]
MLRGIFHICLLASFLLLPFSSAVHDSGFTGGTDAPPPWDHNVSPPPETAPSPTPTSSPSTTSPPSPGPVAAPSPINNGSVSGDMTWWCNKTPHAETCNYYFRKSSQNNINLRPPRFRSEFLRMLVKVALDQAVITHSQTVKFGPSCTNNQRKAAWSDCVNLFQNTVAQLNRTLKGLNPAASSDVKCTDFDAQTWLSTAQTNIETCRSGSEDLNVSDFVMPVISNKNLSDLIGNCLAVNGVLMKQHDHTTTANHKEYFPSWVSRHERRLLVSASLAKSSPHLVVAQDRSGHFRSIQAAINFAARRRFKSRFVIYVKKGVYRENIDVGNDNHNIMLVGDGERKTIITSGRSVQHGYTTYNSATGGFGGQRFVAKDMTFINTAGPLRGQAVAVRSSSDLSVFYRVGIHGFQDTLYIHSQRQFFRECYISGTIDFIFGNAAVVFQNCMILVRRPLHGQANIITAQGRGDPFQNTGITIHSSRIIAASDLKPVIRAYKTYLGRPWQAYSRVTIMKTYIDNSISPLGWSPWLRGSNFALNTVFYGEYKNFGPGSSTRWRVRWKGFHAITSTAVASRFTVGSLIAGGSWLPATGVPFKSGL

SEQ ID NO: 90844 - protein, 511 aa, Arabidopsis thaliana
  peptide (1)..(511): Ceres Seq. ID no. 12725485
  misc_feature (197)..(498): Pfam Name: Pectinesterase Pfam Description: Pectinesterase
  misc_feature (2)..(511): Homolog of NCBI NO: 15242109 NR Description: pectinesterase family; protein id: At5g51490.1 thaliana] >gi|9758191|dbj|BAB08665.1| pectinesterase [Arabidopsis
  misc_feature (1)..(511): Homolog of NCBI NO: 15242110 NR Description: pectinesterase family; protein id: At5g51500.1 thaliana] >gi|9758192|dbj|BAB08666.1| pectinesterase [Arabidopsis
  misc_feature (89)..(511): Homolog of NCBI NO: 6174914 NR Description: Pectinesterase 2.1 precursor (Pectin
  misc_feature (89)..(511): Homolog of NCBI NO: 7447381 NR Description: pectinesterase (EC 3.1.1.11) PECS-c2 - sweet
  misc_feature (79)..(511): Homolog of NCBI NO: 18406733 NR Description: pectinesterase family; protein id: At2g45220.1, by cDNA: gi_13605695 [Arabidopsis thaliana] At2g45220/F4L23.27 [Arabidopsis thaliana]
  misc_feature (79)..(511): Homolog of NCBI NO: 25313433 NR Description: probable pectinesterase [imported] - Arabidopsis
  misc_feature (67)..(511): Homolog of NCBI NO: 8671350 NR Description: pectin methylesterase [Nicotiana tabacum]
  misc_feature (67)..(511): Homolog of NCBI NO: 6174912 NR Description: Pectinesterase 1.1 precursor (Pectin
  misc_feature (67)..(511): Homolog of NCBI NO: 2098711 NR Description: pectinesterase [Citrus sinensis]
  misc_feature (5)..(511): Homolog of NCBI NO: 6689892 NR Description: pectin methyl esterase [Solanum tuberosum]
MTWWCNKTPHAETCNYYFRKSSQNNINLRPPRFRSEFLRMLVKVALDQAVITHSQTVKFGPSCTNNQRKAAWSDCVNLFQNTVAQLNRTLKGLNPAASSDVKCTDFDAQTWLSTAQTNIETCRSGSEDLNVSDFVMPVISNKNLSDLIGNCLAVNGVLMKQHDHTTTANHKEYFPSWVSRHERRLLVSASLAKSSPHLVVAQDRSGHFRSIQAAINFAARRRFKSRFVIYVKKGVYRENIDVGNDNHNIMLVGDGERKTIITSGRSVQHGYTTYNSATGGFGGQRFVAKDMTFINTAGPLRGQAVAVRSSSDLSVFYRVGIHGFQDTLYIHSQRQFFRECYISGTIDFIFGNAAVVFQNCMILVRRPLHGQANIITAQGRGDPFQNTGITIHSSRIIAASDLKPVIRAYKTYLGRPWQAYSRVTIMKTYIDNSISPLGWSPWLRGSNFALNTVFYGEYKNFGPGSSTRWRVRWKGFHAITSTAVASRFTVGSLIAGGSWLPATGVPFKSGL

SEQ ID NO: 90845 - protein, 472 aa, Arabidopsis thaliana
  peptide (1)..(472): Ceres Seq. ID no. 12725486
  misc_feature (158)..(459): Pfam Name: Pectinesterase Pfam Description: Pectinesterase
  misc_feature (1)..(472): Homolog of NCBI NO: 15242109 NR Description: pectinesterase family; protein id: At5g51490.1 thaliana] >gi|9758191|dbj|BAB08665.1| pectinesterase [Arabidopsis
  misc_feature (1)..(472): Homolog of NCBI NO: 15242110 NR Description: pectinesterase family; protein id: At5g51500.1 thaliana] >gi|9758192|dbj|BAB08666.1| pectinesterase [Arabidopsis
  misc_feature (50)..(472): Homolog of NCBI NO: 6174914 NR Description: Pectinesterase 2.1 precursor (Pectin
  misc_feature (50)..(472): Homolog of NCBI NO: 7447381 NR Description: pectinesterase (EC 3.1.1.11) PECS-c2 - sweet
  misc_feature (40)..(472): Homolog of NCBI NO: 18406733 NR Description: pectinesterase family; protein id: At2g45220.1, by cDNA: gi_13605695 [Arabidopsis thaliana] At2g45220/F4L23.27 [Arabidopsis thaliana]
  misc_feature (40)..(472): Homolog of NCBI NO: 25313433 NR Description: probable pectinesterase [imported] - Arabidopsis
  misc_feature (28)..(472): Homolog of NCBI NO: 8671350 NR Description: pectin methylesterase [Nicotiana tabacum]
  misc_feature (28)..(472): Homolog of NCBI NO: 6174912 NR Description: Pectinesterase 1.1 precursor (Pectin
  misc_feature (28)..(472): Homolog of NCBI NO: 2098711 NR Description: pectinesterase [Citrus sinensis]
  misc_feature (1)..(472): Homolog of NCBI NO: 6689892 NR Description: pectin methyl esterase [Solanum tuberosum]
MLVKVALDQAVITHSQTVKFGPSCTNNQRKAAWSDCVNLFQNTVAQLNRTLKGLNPAASSDVKCTDFDAQTWLSTAQTNIETCRSGSEDLNVSDFVMPVISNKNLSDLIGNCLAVNGVLMKQHDHTTTANHKEYFPSWVSRHERRLLVSASLAKSSPHLVVAQDRSGHFRSIQAAINFAARRRFKSRFVIYVKKGVYRENIDVGNDNHNIMLVGDGERKTIITSGRSVQHGYTTYNSATGGFGGQRFVAKDMTFINTAGPLRGQAVAVRSSSDLSVFYRVGIHGFQDTLYIHSQRQFFRECYISGTIDFIFGNAAVVFQNCMILVRRPLHGQANIITAQGRGDPFQNTGITIHSSRIIAASDLKPVIRAYKTYLGRPWQAYSRVTIMKTYIDNSISPLGWSPWLRGSNFALNTVFYGEYKNFGPGSSTRWRVRWKGFHAITSTAVASRFTVGSLIAGGSWLPATGVPFKSGL

SEQ ID NO: 90846 - DNA, 1604 bp, Arabidopsis thaliana
  misc_feature (1)..(1604): Ceres Seq. ID no. 12725502
  misc_feature: MA Experiment ID: 108434 Result: Up-regulated in Transcription
  misc_feature: MA Experiment 108434 PARAMETER Experiment Name: At_Root_Tips_cDNA_P Parameter: Tissue Value: Root Tips
  misc_feature: MA Experiment ID: 108463 Result: Down-regulated in Transcription
  misc_feature: MA Experiment 108463 PARAMETER Experiment Name: At_Germinating_Seeds_cDNA_P Parameter: Age (day) Value: 3 vs. 0
  misc_feature: MA Experiment 108463 PARAMETER Experiment Name: At_Germinating_Seeds_cDNA_P Parameter: Tissue Value: Germinating Seeds
  misc_feature: MA Experiment ID: 108464 Result: Down-regulated in Transcription
  misc_feature: MA Experiment 108464 PARAMETER Experiment Name: At_Germinating_Seeds_cDNA_P Parameter: Age (day) Value: 4 vs. 0
  misc_feature: MA Experiment 108464 PARAMETER Experiment Name: At_Germinating_Seeds_cDNA_P Parameter: Tissue Value: Germinating Seeds
  misc_feature: MA Experiment ID: 108488 Result: Up-regulated in Transcription
  misc_feature: MA Experiment ID: 108489 Result: Up-regulated in Transcription
  misc_feature: MA Experiment ID: 108595 Result: Down-regulated in Transcription
  misc_feature: MA Experiment 108595 PARAMETER Experiment Name: At_Ler-pi_Ovule_cDNA_P Parameter: Plant Line Value: null
  misc_feature: MA Experiment ID: 20000794 Result: Down-regulated in Transcription
  misc_feature: MA Experiment 20000794 PARAMETER Experiment Name: At_Petals_P Parameter: Age (day) Value: 23-25 days
  misc_feature: MA Experiment 20000794 PARAMETER Experiment Name: At_Petals_P Parameter: Plant Line Value: WS
  misc_feature: MA Experiment 20000794 PARAMETER Experiment Name: At_Petals_P Parameter: Tissue Value: Petals vs. Whole plant
  misc_feature: MA Experiment ID: 20001451 Result: Down-regulated in Transcription
  misc_feature: MA Experiment 20001451 PARAMETER Experiment Name: At_Far-red-induction_P Parameter: Age (day) Value: 7
  misc_feature: MA Experiment 20001451 PARAMETER Experiment Name: At_Far-red-induction_P Parameter: Light Value: Far-red vs. White
  misc_feature: MA Experiment 20001451 PARAMETER Experiment Name: At_Far-red-induction_P Parameter: Organism Value: A. thaliana
  misc_feature: MA Experiment 20001451 PARAMETER Experiment Name: At_Far-red-induction_P Parameter: Plant Line Value: Columbia
  misc_feature: MA Experiment 20001451 PARAMETER Experiment Name: At_Far-red-induction_P Parameter: Timepoint (hr) Value: 24
  misc_feature: MA Experiment 20001451 PARAMETER Experiment Name: At_Far-red-induction_P Parameter: Tissue Value: Whole Plant
  misc_feature: MA Experiment ID: 20001557 Result: Up-regulated in Transcription
  misc_feature: MA Experiment 20001557 PARAMETER Experiment Name: At_Drought_Soil_Dry_P Parameter: Age (day) Value: 27
  misc_feature: MA Experiment 20001557 PARAMETER Experiment Name: At_Drought_Soil_Dry_P Parameter: Organism Value: A. thaliana
  misc_feature: MA Experiment 20001557 PARAMETER Experiment Name: At_Drought_Soil_Dry_P Parameter: Plant Line Value: WS
  misc_feature: MA Experiment 20001557 PARAMETER Experiment Name: At_Drought_Soil_Dry_P Parameter: Post Timepoint (hr) Value: 3
  misc_feature: MA Experiment 20001557 PARAMETER Experiment Name: At_Drought_Soil_Dry_P Parameter: Post-Treatment Value: Re-Water vs. No Drought
  misc_feature: MA Experiment 20001557 PARAMETER Experiment Name: At_Drought_Soil_Dry_P Parameter: Timepoint (day) Value: 13
  misc_feature: MA Experiment 20001557 PARAMETER Experiment Name: At_Drought_Soil_Dry_P Parameter: Treatment Value: Drought vs. No Drought
  misc_feature: MA Experiment ID: 20001560 Result: Up-regulated in Transcription
  misc_feature: MA Experiment 20001560 PARAMETER Experiment Name: At_Drought_Soil_Dry_P Parameter: Age (day) Value: 28
  misc_feature: MA Experiment 20001560 PARAMETER Experiment Name: At_Drought_Soil_Dry_P Parameter: Organism Value: A. thaliana
  misc_feature: MA Experiment 20001560 PARAMETER Experiment Name: At_Drought_Soil_Dry_P Parameter: Plant Line Value: WS
  misc_feature: MA Experiment 20001560 PARAMETER Experiment Name: At_Drought_Soil_Dry_P Parameter: Post Timepoint (hr) Value: None
  misc_feature: MA Experiment 20001560 PARAMETER Experiment Name: At_Drought_Soil_Dry_P Parameter: Post-Treatment Value: None
  misc_feature: MA Experiment 20001560 PARAMETER Experiment Name: At_Drought_Soil_Dry_P Parameter: Timepoint (day) Value: 14
  misc_feature: MA Experiment 20001560 PARAMETER Experiment Name: At_Drought_Soil_Dry_P Parameter: Treatment Value: Drought vs. No Drought
  misc_feature: MA Experiment ID: 20001757 Result: Up-regulated in Transcription
  misc_feature: MA Experiment 20001757 PARAMETER Experiment Name: At_50mM_NH4NO3_L-to-H_P Parameter: Timepoint (hr) Value: 6
  misc_feature: MA Experiment 20001757 PARAMETER Experiment Name: At_50mM_NH4NO3_L-to-H_P Parameter: Tissue Value: Leaf
  misc_feature: MA Experiment 20001757 PARAMETER Experiment Name: At_50mM_NH4NO3_L-to-H_P Parameter: Treatment Value: 50mM NH4NO3 vs 100mM Mannitol
acgagacaaccaaacacagatctgcttccttcttcacctttttttttttttttttgtaattttggtttccctttttttttattaaataagatttattcctccatcgttacctaatccccttcttcgtcttcttcagcttcactgagtcttacgaacatagcaaaatccaaatcaaattcctgaagaaacctctttcgctctcgtcttcgttttcagatcaacaagaaatggcaacagcaacatcagcttctctgttttcaactgtttcttcatcttactccaaagctagctccataccacattcaagactccaatctgtgaaattcaactcagtccctagcttcaccggtctcaaatcaacctctctcatctccggatctgattcctcttccttagccaagactctacgcggttccgtaacgaaagcacaaacatctgacaagaagccttacggattcaaaatcaacgcttcatacaaagtagctgttcttggtgctgctggtggtataggtcagcctttatcacttctcatcaagatgtctccgttagtctctacgcttcatctttacgatatcgccaatgttaaaggagttgctgctgatctaagtcattgtaacactccttctcaagttcgtgatttcactggtccttctgagttagctgattgtttgaaagatgttaacgttgttgtcatccctgctggtgtgccgaggaaacccggtatgactcgtgacgatcttttcaacatcaatgccaatattgtcaagactcttgttgaagctgttgctgagaattgccctaatgctttcattcatattattagtaacccggttaactctacggtacctattgctgctgaagtgttgaagaagaaaggtgtttatgatcctaagaagctgtttggtgtcactactttggatgttgtgagggctaacacttttgtttctcagaagaagaatcttaagcttattgatgttgatgttccggttattggtggacatgctggaatcaccattttgcctctcctctcgaagacaaaaccgtctgttaactttactgatgaagagatccaagagctcactgttaggattcagaacgctggtactgaggttgttgatgctaaggcaggtgcaggttcagctactttgtcaatggcttatgctgctgctagatttgtagagtcatctcttcgtgctcttgatggagacggagatgtctacgagtgctcgtttgtggagtcgactctgactgatcttcctttctttgcatcacgggttaagatagggaagaacggtcttgaagctgtgattgagtcagaccttcagggattgactgagtatgagcagaaagcactagaagctcttaaggtagaattgaaagctagcattgacaagggtgtcgcatttgcaaacaaaccagctgctgcagcagctaactagatcgcaagctgataacatttttcttctgatcatttcgagttttgttttatttttcatatttgttgcatcggcgagacattttcgtgttgtagaataaagaatgtatttgcttcagtttgaagattttggaacatggcattgaagcagaatttataaatcatcacc

SEQ ID NO: 90847 - protein, 403 aa, Arabidopsis thaliana
  peptide (1)..(403): Ceres Seq. ID no. 12725503
  misc_feature (228)..(394): Pfam Name: lactate/malate dehydrogenase, alpha/beta Pfam Description: lactate/malate dehydrogenase, alpha/beta
  misc_feature (1)..(403): Homolog of NCBI NO: 15232820 NR Description: chloroplast NAD-dependent malate dehydrogenase; id: At3g47520.1, supported by cDNA: gi_3256065 [Arabidopsis
  misc_feature (1)..(403): Homolog of NCBI NO: 25283601 NR Description: malate dehydrogenase (EC 1.1.1.37), chloroplast
  misc_feature (4)..(400): Homolog of NCBI NO: 5123836 NR Description: NAD-malate dehydrogenase [Nicotiana tabacum]
MATATSASLFSTVSSSYSKASSIPHSRLQSVKFNSVPSFTGLKSTSLISGSDSSSLAKTLRGSVTKAQTSDKKPYGFKINASYKVAVLGAAGGIGQPLSLLIKMSPLVSTLHLYDIANVKGVAADLSHCNTPSQVRDFTGPSELADCLKDVNVVVIPAGVPRKPGMTRDDLFNINANIVKTLVEAVAENCPNAFIHIISNPVNSTVPIAAEVLKKKGVYDPKKLFGVTTLDVVRANTFVSQKKNLKLIDVDVPVIGGHAGITILPLLSKTKPSVNFTDEEIQELTVRIQNAGTEVVDAKAGAGSATLSMAYAAARFVESSLRALDGDGDVYECSFVESTLTDLPFFASRVKIGKNGLEAVIESDLQGLTEYEQKALEALKVELKASIDKGVAFANKPAAAAAN

SEQ ID NO: 90848 - protein, 300 aa, Arabidopsis thaliana; identical to SEQ ID NO: 22021
  peptide (1)..(300): Ceres Seq. ID no. 12725504
  misc_feature (125)..(291): Pfam Name: lactate/malate dehydrogenase, alpha/beta Pfam Description: lactate/malate dehydrogenase, alpha/beta
  misc_feature (1)..(300): Homolog of NCBI NO: 15232820 NR Description: chloroplast NAD-dependent malate dehydrogenase; id: At3g47520.1, supported by cDNA: gi_3256065 [Arabidopsis
  misc_feature (1)..(300): Homolog of NCBI NO: 25283601 NR Description: malate dehydrogenase (EC 1.1.1.37), chloroplast
  misc_feature (1)..(297): Homolog of NCBI NO: 5123836 NR Description: NAD-malate dehydrogenase [Nicotiana tabacum]

SEQ ID NO: 90849 - protein, 238 aa, Arabidopsis thaliana; identical to SEQ ID NO: 22022
  peptide (1)..(238): Ceres Seq. ID no. 12725505
  misc_feature (63)..(229): Pfam Name: lactate/malate dehydrogenase, alpha/beta Pfam Description: lactate/malate dehydrogenase, alpha/beta
  misc_feature (1)..(238): Homolog of NCBI NO: 15232820 NR Description: chloroplast NAD-dependent malate dehydrogenase; id: At3g47520.1, supported by cDNA: gi_3256065 [Arabidopsis
  misc_feature (1)..(238): Homolog of NCBI NO: 25283601 NR Description: malate dehydrogenase (EC 1.1.1.37), chloroplast
  misc_feature (1)..(235): Homolog of NCBI NO: 5123836 NR Description: NAD-malate dehydrogenase [Nicotiana tabacum]

SEQ ID NO: 90850 - DNA, 1158 bp, Arabidopsis thaliana
  misc_feature (1)..(1158): Ceres Seq. ID no. 12725540
  misc_feature: MA Experiment ID: 20000307 Result: Up-regulated in Transcription
  misc_feature: MA Experiment 20000307 PARAMETER Experiment Name: At_Germinating_Seeds_Sub_P Parameter: Age (hr) Value: 24 vs. 0
  misc_feature: MA Experiment 20000307 PARAMETER Experiment Name: At_Germinating_Seeds_Sub_P Parameter: Organism Value: A. thaliana
  misc_feature: MA Experiment 20000307 PARAMETER Experiment Name: At_Germinating_Seeds_Sub_P Parameter: Plant Line Value: WS
  misc_feature: MA Experiment 20000307 PARAMETER Experiment Name: At_Germinating_Seeds_Sub_P Parameter: Tissue Value: Germinating Seeds
  misc_feature: MA Experiment ID: 20000315 Result: Down-regulated in Transcription
  misc_feature: MA Experiment 20000315 PARAMETER Experiment Name: At_14day_Shoots-Roots_Sub_P Parameter: Age (day) Value: 14
  misc_feature: MA Experiment 20000315 PARAMETER Experiment Name: At_14day_Shoots-Roots_Sub_P Parameter: Organism Value: A. thaliana
  misc_feature: MA Experiment 20000315 PARAMETER Experiment Name: At_14day_Shoots-Roots_Sub_P Parameter: Plant Line Value: WS
  misc_feature: MA Experiment 20000315 PARAMETER Experiment Name: At_14day_Shoots-Roots_Sub_P Parameter: Tissue Value: Shoots vs. Whole Plant
  misc_feature: MA Experiment ID: 20000352 Result: Down-regulated in Transcription
  misc_feature: MA Experiment 20000352 PARAMETER Experiment Name: At_Drought_Sub_P Parameter: Age (day) Value: 7
  misc_feature: MA Experiment 20000352 PARAMETER Experiment Name: At_Drought_Sub_P Parameter: Organism Value: A. thaliana
  misc_feature: MA Experiment 20000352 PARAMETER Experiment Name: At_Drought_Sub_P Parameter: Plant Line Value: WS
  misc_feature: MA Experiment 20000352 PARAMETER Experiment Name: At_Drought_Sub_P Parameter: Timepoint (hr) Value: 6
  misc_feature: MA Experiment 20000352 PARAMETER Experiment Name: At_Drought_Sub_P Parameter: Tissue Value: Whole Plant
  misc_feature: MA Experiment 20000352 PARAMETER Experiment Name: At_Drought_Sub_P Parameter: Treatment Value: Drought vs. No Drought
  misc_feature: MA Experiment ID: 20000355 Result: Up-regulated in Transcription
  misc_feature: MA Experiment 20000355 PARAMETER Experiment Name: At_Siliques_Sub_P Parameter: Age (day) Value: 21
  misc_feature: MA Experiment 20000355 PARAMETER Experiment Name: At_Siliques_Sub_P Parameter: Organism Value: A. thaliana
  misc_feature: MA Experiment 20000355 PARAMETER Experiment Name: At_Siliques_Sub_P Parameter: Plant Line Value: WS
  misc_feature: MA Experiment 20000355 PARAMETER Experiment Name: At_Siliques_Sub_P Parameter: Tissue Value: Less Than 5mm Siliques vs. Whole Plant
  misc_feature: MA Experiment ID: 20000440 Result: Up-regulated in Transcription
  misc_feature: MA Experiment 20000440 PARAMETER Experiment Name: At_Closed-Flower__Sub_P Parameter: Tissue Value: Closed Flower vs. Whole Plant
atggaaggaaattgctcgcaaggacgctttgattctcaagtttcttctatgagagatcttcgtccaaatgctataaatcagaatcagaaacaacaccatccaaattctcgacaagactcaggctttaacaatactatggatacacgtcacaacaatgtcgacagaggaaagaaatcaatgagtgaagatgatgaactatgtttgttaagtagtgatggtcaaaacaagtccaaggaaaactctccttggcaacgtgtgaaatggatggataagatggtgaagctaatgataactgctctttcttatatcggtgaagactctggttctgataagaaatttgcagttttgcagaagaaaggtaagtggagatcagtttctaaagtcatggatgaaagaggttatcatgtttcgccgcagcaatgtgaagataagtttaatgatcttaataagcggtataagaagcttaatgagatgcttggtagaggaacttcttgtgaggttgttgagaatccttcactcttggataagattgattacttgaatgagaaagagaaagatgaagttaggagaatcatgagctctaaacatcttttctatgaagagatgtgttcttatcataacggaaacagattgcatttgcctcatgaccctgcggtacagagatctcttcacttgattacgcttggaagccgtgatgatcatgataatgatgaacatgggaaacaccaaaacgaagatcttgatgatgatgatgactatgaggaagatcatgatggagctttaagtgaccgtcctttgaagaggttaagacaaagccagagccatgaagatgttggtcatccgaataagggttatgatgtcccttgcttgcctcgttcccaagctgatgtgaatcgaggaatatcgctagatagtaggaaagctgctggcttacagaggcagcagattgagtctaagtctttagagttagaaggacgaaagcttcagattcaagcggagatgatggaactggagagacaacaattcaagtgggaggtgtttagtaagagaagagagcagaagcttgcgaaaatgagaatggaaaacgaaaggatgaaacttgagaatgaaaggatgagtcttgaactgaaacgaatagagttgggtgctaaattgtga

SEQ ID NO: 90851 - protein, 385 aa, Arabidopsis thaliana
  peptide (1)..(385): Ceres Seq. ID no. 12725541
  misc_feature (1)..(385): Homolog of NCBI NO: 15223769 NR Description: hypothetical protein; protein id: At1g76870.1
  misc_feature (32)..(381): Homolog of NCBI NO: 18394964 NR Description: expressed protein; protein id: At1g21200.1, by cDNA: gi_15027986, supported by cDNA: gi_20259202 [Arabidopsis
MEGNCSQGRFDSQVSSMRDLRPNAINQNQKQHHPNSRQDSGFNNTMDTRHNNVDRGKKSMSEDDELCLLSSDGQNKSKENSPWQRVKWMDKMVKLMITALSYIGEDSGSDKKFAVLQKKGKWRSVSKVMDERGYHVSPQQCEDKFNDLNKRYKKLNEMLGRGTSCEVVENPSLLDKIDYLNEKEKDEVRRIMSSKHLFYEEMCSYHNGNRLHLPHDPAVQRSLHLITLGSRDDHDNDEHGKHQNEDLDDDDDYEEDHDGALSDRPLKRLRQSQSHEDVGHPNKGYDVPCLPRSQADVNRGISLDSRKAAGLQRQQIESKSLELEGRKLQIQAEMMELERQQFKWEVFSKRREQKLAKMRMENERMKLENERMSLELKRIELGAKL

SEQ ID NO: 90852 - protein, 369 aa, Arabidopsis thaliana
  peptide (1)..(369): Ceres Seq. ID no. 12725542
  misc_feature (1)..(369): Homolog of NCBI NO: 15223769 NR Description: hypothetical protein; protein id: At1g76870.1
  misc_feature (16)..(365): Homolog of NCBI NO: 18394964 NR Description: expressed protein; protein id: At1g21200.1, by cDNA: gi_15027986, supported by cDNA: gi_20259202 [Arabidopsis
MRDLRPNAINQNQKQHHPNSRQDSGFNNTMDTRHNNVDRGKKSMSEDDELCLLSSDGQNKSKENSPWQRVKWMDKMVKLMITALSYIGEDSGSDKKFAVLQKKGKWRSVSKVMDERGYHVSPQQCEDKFNDLNKRYKKLNEMLGRGTSCEVVENPSLLDKIDYLNEKEKDEVRRIMSSKHLFYEEMCSYHNGNRLHLPHDPAVQRSLHLITLGSRDDHDNDEHGKHQNEDLDDDDDYEEDHDGALSDRPLKRLRQSQSHEDVGHPNKGYDVPCLPRSQADVNRGISLDSRKAAGLQRQQIESKSLELEGRKLQIQAEMMELERQQFKWEVFSKRREQKLAKMRMENERMKLENERMSLELKRIELGAKL

SEQ ID NO: 90853 - protein, 340 aa, Arabidopsis thaliana
  peptide (1)..(340): Ceres Seq. ID no. 12725543
  misc_feature (1)..(340): Homolog of NCBI NO: 15223769 NR Description: hypothetical protein; protein id: At1g76870.1
  misc_feature (1)..(336): Homolog of NCBI NO: 18394964 NR Description: expressed protein; protein id: At1g21200.1, by cDNA: gi_15027986, supported by cDNA: gi_20259202 [Arabidopsis
MDTRHNNVDRGKKSMSEDDELCLLSSDGQNKSKENSPWQRVKWMDKMVKLMITALSYIGEDSGSDKKFAVLQKKGKWRSVSKVMDERGYHVSPQQCEDKFNDLNKRYKKLNEMLGRGTSCEVVENPSLLDKIDYLNEKEKDEVRRIMSSKHLFYEEMCSYHNGNRLHLPHDPAVQRSLHLITLGSRDDHDNDEHGKHQNEDLDDDDDYEEDHDGALSDRPLKRLRQSQSHEDVGHPNKGYDVPCLPRSQADVNRGISLDSRKAAGLQRQQIESKSLELEGRKLQIQAEMMELERQQFKWEVFSKRREQKLAKMRMENERMKLENERMSLELKRIELGAKL

SEQ ID NO: 90854 - DNA, 735 bp, Arabidopsis thaliana
  misc_feature (1)..(735): Ceres Seq. ID no. 12725578
  misc_feature: MA Experiment ID: 20000184 Result: Up-regulated in Transcription
  misc_feature: MA Experiment 20000184 PARAMETER Experiment Name: At_Shoots__P Parameter: Age (day) Value: 7
  misc_feature: MA Experiment 20000184 PARAMETER Experiment Name: At_Shoots__P Parameter: Tissue Value: Shoots vs. Whole Plant
  misc_feature: MA Experiment ID: 20000286 Result: Up-regulated in Transcription
  misc_feature: MA Experiment 20000286 PARAMETER Experiment Name: At_Open_Flower_P Parameter: Age (day) Value: 21
  misc_feature: MA Experiment 20000286 PARAMETER Experiment Name: At_Open_Flower_P Parameter: Plant Line Value: WS
  misc_feature: MA Experiment 20000286 PARAMETER Experiment Name: At_Open_Flower_P Parameter: Tissue Value: Half Open vs. Whole Plant
  misc_feature: MA Experiment ID: 20000438 Result: Up-regulated in Transcription
  misc_feature: MA Experiment 20000438 PARAMETER Experiment Name: At_Shoots__P Parameter: Age (day) Value: 14
  misc_feature: MA Experiment 20000438 PARAMETER Experiment Name: At_Shoots__P Parameter: Tissue Value: Shoots vs. Whole Plant
  misc_feature: MA Experiment ID: 20000794 Result: Up-regulated in Transcription
  misc_feature: MA Experiment 20000794 PARAMETER Experiment Name: At_Petals_P Parameter: Age (day) Value: 23-25 days
  misc_feature: MA Experiment 20000794 PARAMETER Experiment Name: At_Petals_P Parameter: Plant Line Value: WS
  misc_feature: MA Experiment 20000794 PARAMETER Experiment Name: At_Petals_P Parameter: Tissue Value: Petals vs. Whole plant
  misc_feature: MA Experiment ID: 20001248 Result: Up-regulated in Transcription
  misc_feature: MA Experiment 20001248 PARAMETER Experiment Name: At_Far-red-induction_P Parameter: Age (day) Value: 7
  misc_feature: MA Experiment 20001248 PARAMETER Experiment Name: At_Far-red-induction_P Parameter: Light Value: Far-red vs. White
  misc_feature: MA Experiment 20001248 PARAMETER Experiment Name: At_Far-red-induction_P Parameter: Organism Value: A. thaliana
  misc_feature: MA Experiment 20001248 PARAMETER Experiment Name: At_Far-red-induction_P Parameter: Plant Line Value: Columbia
  misc_feature: MA Experiment 20001248 PARAMETER Experiment Name: At_Far-red-induction_P Parameter: Timepoint (hr) Value: 4
  misc_feature: MA Experiment 20001248 PARAMETER Experiment Name: At_Far-red-induction_P Parameter: Tissue Value: Whole Plant
  misc_feature: MA Experiment ID: 20001450 Result: Up-regulated in Transcription
  misc_feature: MA Experiment 20001450 PARAMETER Experiment Name: At_Far-red-induction_P Parameter: Age (day) Value: 7
  misc_feature: MA Experiment 20001450 PARAMETER Experiment Name: At_Far-red-induction_P Parameter: Light Value: Far-red vs. White
  misc_feature: MA Experiment 20001450 PARAMETER Experiment Name: At_Far-red-induction_P Parameter: Organism Value: A. thaliana
  misc_feature: MA Experiment 20001450 PARAMETER Experiment Name: At_Far-red-induction_P Parameter: Plant Line Value: Columbia
  misc_feature: MA Experiment 20001450 PARAMETER Experiment Name: At_Far-red-induction_P Parameter: Timepoint (hr) Value: 8
  misc_feature: MA Experiment 20001450 PARAMETER Experiment Name: At_Far-red-induction_P Parameter: Tissue Value: Whole Plant
  misc_feature: MA Experiment ID: 20001910 Result: Up-regulated in Transcription
  misc_feature: MA Experiment 20001910 PARAMETER Experiment Name: At_Drought_Reproduction_P Parameter: Age (day) Value: 37
  misc_feature: MA Experiment 20001910 PARAMETER Experiment Name: At_Drought_Reproduction_P Parameter: Organism Value: A. thaliana
  misc_feature: MA Experiment 20001910 PARAMETER Experiment Name: At_Drought_Reproduction_P Parameter: Plant Line Value: WS
  misc_feature: MA Experiment 20001910 PARAMETER Experiment Name: At_Drought_Reproduction_P Parameter: Timepoint (day) Value: 7
  misc_feature: MA Experiment 20001910 PARAMETER Experiment Name: At_Drought_Reproduction_P Parameter: Tissue Value: Flowers
  misc_feature: MA Experiment 20001910 PARAMETER Experiment Name: At_Drought_Reproduction_P Parameter: Treatment Value: Drought vs. No Drought
atgaccgagtcatccattatctccgtcaaacaatcgtctccggtgccggaggaggaggatcatcatcatcaccaacaagactcccaccgaaccaacaccaagaaacgtgtaagatccgacccgggttaccgaggcgtccggatgcgaacgtggggcaaatgggtctccgagatccgagagcctcgcaagaagagccgaatctggctaggcactttctccacaccggaaatggcggcgcgtgcacatgacgcagctgctctcaccattaaaggaacttccgccgtcctcaacttcccggagctcgccacttaccttccccgtccagcttcctcctctccacgcgacgttcaagccgcagccgccgtagcggccgccatggacttctccccctcctcctcctctctcgtagtctccgatccaaccaccgtcatcgccccagctgagacgcagttgtcttcctcgagctattcaacgtgtacgtcatcgtcgttgtcaccgtcaagcgaagaagctgcgtcgacggcggaagaactaagcgagatagtggagttaccgagtctagagacgagttacgatgagtcattgagcgagtttgtgtacgttgactcggcgtatccacctagttcgccttggtatattaataattgttatagcttttattaccacagcgacgaaaatggcatttcgatggctgaacctttcgactcttccaattttggccccctttttccttag

SEQ ID NO: 90855 - protein, 244 aa, Arabidopsis thaliana
  peptide (1)..(244): Ceres Seq. ID no. 12725579
  misc_feature (40)..(104): Pfam Name: AP2 domain Pfam Description: AP2 domain
  misc_feature (1)..(244): Homolog of NCBI NO: 15223860 NR Description: transcription factor TINY, putative; protein id:
  misc_feature (27)..(236): Homolog of NCBI NO: 15233928 NR Description: transcription factor TINY, putative; protein id:
  misc_feature (20)..(211): Homolog of NCBI NO: 15239113 NR Description: transcription factor TINY, putative; protein id: [Arabidopsis thaliana] >gi|11282310|pir||T48518 transcription
  misc_feature (24)..(224): Homolog of NCBI NO: 25352180 NR Description: TINY-like AP2 domain transcription factor
  misc_feature (34)..(207): Homolog of NCBI NO: 15239501 NR Description: transcription factor TINY; protein id: At5g25810.1
  misc_feature (15)..(229): Homolog of NCBI NO: 25992102 NR Description: dehydration responsive element binding protein
  misc_feature (17)..(187): Homolog of NCBI NO: 37536842 NR Description: putative DNA binding protein [Oryza sativa
  misc_feature (13)..(140): Homolog of NCBI NO: 15235858 NR Description: AP2 domain TINY-related protein; protein id: [Arabidopsis thaliana] >gi|25350649|pir||F85186 apetala2 domain
  misc_feature (12)..(205): Homolog of NCBI NO: 21592664 NR Description: putative AP2 domain transcription factor
  misc_feature (2)..(212): Homolog of NCBI NO: 15228171 NR Description: transcription factor TINY, putative; protein id: [Arabidopsis thaliana] >gi|2062174|gb|AAB63648.1| transcription
MTESSIISVKQSSPVPEEEDHHHHQQDSHRTNTKKRVRSDPGYRGVRMRTWGKWVSEIREPRKKSRIWLGTFSTPEMAARAHDAAALTIKGTSAVLNFPELATYLPRPASSSPRDVQAAAAVAAAMDFSPSSSSLVVSDPTTVIAPAETQLSSSSYSTCTSSSLSPSSEEAASTAEELSEIVELPSLETSYDESLSEFVYVDSAYPPSSPWYINNCYSFYYHSDENGISMAEPFDSSNFGPLFP

SEQ ID NO: 90856 - protein, 197 aa, Arabidopsis thaliana
  peptide (1)..(197): Ceres Seq. ID no. 12725580
  misc_feature (1)..(57): Pfam Name: AP2 domain Pfam Description: AP2 domain
  misc_feature (1)..(197): Homolog of NCBI NO: 15223860 NR Description: transcription factor TINY, putative; protein id:
  misc_feature (1)..(189): Homolog of NCBI NO: 15233928 NR Description: transcription factor TINY, putative; protein id:
  misc_feature (1)..(164): Homolog of NCBI NO: 15239113 NR Description: transcription factor TINY, putative; protein id: [Arabidopsis thaliana] >gi|11282310|pir||T48518 transcription
  misc_feature (1)..(177): Homolog of NCBI NO: 25352180 NR Description: TINY-like AP2 domain transcription factor
  misc_feature (1)..(160): Homolog of NCBI NO: 15239501 NR Description: transcription factor TINY; protein id: At5g25810.1
  misc_feature (1)..(182): Homolog of NCBI NO: 25992102 NR Description: dehydration responsive element binding protein
  misc_feature (1)..(140): Homolog of NCBI NO: 37536842 NR Description: putative DNA binding protein [Oryza sativa
  misc_feature (1)..(93): Homolog of NCBI NO: 15235858 NR Description: AP2 domain TINY-related protein; protein id: [Arabidopsis thaliana] >gi|25350649|pir||F85186 apetala2 domain
  misc_feature (1)..(158): Homolog of NCBI NO: 21592664 NR Description: putative AP2 domain transcription factor
  misc_feature (1)..(165): Homolog of NCBI NO: 15228171 NR Description: transcription factor TINY, putative; protein id: [Arabidopsis thaliana] >gi|2062174|gb|AAB63648.1| transcription
MRTWGKWVSEIREPRKKSRIWLGTFSTPEMAARAHDAAALTIKGTSAVLNFPELATYLPRPASSSPRDVQAAAAVAAAMDFSPSSSSLVVSDPTTVIAPAETQLSSSSYSTCTSSSLSPSSEEAASTAEELSEIVELPSLETSYDESLSEFVYVDSAYPPSSPWYINNCYSFYYHSDENGISMAEPFDSSNFGPLFP

SEQ ID NO: 90857 - protein, 168 aa, Arabidopsis thaliana
  peptide (1)..(168): Ceres Seq. ID no. 12725581
  misc_feature (1)..(168): Homolog of NCBI NO: 15223860 NR Description: transcription factor TINY, putative; protein id:
  misc_feature (1)..(160): Homolog of NCBI NO: 15233928 NR Description: transcription factor TINY, putative; protein id:
  misc_feature (1)..(135): Homolog of NCBI NO: 15239113 NR Description: transcription factor TINY, putative; protein id: [Arabidopsis thaliana] >gi|11282310|pir||T48518 transcription
  misc_feature (1)..(148): Homolog of NCBI NO: 25352180 NR Description: TINY-like AP2 domain transcription factor
  misc_feature (1)..(131): Homolog of NCBI NO: 15239501 NR Description: transcription factor TINY; protein id: At5g25810.1
  misc_feature (1)..(153): Homolog of NCBI NO: 25992102 NR Description: dehydration responsive element binding protein
  misc_feature (1)..(111): Homolog of NCBI NO: 37536842 NR Description: putative DNA binding protein [Oryza sativa
  misc_feature (1)..(64): Homolog of NCBI NO: 15235858 NR Description: AP2 domain TINY-related protein; protein id: [Arabidopsis thaliana] >gi|25350649|pir||F85186 apetala2 domain
  misc_feature (1)..(129): Homolog of NCBI NO: 21592664 NR Description: putative AP2 domain transcription factor
  misc_feature (1)..(136): Homolog of NCBI NO: 15228171 NR Description: transcription factor TINY, putative; protein id: [Arabidopsis thaliana] >gi|2062174|gb|AAB63648.1| transcription
MAARAHDAAALTIKGTSAVLNFPELATYLPRPASSSPRDVQAAAAVAAAMDFSPSSSSLVVSDPTTVIAPAETQLSSSSYSTCTSSSLSPSSEEAASTAEELSEIVELPSLETSYDESLSEFVYVDSAYPPSSPWYINNCYSFYYHSDENGISMAEPFDSSNFGPLFP

SEQ ID NO: 90858 - DNA, 1968 bp, Arabidopsis thaliana
  misc_feature (1)..(1968): Ceres Seq. ID no. 12725586
  misc_feature: MA Experiment ID: 20000184 Result: Down-regulated in Transcription
  misc_feature: MA Experiment 20000184 PARAMETER Experiment Name: At_Shoots__P Parameter: Age (day) Value: 7
  misc_feature: MA Experiment 20000184 PARAMETER Experiment Name: At_Shoots__P Parameter: Tissue Value: Shoots vs. Whole Plant
  misc_feature: MA Experiment ID: 20000437 Result: Up-regulated in Transcription
  misc_feature: MA Experiment 20000437 PARAMETER Experiment Name: At_Drought_P Parameter: Age (day) Value: 8
  misc_feature: MA Experiment 20000437 PARAMETER Experiment Name: At_Drought_P Parameter: Organism Value: A. thaliana
  misc_feature: MA Experiment 20000437 PARAMETER Experiment Name: At_Drought_P Parameter: Plant Line Value: WS
  misc_feature: MA Experiment 20000437 PARAMETER Experiment Name: At_Drought_P Parameter: Timepoint (hr) Value: 24
  misc_feature: MA Experiment 20000437 PARAMETER Experiment Name: At_Drought_P Parameter: Tissue Value: Whole Plant
  misc_feature: MA Experiment 20000437 PARAMETER Experiment Name: At_Drought_P Parameter: Treatment Value: Drought vs. No Drought
ggctcgatttttgttggagtccttgattcgagcaagtttaaagactcgagggttttcttctggataacgtaattagatactcgtgttttctgaaagggtcatcactgctattgtcatagcttgagaaaggatctatttttaatatcagtgatattggtatctatgagatttggagtagttgtttggaggaacgtgtcctcttgcttgatgtgaagattgcttcttgttgtttgctgtttcttaatggagtggaggggaatcctctgctcgttgctttttattgtttccgtgggagagtcgtcaagtagatttgggataatgtggcatcctaatcttggtgttgattctggacaatacttgacttggccaatcttaagtgctagtgtattcgtggttattgccatcctcctccccatgtatcttatctttgagcacttagcttcttataatcaaccagaggaacagaagtttcttattggacttattctgatggttcctgtttatgccgtggaatcgtttttgtctttggtgaattcagaagcagctttcaactgcgaggtgattagagattgttatgaagcttttgcactctattgtttcgagagatatttgatagcttgcctagatggagaagaacgtacaattgaattcatggaacaacagacagttatcacccagagtactcctcttctagaaggcacatgttcttatggggttgtagagcatccctttccaatgaactgcttcgtaaaagattggagtcttggtcctcagttttatcatgctgtgaaaattggcatcgttcaatatatgatactgaaaatgatttgtgctctgttagcaatgatcctcgaagcctttggggtttatggagaagggaagttcgcatggaattatggatatccatatctggctgtagtgctcaatttcagtcaaacatgggcattgtattgccttgtacagttctataatgtcatcaaagataagctagcacccataaaaccactggccaagtttctaacatttaagtctattgtattcctcacctggtggcaaggtattattgttgcgttcctcttctctatgggactcgtcaaagggtctttggctaaggaactgaaaacgcgaatacaagactacatcatctgtatcgaaatgggtattgctgctgttgtccatctctatgtgtttccagcagcgccttacaagcgtggagaaagatgtgttcgtaatgtagcagtcatgtcagattatgcctctatagatgtaccacctgatccagaagaggttaaagatagtgaacgaacaactagaacgcggtatggtagacatgacgatagagagaaacgcttgaatttcccacaaagtgtccgtgatgttgtgcttgggagtggtgaaatcattgtggatgacatgagattcacagtttcacatgtggtggaaccggttgaaagaggaatagcgaaaataaacagaacattccatcagatatctgaaaatgtgaaaagatttgagcagcagaagaaaacaacaaaggatgattcatatgtgataccactgaatcaatgggcgaaagaattctcagatgttcatgaaaacctctatgatggagggagtgtgagcgacagcggtttgggaagcacaaatcggcatcaccagtctagagtctcgggattgtggactagaatgcgaaggtaagaaaaacaaaaggtggtgcaagtgcaaacgaagctgaaacaattctgaagatgccttttttgtggaagtctcatcttcgtcacatctaacaaagaagttgtagatttatgggatgatgcttactctgctggatttaaacacaggtaacaacagatgatgctactaactagttttcctctacctttacacaaactttattgagaagttagatttgtatctcgtaatgacagtttcttacacaaaaataaaataaaatacaaatttgtcatg

SEQ ID NO: 90859 - protein, 484 aa, Arabidopsis thaliana
  peptide (1)..(484): Ceres Seq. ID no. 12725587
  misc_feature (39)..(331): Pfam Name: Domain of unknown function Pfam Description: Domain of unknown function
  misc_feature (1)..(484): Homolog of NCBI NO: 18411404 NR Description: expressed protein; protein id: At1g77220.1, by cDNA: gi_14334723, supported by cDNA: gi_21280884 [Arabidopsis >gi|14334724|gb|AAK59540.1| unknown protein [Arabidopsis
  misc_feature (1)..(484): Homolog of NCBI NO: 7487004 NR Description: hypothetical protein T14N5.8 - Arabidopsis
  misc_feature (87)..(477): Homolog of NCBI NO: 7485951 NR Description: hypothetical protein F22I13.130 - Arabidopsis >gi|4539344|emb|CAB37492.1| putative protein [Arabidopsis >gi|7270820|emb|CAB80501.1| putative protein [Arabidopsis
  misc_feature (41)..(72): Homolog of NCBI NO: 7485951 NR Description: hypothetical protein F22I13.130 - Arabidopsis >gi|4539344|emb|CAB37492.1| putative protein [Arabidopsis >gi|7270820|emb|CAB80501.1| putative protein [Arabidopsis
  misc_feature (40)..(473): Homolog of NCBI NO: 38345931 NR Description: OSJNBb0078D11.6 [Oryza sativa (japonica
  misc_feature (41)..(304): Homolog of NCBI NO: 18420224 NR Description: putative protein; protein id: At4g38360.1, by cDNA: gi_15028110, supported by cDNA: gi_19310766 [Arabidopsis >gi|15028111|gb|AAK76679.1| unknown protein [Arabidopsis
  misc_feature (77)..(415): Homolog of NCBI NO: 15220013 NR Description: hypothetical protein; protein id: At1g23070.1
  misc_feature (46)..(386): Homolog of NCBI NO: 21704198 NR Description: similar to CG5850 gene product [Mus musculus]
  misc_feature (46)..(386): Homolog of NCBI NO: 26329069 NR Description: unnamed protein product [Mus musculus]
  misc_feature (46)..(374): Homolog of NCBI NO: 8922707 NR Description: hypothetical protein FLJ10846 [Homo sapiens]
MEWRGILCSLLFIVSVGESSSRFGIMWHPNLGVDSGQYLTWPILSASVFVVIAILLPMYLIFEHLASYNQPEEQKFLIGLILMVPVYAVESFLSLVNSEAAFNCEVIRDCYEAFALYCFERYLIACLDGEERTIEFMEQQTVITQSTPLLEGTCSYGVVEHPFPMNCFVKDWSLGPQFYHAVKIGIVQYMILKMICALLAMILEAFGVYGEGKFAWNYGYPYLAVVLNFSQTWALYCLVQFYNVIKDKLAPIKPLAKFLTFKSIVFLTWWQGIIVAFLFSMGLVKGSLAKELKTRIQDYIICIEMGIAAVVHLYVFPAAPYKRGERCVRNVAVMSDYASIDVPPDPEEVKDSERTTRTRYGRHDDREKRLNFPQSVRDVVLGSGEIIVDDMRFTVSHVVEPVERGIAKINRTFHQISENVKRFEQQKKTTKDDSYVIPLNQWAKEFSDVHENLYDGGSVSDSGLGSTNRHHQSRVSGLWTRMRR

SEQ ID NO: 90860 - protein, 459 aa, Arabidopsis thaliana
  peptide (1)..(459): Ceres Seq. ID no. 12725588
  misc_feature (14)..(306): Pfam Name: Domain of unknown function Pfam Description: Domain of unknown function
  misc_feature (1)..(459): Homolog of NCBI NO: 18411404 NR Description: expressed protein; protein id: At1g77220.1, by cDNA: gi_14334723, supported by cDNA: gi_21280884 [Arabidopsis >gi|14334724|gb|AAK59540.1| unknown protein [Arabidopsis
  misc_feature (1)..(459): Homolog of NCBI NO: 7487004 NR Description: hypothetical protein T14N5.8 - Arabidopsis
  misc_feature (62)..(452): Homolog of NCBI NO: 7485951 NR Description: hypothetical protein F22I13.130 - Arabidopsis >gi|4539344|emb|CAB37492.1| putative protein [Arabidopsis >gi|7270820|emb|CAB80501.1| putative protein [Arabidopsis
  misc_feature (16)..(47): Homolog of NCBI NO: 7485951 NR Description: hypothetical protein F22I13.130 - Arabidopsis >gi|4539344|emb|CAB37492.1| putative protein [Arabidopsis >gi|7270820|emb|CAB80501.1| putative protein [Arabidopsis
  misc_feature (15)..(448): Homolog of NCBI NO: 38345931 NR Description: OSJNBb0078D11.6 [Oryza sativa (japonica
  misc_feature (16)..(279): Homolog of NCBI NO: 18420224 NR Description: putative protein; protein id: At4g38360.1, by cDNA: gi_15028110, supported by cDNA: gi_19310766 [Arabidopsis >gi|15028111|gb|AAK76679.1| unknown protein [Arabidopsis
  misc_feature (52)..(390): Homolog of NCBI NO: 15220013 NR Description: hypothetical protein; protein id: At1g23070.1
  misc_feature (21)..(361): Homolog of NCBI NO: 21704198 NR Description: similar to CG5850 gene product [Mus musculus]
  misc_feature (21)..(361): Homolog of NCBI NO: 26329069 NR Description: unnamed protein product [Mus musculus]
  misc_feature (21)..(349): Homolog of NCBI NO: 8922707 NR Description: hypothetical protein FLJ10846 [Homo sapiens]
MWHPNLGVDSGQYLTWPILSASVFVVIAILLPMYLIFEHLASYNQPEEQKFLIGLILMVPVYAVESFLSLVNSEAAFNCEVIRDCYEAFALYCFERYLIACLDGEERTIEFMEQQTVITQSTPLLEGTCSYGVVEHPFPMNCFVKDWSLGPQFYHAVKIGIVQYMILKMICALLAMILEAFGVYGEGKFAWNYGYPYLAVVLNFSQTWALYCLVQFYNVIKDKLAPIKPLAKFLTFKSIVFLTWWQGIIVAFLFSMGLVKGSLAKELKTRIQDYIICIEMGIAAVVHLYVFPAAPYKRGERCVRNVAVMSDYASIDVPPDPEEVKDSERTTRTRYGRHDDREKRLNFPQSVRDVVLGSGEIIVDDMRFTVSHVVEPVERGIAKINRTFHQISENVKRFEQQKKTTKDDSYVIPLNQWAKEFSDVHENLYDGGSVSDSGLGSTNRHHQSRVSGLWTRMRR

SEQ ID NO: 90861 - protein, 427 aa, Arabidopsis thaliana
  peptide (1)..(427): Ceres Seq. ID no. 12725589
  misc_feature (1)..(274): Pfam Name: Domain of unknown function Pfam Description: Domain of unknown function
  misc_feature (1)..(427): Homolog of NCBI NO: 18411404 NR Description: expressed protein; protein id: At1g77220.1, by cDNA: gi_14334723, supported by cDNA: gi_21280884 [Arabidopsis >gi|14334724|gb|AAK59540.1| unknown protein [Arabidopsis
  misc_feature (1)..(427): Homolog of NCBI NO: 7487004 NR Description: hypothetical protein T14N5.8 - Arabidopsis
  misc_feature (30)..(420): Homolog of NCBI NO: 7485951 NR Description: hypothetical protein F22I13.130 - Arabidopsis >gi|4539344|emb|CAB37492.1| putative protein [Arabidopsis >gi|7270820|emb|CAB80501.1| putative protein [Arabidopsis
  misc_feature (1)..(15): Homolog of NCBI NO: 7485951 NR Description: hypothetical protein F22I13.130 - Arabidopsis >gi|4539344|emb|CAB37492.1| putative protein [Arabidopsis >gi|7270820|emb|CAB80501.1| putative protein [Arabidopsis
  misc_feature (1)..(416): Homolog of NCBI NO: 38345931 NR Description: OSJNBb0078D11.6 [Oryza sativa (japonica
  misc_feature (1)..(247): Homolog of NCBI NO: 18420224 NR Description: putative protein; protein id: At4g38360.1, by cDNA: gi_15028110, supported by cDNA: gi_19310766 [Arabidopsis >gi|15028111|gb|AAK76679.1| unknown protein [Arabidopsis
  misc_feature (20)..(358): Homolog of NCBI NO: 15220013 NR Description: hypothetical protein; protein id: At1g23070.1
  misc_feature (1)..(329): Homolog of NCBI NO: 21704198 NR Description: similar to CG5850 gene product [Mus musculus]
  misc_feature (1)..(329): Homolog of NCBI NO: 26329069 NR Description: unnamed protein product [Mus musculus]
  misc_feature (1)..(317): Homolog of NCBI NO: 8922707 NR Description: hypothetical protein FLJ10846 [Homo sapiens]
MYLIFEHLASYNQPEEQKFLIGLILMVPVYAVESFLSLVNSEAAFNCEVIRDCYEAFALYCFERYLIACLDGEERTIEFMEQQTVITQSTPLLEGTCSYGVVEHPFPMNCFVKDWSLGPQFYHAVKIGIVQYMILKMICALLAMILEAFGVYGEGKFAWNYGYPYLAVVLNFSQTWALYCLVQFYNVIKDKLAPIKPLAKFLTFKSIVFLTWWQGIIVAFLFSMGLVKGSLAKELKTRIQDYIICIEMGIAAVVHLYVFPAAPYKRGERCVRNVAVMSDYASIDVPPDPEEVKDSERTTRTRYGRHDDREKRLNFPQSVRDVVLGSGEIIVDDMRFTVSHVVEPVERGIAKINRTFHQISENVKRFEQQKKTTKDDSYVIPLNQWAKEFSDVHENLYDGGSVSDSGLGSTNRHHQSRVSGLWTRMRR

SEQ ID NO: 90862 - DNA, 2415 bp, Arabidopsis thaliana
  misc_feature (1)..(2415): Ceres Seq. ID no. 12725594
  misc_feature: MA Experiment ID: 20000171 Result: Down-regulated in Transcription
  misc_feature: MA Experiment 20000171 PARAMETER Experiment Name: At_42deg_Heat_P Parameter: Age (day) Value: 14
  misc_feature: MA Experiment 20000171 PARAMETER Experiment Name: At_42deg_Heat_P Parameter: Organism Value: A. thaliana
  misc_feature: MA Experiment 20000171 PARAMETER Experiment Name: At_42deg_Heat_P Parameter: Plant Line Value: WS
  misc_feature: MA Experiment 20000171 PARAMETER Experiment Name: At_42deg_Heat_P Parameter: Temperature (deg C) Value: 42 vs. 22
  misc_feature: MA Experiment 20000171 PARAMETER Experiment Name: At_42deg_Heat_P Parameter: Timepoint (hr) Value: 1
  misc_feature: MA Experiment 20000171 PARAMETER Experiment Name: At_42deg_Heat_P Parameter: Tissue Value: Aerial
  misc_feature: MA Experiment ID: 20000173 Result: Down-regulated in Transcription
  misc_feature: MA Experiment 20000173 PARAMETER Experiment Name: At_42deg_Heat_P Parameter: Age (day) Value: 14
  misc_feature: MA Experiment 20000173 PARAMETER Experiment Name: At_42deg_Heat_P Parameter: Organism Value: A. thaliana
  misc_feature: MA Experiment 20000173 PARAMETER Experiment Name: At_42deg_Heat_P Parameter: Plant Line Value: WS
  misc_feature: MA Experiment 20000173 PARAMETER Experiment Name: At_42deg_Heat_P Parameter: Temperature (deg C) Value: 42 vs. 22
  misc_feature: MA Experiment 20000173 PARAMETER Experiment Name: At_42deg_Heat_P Parameter: Timepoint (hr) Value: 6
  misc_feature: MA Experiment 20000173 PARAMETER Experiment Name: At_42deg_Heat_P Parameter: Tissue Value: Aerial
  misc_feature: MA Experiment ID: 20000180 Result: Up-regulated in Transcription
  misc_feature: MA Experiment 20000180 PARAMETER Experiment Name: At_Germinating_Seeds_P Parameter: Age (hr) Value: 24 vs. 0
  misc_feature: MA Experiment 20000180 PARAMETER Experiment Name: At_Germinating_Seeds_P Parameter: Tissue Value: Germinating Seeds
  misc_feature: MA Experiment ID: 20000185 Result: Up-regulated in Transcription
  misc_feature: MA Experiment 20000185 PARAMETER Experiment Name: At_Roots__P Parameter: Age (day) Value: 7 vs. 21
  misc_feature: MA Experiment 20000185 PARAMETER Experiment Name: At_Roots__P Parameter: Organism Value: A. thaliana
  misc_feature: MA Experiment 20000185 PARAMETER Experiment Name: At_Roots__P Parameter: Tissue Value: Roots vs. Whole Plant
  misc_feature: MA Experiment ID: 20000227 Result: Up-regulated in Transcription
  misc_feature: MA Experiment 20000227 PARAMETER Experiment Name: At_Root-Tips-vs-Tops_P Parameter: Tissue Value: Root Tips vs. Root Tops
  misc_feature: MA Experiment ID: 20000234 Result: Up-regulated in Transcription
  misc_feature: MA Experiment 20000234 PARAMETER Experiment Name: At_Siliques_P Parameter: Age (day) Value: 21
  misc_feature: MA Experiment 20000234 PARAMETER Experiment Name: At_Siliques_P Parameter: Organism Value: A. thaliana
  misc_feature: MA Experiment 20000234 PARAMETER Experiment Name: At_Siliques_P Parameter: Plant Line Value: WS
  misc_feature: MA Experiment 20000234 PARAMETER Experiment Name: At_Siliques_P Parameter: Tissue Value: Less Than 5mm Siliques vs. Whole Plant
  misc_feature: MA Experiment ID: 20000235 Result: Up-regulated in Transcription
  misc_feature: MA Experiment 20000235 PARAMETER Experiment Name: At_Siliques_P Parameter: Age (day) Value: 21
  misc_feature: MA Experiment 20000235 PARAMETER Experiment Name: At_Siliques_P Parameter: Organism Value: A. thaliana
  misc_feature: MA Experiment 20000235 PARAMETER Experiment Name: At_Siliques_P Parameter: Plant Line Value: WS
  misc_feature: MA Experiment 20000235 PARAMETER Experiment Name: At_Siliques_P Parameter: Tissue Value: 5-10mm Siliques vs. Whole Plant
  misc_feature: MA Experiment ID: 20000265 Result: Up-regulated in Transcription
  misc_feature: MA Experiment 20000265 PARAMETER Experiment Name: At_Open_Flower_P Parameter: Age (day) Value: 21
  misc_feature: MA Experiment 20000265 PARAMETER Experiment Name: At_Open_Flower_P Parameter: Plant Line Value: WS
  misc_feature: MA Experiment 20000265 PARAMETER Experiment Name: At_Open_Flower_P Parameter: Tissue Value: Closed Flower vs. Whole Plant
  misc_feature: MA Experiment ID: 20000286 Result: Up-regulated in Transcription
  misc_feature: MA Experiment 20000286 PARAMETER Experiment Name: At_Open_Flower_P Parameter: Age (day) Value: 21
  misc_feature: MA Experiment 20000286 PARAMETER Experiment Name: At_Open_Flower_P Parameter: Plant Line Value: WS
  misc_feature: MA Experiment 20000286 PARAMETER Experiment Name: At_Open_Flower_P Parameter: Tissue Value: Half Open vs. Whole Plant
  misc_feature: MA Experiment ID: 20000439 Result: Up-regulated in Transcription
  misc_feature: MA Experiment 20000439 PARAMETER Experiment Name: At_Roots__P Parameter: Age (day) Value: 14 vs. 21
  misc_feature: MA Experiment 20000439 PARAMETER Experiment Name: At_Roots__P Parameter: Organism Value: A. thaliana
  misc_feature: MA Experiment 20000439 PARAMETER Experiment Name: At_Roots__P Parameter: Tissue Value: Roots vs. Whole Plant
  misc_feature: MA Experiment ID: 20000794 Result: Up-regulated in Transcription
  misc_feature: MA Experiment 20000794 PARAMETER Experiment Name: At_Petals_P Parameter: Age (day) Value: 23-25 days
  misc_feature: MA Experiment 20000794 PARAMETER Experiment Name: At_Petals_P Parameter: Plant Line Value: WS
  misc_feature: MA Experiment 20000794 PARAMETER Experiment Name: At_Petals_P Parameter: Tissue Value: Petals vs. Whole plant
  misc_feature: MA Experiment ID: 20001757 Result: Down-regulated in Transcription
  misc_feature: MA Experiment 20001757 PARAMETER Experiment Name: At_50mM_NH4NO3_L-to-H_P Parameter: Timepoint (hr) Value: 6
  misc_feature: MA Experiment 20001757 PARAMETER Experiment Name: At_50mM_NH4NO3_L-to-H_P Parameter: Tissue Value: Leaf
  misc_feature: MA Experiment 20001757 PARAMETER Experiment Name: At_50mM_NH4NO3_L-to-H_P Parameter: Treatment Value: 50mM NH4NO3 vs 100mM Mannitol
tttcattgtcttcatgcgactcgtcgagtttcgtcccttcactctcttcacatcaaattccgcaccaccacatccacgtgtctcaacctccactctcctacgtctctccaccgtcgccggcgtctgcagcgtctgcttcatcaattcctcgccgtctctctgaaagaaaaaaaggaaccacctttctctctctgttttgctcgatctgttgtaatttactctgtagcgatcatcagatcgccggcgttttaaaccgccatgaaactctccgacgttggattagacgttgtcaaaactccgagattggttaaattgattgcgtttgcgtttctctcaatctcaacaatttttctcttcaatcacttctcagattccttctcttatccatctcttccttttcccatctcctcttcttcaaacgtcaccgaagctattcaaaccaacataacatccgtcgcggcggtggcaccatctcctccaccgcgtcctcgtctcaaaatatcacctcctccgcttccaccgacagtggtgagaacaggtatcatcaacgagaatggtgccatgtctgattccttcgaaatcggcggattcgatccagattccatcgacgagcttaaatcagccaccggaaattcgtcggttgaggaaaaagaatcgccggaagtcggttttcagattgagaaactcaaattgtgtgacaagacgaagatagattacattccttgcttagacaacgaagaagagataaagagattgaacaatacagatcgaggagaaaattacgagagacattgtcctaaacagagcttagattgcttgattccacctccagatggttataagaaaccaatccaatggccacagagcagagacaagatatggttcaataatgtgcctcatacacgtttagtggaagataaaggaggtcaaaattggattagaagagagaaagataagtttgttttccctggaggtggaactcaattcatccatggagctgatcagtacttagaccagatctcccagatgattcctgatattacatttggatcacgcacccgtgttgctttggacattggctgtggtgtggcgagctttggtgcgtttttgatgcagcgtaacacgacaaccttgtctgtagcaccaaaagatgttcatgagaatcagatacagtttgcattggagcgtggtgttcctgcgatggtggctgtctttgccacacggaggttgttgtatccaagccagtcttttgagatgattcattgttccagatgcagaattaattggacacgcgatgatgggatacttcttcttgaagttaatagaatgcttagagcaggaggctactttgtttgggctgcacaacccgtttacaaacatgaggataacttgcaagagcagtggaaagaaatgttagaccttacgaatcgaatctgttgggagcttatcaagaaagagggatatattgctgtgtggaggaagcctctaaacaacagctgctatgtcagtcgcgaagctggaacaaaacctcctttgtgcagacctgatgatgatcctgatgatgtttggtatgtagatatgaaaccgtgcatcacccgattacctgataatggctatggggctaatgtctccacatggcctgcacgtcttcatgatccgccagagaggctacaaagcattcaaatggatgcgtacatatcccgaaaggaaattatgaaggcagagtctagattttggttagaagtagtagagagttatgtgcgggttttccgctggaaggagttcaaactgaggaatgttctggacatgagagctggttttggagggtttgcagcagcattaaacgatctggggcttgactgttgggttatgaacattgttcccgttagcggattcaacaccttgccagttatttatgaccgtggactacaaggggctatgcacgactggtgtgagccatttgacacctacccaagaacctatgatctgatacatgctgcatttctcttctctgttgagaaaaagaggtgcaacataacaaacattatgctggagatggaccggatgttgagaccaggaggacatgtttacataagggattcactgtctttgatggaccaacttcagcaagtggctaaagccatcggttggactgctggtgttcatgataccggggaaggaccccacgcaagcgttaggattctcatctgcgataaacggatatgaggaaaagaaaaagaaaagatacgaaatcgaatgtgatgataagtctgctcaaagcgacagttcttcttagtgataaattgataattgtattattgtttatttgtttgttgatttgattgttgaagaatgaagagtgttaatacacttgagctactttaacacatgagtaacaaaaagattcattttctc

SEQ ID NO: 90863 - protein, 655 aa, Arabidopsis thaliana
  peptide (1)..(655): Ceres Seq. ID no. 12725595
  misc_feature (152)..(647): Pfam Name: Putative methyltransferase Pfam Description: Putative methyltransferase
  misc_feature (1)..(655): Homolog of NCBI NO: 15239326 NR Description: ankyrin-like protein; protein id: At5g06050.1
  misc_feature (64)..(655): Homolog of NCBI NO: 18405149 NR Description: expressed protein; protein id: At2g39750.1, by cDNA: gi_15450748 [Arabidopsis thaliana]
  misc_feature (1)..(653): Homolog of NCBI NO: 34908262 NR Description: ankyrin-like protein [Oryza sativa (japonica
  misc_feature (88)..(631): Homolog of NCBI NO: 20161455 NR Description: ankyrin-like protein [Oryza sativa (japonica
  misc_feature (83)..(593): Homolog of NCBI NO: 38567836 NR Description: OSJNBb0020J19.14 [Oryza sativa (japonica
  misc_feature (591)..(631): Homolog of NCBI NO: 38567836 NR Description: OSJNBb0020J19.14 [Oryza sativa (japonica
  misc_feature (97)..(638): Homolog of NCBI NO: 15230391 NR Description: putative protein; protein id: At3g51070.1
  misc_feature (121)..(631): Homolog of NCBI NO: 30697941 NR Description: dehydration-induced protein-related [Arabidopsis >gi|21928175|gb|AAM78114.1| AT5g64030/MBM17_13 [Arabidopsis >gi|27764914|gb|AAO23578.1| At5g64030/MBM17_13 [Arabidopsis
  misc_feature (139)..(633): Homolog of NCBI NO: 37535372 NR Description: hypothetical protein [Oryza sativa (japonica group)] >gi|13129503|gb|AAK13157.1| hypothetical protein [Oryza
  misc_feature (104)..(641): Homolog of NCBI NO: 25403070 NR Description: unknown protein, 55790-52851 [imported] -
MKLSDVGLDVVKTPRLVKLIAFAFLSISTIFLFNHFSDSFSYPSLPFPISSSSNVTEAIQTNITSVAAVAPSPPPRPRLKISPPPLPPTVVRTGIINENGAMSDSFEIGGFDPDSIDELKSATGNSSVEEKESPEVGFQIEKLKLCDKTKIDYIPCLDNEEEIKRLNNTDRGENYERHCPKQSLDCLIPPPDGYKKPIQWPQSRDKIWFNNVPHTRLVEDKGGQNWIRREKDKFVFPGGGTQFIHGADQYLDQISQMIPDITFGSRTRVALDIGCGVASFGAFLMQRNTTTLSVAPKDVHENQIQFALERGVPAMVAVFATRRLLYPSQSFEMIHCSRCRINWTRDDGILLLEVNRMLRAGGYFVWAAQPVYKHEDNLQEQWKEMLDLTNRICWELIKKEGYIAVWRKPLNNSCYVSREAGTKPPLCRPDDDPDDVWYVDMKPCITRLPDNGYGANVSTWPARLHDPPERLQSIQMDAYISRKEIMKAESRFWLEVVESYVRVFRWKEFKLRNVLDMRAGFGGFAAALNDLGLDCWVMNIVPVSGFNTLPVIYDRGLQGAMHDWCEPFDTYPRTYDLIHAAFLFSVEKKRCNITNIMLEMDRMLRPGGHVYIRDSLSLMDQLQQVAKAIGWTAGVHDTGEGPHASVRILICDKRI

SEQ ID NO: 90864 - protein, 554 aa, Arabidopsis thaliana
  peptide (1)..(554): Ceres Seq. ID no. 12725596
  misc_feature (51)..(546): Pfam Name: Putative methyltransferase Pfam Description: Putative methyltransferase
  misc_feature (1)..(554): Homolog of NCBI NO: 15239326 NR Description: ankyrin-like protein; protein id: At5g06050.1
  misc_feature (1)..(554): Homolog of NCBI NO: 18405149 NR Description: expressed protein; protein id: At2g39750.1, by cDNA: gi_15450748 [Arabidopsis thaliana]
  misc_feature (1)..(552): Homolog of NCBI NO: 34908262 NR Description: ankyrin-like protein [Oryza sativa (japonica
  misc_feature (1)..(530): Homolog of NCBI NO: 20161455 NR Description: ankyrin-like protein [Oryza sativa (japonica
  misc_feature (1)..(492): Homolog of NCBI NO: 38567836 NR Description: OSJNBb0020J19.14 [Oryza sativa (japonica
  misc_feature (490)..(530): Homolog of NCBI NO: 38567836 NR Description: OSJNBb0020J19.14 [Oryza sativa (japonica
  misc_feature (1)..(537): Homolog of NCBI NO: 15230391 NR Description: putative protein; protein id: At3g51070.1
  misc_feature (20)..(530): Homolog of NCBI NO: 30697941 NR Description: dehydration-induced protein-related [Arabidopsis >gi|21928175|gb|AAM78114.1| AT5g64030/MBM17_13 [Arabidopsis >gi|27764914|gb|AAO23578.1| At5g64030/MBM17_13 [Arabidopsis
  misc_feature (38)..(532): Homolog of NCBI NO: 37535372 NR Description: hypothetical protein [Oryza sativa (japonica group)] >gi|13129503|gb|AAK13157.1| hypothetical protein [Oryza
  misc_feature (3)..(540): Homolog of NCBI NO: 25403070 NR Description: unknown protein, 55790-52851 [imported] -
MSDSFEIGGFDPDSIDELKSATGNSSVEEKESPEVGFQIEKLKLCDKTKIDYIPCLDNEEEIKRLNNTDRGENYERHCPKQSLDCLIPPPDGYKKPIQWPQSRDKIWFNNVPHTRLVEDKGGQNWIRREKDKFVFPGGGTQFIHGADQYLDQISQMIPDITFGSRTRVALDIGCGVASFGAFLMQRNTTTLSVAPKDVHENQIQFALERGVPAMVAVFATRRLLYPSQSFEMIHCSRCRINWTRDDGILLLEVNRMLRAGGYFVWAAQPVYKHEDNLQEQWKEMLDLTNRICWELIKKEGYIAVWRKPLNNSCYVSREAGTKPPLCRPDDDPDDVWYVDMKPCITRLPDNGYGANVSTWPARLHDPPERLQSIQMDAYISRKEIMKAESRFWLEVVESYVRVFRWKEFKLRNVLDMRAGFGGFAAALNDLGLDCWVMNIVPVSGFNTLPVIYDRGLQGAMHDWCEPFDTYPRTYDLIHAAFLFSVEKKRCNITNIMLEMDRMLRPGGHVYIRDSLSLMDQLQQVAKAIGWTAGVHDTGEGPHASVRILICDKRI

SEQ ID NO: 90865 - protein, 399 aa, Arabidopsis thaliana
  peptide (1)..(399): Ceres Seq. ID no. 12725597
  misc_feature (1)..(391): Pfam Name: Putative methyltransferase Pfam Description: Putative methyltransferase
  misc_feature (1)..(399): Homolog of NCBI NO: 15239326 NR Description: ankyrin-like protein; protein id: At5g06050.1
  misc_feature (1)..(399): Homolog of NCBI NO: 18405149 NR Description: expressed protein; protein id: At2g39750.1, by cDNA: gi_15450748 [Arabidopsis thaliana]
  misc_feature (1)..(397): Homolog of NCBI NO: 34908262 NR Description: ankyrin-like protein [Oryza sativa (japonica
  misc_feature (1)..(375): Homolog of NCBI NO: 20161455 NR Description: ankyrin-like protein [Oryza sativa (japonica
  misc_feature (1)..(337): Homolog of NCBI NO: 38567836 NR Description: OSJNBb0020J19.14 [Oryza sativa (japonica
  misc_feature (335)..(375): Homolog of NCBI NO: 38567836 NR Description: OSJNBb0020J19.14 [Oryza sativa (japonica
  misc_feature (1)..(382): Homolog of NCBI NO: 15230391 NR Description: putative protein; protein id: At3g51070.1
  misc_feature (1)..(375): Homolog of NCBI NO: 30697941 NR Description: dehydration-induced protein-related [Arabidopsis >gi|21928175|gb|AAM78114.1| AT5g64030/MBM17_13 [Arabidopsis >gi|27764914|gb|AAO23578.1| At5g64030/MBM17_13 [Arabidopsis
  misc_feature (1)..(377): Homolog of NCBI NO: 37535372 NR Description: hypothetical protein [Oryza sativa (japonica group)] >gi|13129503|gb|AAK13157.1| hypothetical protein [Oryza
  misc_feature (1)..(385): Homolog of NCBI NO: 25403070 NR Description: unknown protein, 55790-52851 [imported] -
MIPDITFGSRTRVALDIGCGVASFGAFLMQRNTTTLSVAPKDVHENQIQFALERGVPAMVAVFATRRLLYPSQSFEMIHCSRCRINWTRDDGILLLEVNRMLRAGGYFVWAAQPVYKHEDNLQEQWKEMLDLTNRICWELIKKEGYIAVWRKPLNNSCYVSREAGTKPPLCRPDDDPDDVWYVDMKPCITRLPDNGYGANVSTWPARLHDPPERLQSIQMDAYISRKEIMKAESRFWLEVVESYVRVFRWKEFKLRNVLDMRAGFGGFAAALNDLGLDCWVMNIVPVSGFNTLPVIYDRGLQGAMHDWCEPFDTYPRTYDLIHAAFLFSVEKKRCNITNIMLEMDRMLRPGGHVYIRDSLSLMDQLQQVAKAIGWTAGVHDTGEGPHASVRILICDKRI

SEQ ID NO: 90866 - DNA, 1446 bp, Arabidopsis thaliana
  misc_feature (1)..(1446): Ceres Seq. ID no. 12725610
  misc_feature: MA Experiment ID: 20000180 Result: Down-regulated in Transcription
  misc_feature: MA Experiment 20000180 PARAMETER Experiment Name: At_Germinating_Seeds_P Parameter: Age (hr) Value: 24 vs. 0
  misc_feature: MA Experiment 20000180 PARAMETER Experiment Name: At_Germinating_Seeds_P Parameter: Tissue Value: Germinating Seeds
  misc_feature: MA Experiment ID: 20001451 Result: Up-regulated in Transcription
  misc_feature: MA Experiment 20001451 PARAMETER Experiment Name: At_Far-red-induction_P Parameter: Age (day) Value: 7
  misc_feature: MA Experiment 20001451 PARAMETER Experiment Name: At_Far-red-induction_P Parameter: Light Value: Far-red vs. White
  misc_feature: MA Experiment 20001451 PARAMETER Experiment Name: At_Far-red-induction_P Parameter: Organism Value: A. thaliana
  misc_feature: MA Experiment 20001451 PARAMETER Experiment Name: At_Far-red-induction_P Parameter: Plant Line Value: Columbia
  misc_feature: MA Experiment 20001451 PARAMETER Experiment Name: At_Far-red-induction_P Parameter: Timepoint (hr) Value: 24
  misc_feature: MA Experiment 20001451 PARAMETER Experiment Name: At_Far-red-induction_P Parameter: Tissue Value: Whole Plant
atgacgatcagaattatcaatcgtcaatccagattctgctgtaagagttttctgtctgcgaggctgtatagttcaagcgaacaagtgagagatgttgcggatgtggcgaagaacatatctaaagtattgatgtcttctccgcaattggtgcttgactcggctttagatcaaagtgggttaagggtttcacaagaagttgtagaagatgttttaaatagattcaggaatgctggtttgttgacatacaggttcttccaatggtctgagaagcaacggcattacgagcatagtgttcgtgcgtaccacatgatgattgagtctacggcgaagataaggcagtacaagctcatgtgggatcttatcaatgcaatgaggaagaagaagatgctaaatgtagagactttttgtatcgtgatgaggaagtatgcgagggcgcagaaagtggatgaggcgatttacgcgtttaatgtgatggagaagtatgatttgccgccgaatcttgtggcgttcaacgggttgttgagtgcgttgtgtaaatccaagaatgtgaggaaagcacaggaagttttcgaaaatatgagggatcgctttacgcctgactccaaaacgtatagcatattgcttgagggatgggggaaagaacccaacttgcccaaggcaagagaggtcttccgggaaatgattgatgcgggttgtcatccggatatagtgacgtatagtataatggttgacatactttgtaaagctggaagagttgatgaagctcttggcattgtgaggagcatggatccaagcatttgcaagccgaccacttttatctatagtgtgcttgtacatacttatggaactgagaaccggcttgaagaggcggttgatactttcctcgagatggaaagaagtggaatgaaagccgatgtagcagttttcaattcattgatcggtgcattttgcaaagcaaataggatgaagaatgtgtatagggttttgaaagaaatgaagagtaaaggtgtgacgcctaactccaagtcatgtaacatcattctacgccatctaatagaacgaggggagaaagacgaagcttttgatgtctttaggaagatgattaaagtgtgtgaaccagatgcagacacttacacgatggtgatcaagatgttttgtgaaaagaaagagatggagacagcggataaagtgtggaaatacatgaggaagaaaggggtgttccctagtatgcatacattctcggttcttattaatgggttgtgcgaggagcgtaccactcagaaagcttgtgttttgttagaggagatgatcgagatggggattcgaccatcgggtgtaacgtttggtagattaagacagctgcttatcaaagaagagagagaagatgtgctcaagttccttaatgagaagatgaacgttttggtcaatgagccgttgtgtgattga

SEQ ID NO: 90867 - protein, 481 aa, Arabidopsis thaliana
  peptide (1)..(481): Ceres Seq. ID no. 12725611
  misc_feature (202)..(236): Pfam Name: PPR repeat Pfam Description: PPR repeat
  misc_feature (1)..(481): Homolog of NCBI NO: 15223926 NR Description: hypothetical protein; protein id: At1g77360.1
  misc_feature (31)..(481): Homolog of NCBI NO: 14488357 NR Description: unknown protein [Oryza sativa (japonica
  misc_feature (6)..(474): Homolog of NCBI NO: 15223927 NR Description: hypothetical protein; protein id: At1g71060.1
  misc_feature (31)..(477): Homolog of NCBI NO: 15229604 NR Description: putative protein; protein id: At3g49730.1
  misc_feature (25)..(450): Homolog of NCBI NO: 15228767 NR Description: putative protein; protein id: At3g62470.1
  misc_feature (25)..(450): Homolog of NCBI NO: 15228788 NR Description: putative protein; protein id: At3g62540.1
  misc_feature (33)..(481): Homolog of NCBI NO: 15239161 NR Description: putative protein; protein id: At5g65820.1
  misc_feature (25)..(450): Homolog of NCBI NO: 15241508 NR Description: putative protein; protein id: At5g14820.1
  misc_feature (19)..(471): Homolog of NCBI NO: 15219049 NR Description: hypothetical protein; protein id: At1g52640.1
  misc_feature (17)..(465): Homolog of NCBI NO: 21686921 NR Description: putative reverse transcriptase [Oryza sativa
MTIRIINRQSRFCCKSFLSARLYSSSEQVRDVADVAKNISKVLMSSPQLVLDSALDQSGLRVSQEVVEDVLNRFRNAGLLTYRFFQWSEKQRHYEHSVRAYHMMIESTAKIRQYKLMWDLINAMRKKKMLNVETFCIVMRKYARAQKVDEAIYAFNVMEKYDLPPNLVAFNGLLSALCKSKNVRKAQEVFENMRDRFTPDSKTYSILLEGWGKEPNLPKAREVFREMIDAGCHPDIVTYSIMVDILCKAGRVDEALGIVRSMDPSICKPTTFIYSVLVHTYGTENRLEEAVDTFLEMERSGMKADVAVFNSLIGAFCKANRMKNVYRVLKEMKSKGVTPNSKSCNIILRHLIERGEKDEAFDVFRKMIKVCEPDADTYTMVIKMFCEKKEMETADKVWKYMRKKGVFPSMHTFSVLINGLCEERTTQKACVLLEEMIEMGIRPSGVTFGRLRQLLIKEEREDVLKFLNEKMNVLVNEPLCD

SEQ ID NO: 90868 - protein, 438 aa, Arabidopsis thaliana
  peptide (1)..(438): Ceres Seq. ID no. 12725612
  misc_feature (159)..(193): Pfam Name: PPR repeat Pfam Description: PPR repeat
  misc_feature (1)..(438): Homolog of NCBI NO: 15223926 NR Description: hypothetical protein; protein id: At1g77360.1
  misc_feature (1)..(438): Homolog of NCBI NO: 14488357 NR Description: unknown protein [Oryza sativa (japonica
  misc_feature (1)..(431): Homolog of NCBI NO: 15223927 NR Description: hypothetical protein; protein id: At1g71060.1
  misc_feature (1)..(434): Homolog of NCBI NO: 15229604 NR Description: putative protein; protein id: At3g49730.1
  misc_feature (1)..(407): Homolog of NCBI NO: 15228767 NR Description: putative protein; protein id: At3g62470.1
  misc_feature (1)..(407): Homolog of NCBI NO: 15228788 NR Description: putative protein; protein id: At3g62540.1
  misc_feature (1)..(438): Homolog of NCBI NO: 15239161 NR Description: putative protein; protein id: At5g65820.1
  misc_feature (1)..(407): Homolog of NCBI NO: 15241508 NR Description: putative protein; protein id: At5g14820.1
  misc_feature (1)..(428): Homolog of NCBI NO: 15219049 NR Description: hypothetical protein; protein id: At1g52640.1
  misc_feature (1)..(422): Homolog of NCBI NO: 21686921 NR Description: putative reverse transcriptase [Oryza sativa
MSSPQLVLDSALDQSGLRVSQEVVEDVLNRFRNAGLLTYRFFQWSEKQRHYEHSVRAYHMMIESTAKIRQYKLMWDLINAMRKKKMLNVETFCIVMRKYARAQKVDEAIYAFNVMEKYDLPPNLVAFNGLLSALCKSKNVRKAQEVFENMRDRFTPDSKTYSILLEGWGKEPNLPKAREVFREMIDAGCHPDIVTYSIMVDILCKAGRVDEALGIVRSMDPSICKPTTFIYSVLVHTYGTENRLEEAVDTFLEMERSGMKADVAVFNSLIGAFCKANRMKNVYRVLKEMKSKGVTPNSKSCNIILRHLIERGEKDEAFDVFRKMIKVCEPDADTYTMVIKMFCEKKEMETADKVWKYMRKKGVFPSMHTFSVLINGLCEERTTQKACVLLEEMIEMGIRPSGVTFGRLRQLLIKEEREDVLKFLNEKMNVLVNEPLCD

SEQ ID NO: 90869 - protein, 379 aa, Arabidopsis thaliana
  peptide (1)..(379): Ceres Seq. ID no. 12725613
  misc_feature (100)..(134): Pfam Name: PPR repeat Pfam Description: PPR repeat
  misc_feature (1)..(379): Homolog of NCBI NO: 15223926 NR Description: hypothetical protein; protein id: At1g77360.1
  misc_feature (1)..(379): Homolog of NCBI NO: 14488357 NR Description: unknown protein [Oryza sativa (japonica
  misc_feature (1)..(372): Homolog of NCBI NO: 15223927 NR Description: hypothetical protein; protein id: At1g71060.1
  misc_feature (1)..(375): Homolog of NCBI NO: 15229604 NR Description: putative protein; protein id: At3g49730.1
  misc_feature (1)..(348): Homolog of NCBI NO: 15228767 NR Description: putative protein; protein id: At3g62470.1
  misc_feature (1)..(348): Homolog of NCBI NO: 15228788 NR Description: putative protein; protein id: At3g62540.1
  misc_feature (1)..(379): Homolog of NCBI NO: 15239161 NR Description: putative protein; protein id: At5g65820.1
  misc_feature (1)..(348): Homolog of NCBI NO: 15241508 NR Description: putative protein; protein id: At5g14820.1
  misc_feature (1)..(369): Homolog of NCBI NO: 15219049 NR Description: hypothetical protein; protein id: At1g52640.1
  misc_feature (1)..(363): Homolog of NCBI NO: 21686921 NR Description: putative reverse transcriptase [Oryza sativa
MMIESTAKIRQYKLMWDLINAMRKKKMLNVETFCIVMRKYARAQKVDEAIYAFNVMEKYDLPPNLVAFNGLLSALCKSKNVRKAQEVFENMRDRFTPDSKTYSILLEGWGKEPNLPKAREVFREMIDAGCHPDIVTYSIMVDILCKAGRVDEALGIVRSMDPSICKPTTFIYSVLVHTYGTENRLEEAVDTFLEMERSGMKADVAVFNSLIGAFCKANRMKNVYRVLKEMKSKGVTPNSKSCNIILRHLIERGEKDEAFDVFRKMIKVCEPDADTYTMVIKMFCEKKEMETADKVWKYMRKKGVFPSMHTFSVLINGLCEERTTQKACVLLEEMIEMGIRPSGVTFGRLRQLLIKEEREDVLKFLNEKMNVLVNEPLCD

SEQ ID NO: 90870 - DNA, 2343 bp, Arabidopsis thaliana
  misc_feature (1)..(2343): Ceres Seq. ID no. 12725618
  misc_feature: MA Experiment ID: 20000171 Result: Up-regulated in Transcription
  misc_feature: MA Experiment 20000171 PARAMETER Experiment Name: At_42deg_Heat_P Parameter: Age (day) Value: 14
  misc_feature: MA Experiment 20000171 PARAMETER Experiment Name: At_42deg_Heat_P Parameter: Organism Value: A. thaliana
  misc_feature: MA Experiment 20000171 PARAMETER Experiment Name: At_42deg_Heat_P Parameter: Plant Line Value: WS
  misc_feature: MA Experiment 20000171 PARAMETER Experiment Name: At_42deg_Heat_P Parameter: Temperature (deg C) Value: 42 vs. 22
  misc_feature: MA Experiment 20000171 PARAMETER Experiment Name: At_42deg_Heat_P Parameter: Timepoint (hr) Value: 1
  misc_feature: MA Experiment 20000171 PARAMETER Experiment Name: At_42deg_Heat_P Parameter: Tissue Value: Aerial
  misc_feature: MA Experiment ID: 20000173 Result: Up-regulated in Transcription
  misc_feature: MA Experiment 20000173 PARAMETER Experiment Name: At_42deg_Heat_P Parameter: Age (day) Value: 14
  misc_feature: MA Experiment 20000173 PARAMETER Experiment Name: At_42deg_Heat_P Parameter: Organism Value: A. thaliana
  misc_feature: MA Experiment 20000173 PARAMETER Experiment Name: At_42deg_Heat_P Parameter: Plant Line Value: WS
  misc_feature: MA Experiment 20000173 PARAMETER Experiment Name: At_42deg_Heat_P Parameter: Temperature (deg C) Value: 42 vs. 22
  misc_feature: MA Experiment 20000173 PARAMETER Experiment Name: At_42deg_Heat_P Parameter: Timepoint (hr) Value: 6
  misc_feature: MA Experiment 20000173 PARAMETER Experiment Name: At_42deg_Heat_P Parameter: Tissue Value: Aerial
  misc_feature: MA Experiment ID: 20000286 Result: Up-regulated in Transcription
  misc_feature: MA Experiment 20000286 PARAMETER Experiment Name: At_Open_Flower_P Parameter: Age (day) Value: 21
  misc_feature: MA Experiment 20000286 PARAMETER Experiment Name: At_Open_Flower_P Parameter: Plant Line Value: WS
  misc_feature: MA Experiment 20000286 PARAMETER Experiment Name: At_Open_Flower_P Parameter: Tissue Value: Half Open vs. Whole Plant
  misc_feature: MA Experiment ID: 20000709 Result: Up-regulated in Transcription
  misc_feature: MA Experiment 20000709 PARAMETER Experiment Name: At_15mM_NH4NO3_L-to-H_P Parameter: Age (hr) Value: 14
  misc_feature: MA Experiment 20000709 PARAMETER Experiment Name: At_15mM_NH4NO3_L-to-H_P Parameter: Organism Value: A. thaliana
  misc_feature: MA Experiment 20000709 PARAMETER Experiment Name: At_15mM_NH4NO3_L-to-H_P Parameter: Plant Line Value: WS
  misc_feature: MA Experiment 20000709 PARAMETER Experiment Name: At_15mM_NH4NO3_L-to-H_P Parameter: Timepoint (hr) Value: 4
  misc_feature: MA Experiment 20000709 PARAMETER Experiment Name: At_15mM_NH4NO3_L-to-H_P Parameter: Tissue Value: Aerial
  misc_feature: MA Experiment 20000709 PARAMETER Experiment Name: At_15mM_NH4NO3_L-to-H_P Parameter: Treatment Value: 15mM NH4NO3 vs. 30mM Mannitol
atggcggttatagttgccggagacgtcgcaaacgtaacatacgacggtcgctcgctgatcatcgacggcgaacataagatccttttctccggctcaatccattatactcgcagcactcctcagatgtggccgtccttgatagcaaaggcaaaatctggaggaatagatgtagtagacacatatgtgttctggaacgttcacgagccgcaacaaggccagttcgatttcagtggaagccgtgatatcgtgaagtttatcaaggaagtaaaaaatcatggcttatatgtctgtcttcggattggaccttttatccaaggggaatggtcttatgggggtttgcctttctggttgcataatgtccaagggattgtcttcaggacagataatgagccattcaagtatcacatgaagagatatgcgaaaatgattgttaagctgatgaaatcggaaaacttgtatgcttcccaaggaggacctatcatactctcacagattgagaacgagtatgggatggttggtagagcttttcgacaagaagggaaatcatatgtcaaatggacagcaaaattggctgttgagcttgacacaggagtgccatgggttatgtgcaagcaagatgatgcccctgatcctttggttaatgcttgcaatgggaggcaatgtggagaaacattcaaaggacccaattcacccaacaaacctgcaatatggactgagaactggacgagtttgtcagctgaggatatagcgtttcatgttgctcttttcatcgctaagaatggaagctttgtaaactactacatgtatcatggaggaaccaacttcgggagaaatgcttcacagttcgtaatcaccagttattatgatcaggctccacttgatgaatatgggttacttaggcaaccaaaatggggacaccttaaggaattacatgctgcagttaagttgtgtgaagagcctctactttcaggactgcaaactacaatatcattggggaagctacaaactgcttttgtgtttgggaagaaggcgaacctatgcgctgccattctggtgaatcaagacaaatgcgagtctactgtacagtttcgtaattcttcatatcgtttgtctccaaaatctgtaagtgtcctgccagactgcaagaatgtagccttcaacactgccaaggtcaatgcacaatacaacacgagaacaaggaaagcaagacaaaatttgtcgtctcctcaaatgtgggaggaatttacagaaacagtcccaagtttcagtgaaacgtcaataagatcagaatccttgcttgagcacatgaataccacacaggatacttccgactatctgtggcaaacaactaggtttcagcaatctgaaggagctccatcagttcttaaagtcaaccatctcggacatgctctacacgcctttgttaatgggagattcataggttctatgcatggaactttcaaagcgcacagatttttgctggagaaaaatatgtcattgaataatggcacaaataacttggcattactcagcgtaatggtaggattaccgaattcaggagcacatctagaaaggagagtcgttggatcacggagcgtaaagatttggaatggaagatatcaactgtacttcaacaactatagttggggatatcaggttggcctgaaaggggagaaattccatgtttacactgaagatgggtccgcaaaagttcagtggaagcagtacagagactccaaaagtcagcctctaacttggtacaaggcctcatttgacacaccagagggggaagatccggtggccttgaacttaggatcaatgggaaaaggagaagcttgggtgaatggccagagtatagctatgttctcctactttaggtaccatataccgagatcttttcttaaaccaaacagtaacttactagtcattttggaagaagaaagagaagggaatcctcttggtataactatagacacagtgtcggtcactgaagtctgtggtcatgtctccaatacaaatcctcatcctgtcatatctccaagaaagaaaggcctcaaccgaaaaaatctaacataccggtatgataggaagcctaaggttcagctccagtgtcctactggcaggaaaatttcaaagatattgtttgcaagctttggcactccaaatggaagttgcgggagctattctattggaagctgtcactcacccaactctttagctgttgtacagaaggcttgtctgaaaaaaagtaggtgttctgtacctgtatggagcaaaacatttggtggtgattcatgtccacacactgttaaatctctgcttgttcgtgcacaatgctcatga

SEQ ID NO: 90871 - protein, 780 aa, Arabidopsis thaliana
  peptide (1)..(780): Ceres Seq. ID no. 12725619
  misc_feature (702)..(779): Pfam Name: Galactose binding lectin domain Pfam Description: Galactose binding lectin domain
  misc_feature (12)..(636): Homolog of NCBI NO: 30697899 NR Description: glycosyl hydrolase family 35 (beta-galactosidase)
  misc_feature (12)..(636): Homolog of NCBI NO: 6686884 NR Description: putative beta-galactosidase [Arabidopsis thaliana]
  misc_feature (2)..(622): Homolog of NCBI NO: 34913072 NR Description: putative beta-galactosidase [Oryza sativa
  misc_feature (627)..(779): Homolog of NCBI NO: 34913072 NR Description: putative beta-galactosidase [Oryza sativa
  misc_feature (10)..(622): Homolog of NCBI NO: 1168654 NR Description: Beta-galactosidase precursor (Lactase)
  misc_feature (627)..(779): Homolog of NCBI NO: 1168654 NR Description: Beta-galactosidase precursor (Lactase)
  misc_feature (11)..(394): Homolog of NCBI NO: 7939621 NR Description: beta-galactosidase [Lycopersicon esculentum]
  misc_feature (381)..(622): Homolog of NCBI NO: 7939621 NR Description: beta-galactosidase [Lycopersicon esculentum]
  misc_feature (627)..(780): Homolog of NCBI NO: 7939621 NR Description: beta-galactosidase [Lycopersicon esculentum]
  misc_feature (12)..(622): Homolog of NCBI NO: 7488063 NR Description: probable beta-galactosidase (EC 3.2.1.23)
MAVIVAGDVANVTYDGRSLIIDGEHKILFSGSIHYTRSTPQMWPSLIAKAKSGGIDVVDTYVFWNVHEPQQGQFDFSGSRDIVKFIKEVKNHGLYVCLRIGPFIQGEWSYGGLPFWLHNVQGIVFRTDNEPFKYHMKRYAKMIVKLMKSENLYASQGGPIILSQIENEYGMVGRAFRQEGKSYVKWTAKLAVELDTGVPWVMCKQDDAPDPLVNACNGRQCGETFKGPNSPNKPAIWTENWTSLSAEDIAFHVALFIAKNGSFVNYYMYHGGTNFGRNASQFVITSYYDQAPLDEYGLLRQPKWGHLKELHAAVKLCEEPLLSGLQTTISLGKLQTAFVFGKKANLCAAILVNQDKCESTVQFRNSSYRLSPKSVSVLPDCKNVAFNTAKVNAQYNTRTRKARQNLSSPQMWEEFTETVPSFSETSIRSESLLEHMNTTQDTSDYLWQTTRFQQSEGAPSVLKVNHLGHALHAFVNGRFIGSMHGTFKAHRFLLEKNMSLNNGTNNLALLSVMVGLPNSGAHLERRVVGSRSVKIWNGRYQLYFNNYSWGYQVGLKGEKFHVYTEDGSAKVQWKQYRDSKSQPLTWYKASFDTPEGEDPVALNLGSMGKGEAWVNGQSIAMFSYFRYHIPRSFLKPNSNLLVILEEEREGNPLGITIDTVSVTEVCGHVSNTNPHPVISPRKKGLNRKNLTYRYDRKPKVQLQCPTGRKISKILFASFGTPNGSCGSYSIGSCHSPNSLAVVQKACLKKSRCSVPVWSKTFGGDSCPHTVKSLLVRAQCS

SEQ ID NO: 90872 - protein, 739 aa, Arabidopsis thaliana
  peptide (1)..(739): Ceres Seq. ID no. 12725620
  misc_feature (661)..(738): Pfam Name: Galactose binding lectin domain Pfam Description: Galactose binding lectin domain
  misc_feature (1)..(595): Homolog of NCBI NO: 30697899 NR Description: glycosyl hydrolase family 35 (beta-galactosidase)
  misc_feature (1)..(595): Homolog of NCBI NO: 6686884 NR Description: putative beta-galactosidase [Arabidopsis thaliana]
  misc_feature (1)..(581): Homolog of NCBI NO: 34913072 NR Description: putative beta-galactosidase [Oryza sativa
  misc_feature (586)..(738): Homolog of NCBI NO: 34913072 NR Description: putative beta-galactosidase [Oryza sativa
  misc_feature (1)..(581): Homolog of NCBI NO: 1168654 NR Description: Beta-galactosidase precursor (Lactase)
  misc_feature (586)..(738): Homolog of NCBI NO: 1168654 NR Description: Beta-galactosidase precursor (Lactase)
  misc_feature (1)..(353): Homolog of NCBI NO: 7939621 NR Description: beta-galactosidase [Lycopersicon esculentum]
  misc_feature (340)..(581): Homolog of NCBI NO: 7939621 NR Description: beta-galactosidase [Lycopersicon esculentum]
  misc_feature (586)..(739): Homolog of NCBI NO: 7939621 NR Description: beta-galactosidase [Lycopersicon esculentum]
  misc_feature (1)..(581): Homolog of NCBI NO: 7488063 NR Description: probable beta-galactosidase (EC 3.2.1.23)
MWPSLIAKAKSGGIDVVDTYVFWNVHEPQQGQFDFSGSRDIVKFIKEVKNHGLYVCLRIGPFIQGEWSYGGLPFWLHNVQGIVFRTDNEPFKYHMKRYAKMIVKLMKSENLYASQGGPIILSQIENEYGMVGRAFRQEGKSYVKWTAKLAVELDTGVPWVMCKQDDAPDPLVNACNGRQCGETFKGPNSPNKPAIWTENWTSLSAEDIAFHVALFIAKNGSFVNYYMYHGGTNFGRNASQFVITSYYDQAPLDEYGLLRQPKWGHLKELHAAVKLCEEPLLSGLQTTISLGKLQTAFVFGKKANLCAAILVNQDKCESTVQFRNSSYRLSPKSVSVLPDCKNVAFNTAKVNAQYNTRTRKARQNLSSPQMWEEFTETVPSFSETSIRSESLLEHMNTTQDTSDYLWQTTRFQQSEGAPSVLKVNHLGHALHAFVNGRFIGSMHGTFKAHRFLLEKNMSLNNGTNNLALLSVMVGLPNSGAHLERRVVGSRSVKIWNGRYQLYFNNYSWGYQVGLKGEKFHVYTEDGSAKVQWKQYRDSKSQPLTWYKASFDTPEGEDPVALNLGSMGKGEAWVNGQSIAMFSYFRYHIPRSFLKPNSNLLVILEEEREGNPLGITIDTVSVTEVCGHVSNTNPHPVISPRKKGLNRKNLTYRYDRKPKVQLQCPTGRKISKILFASFGTPNGSCGSYSIGSCHSPNSLAVVQKACLKKSRCSVPVWSKTFGGDSCPHTVKSLLVRAQCS

SEQ ID NO: 90873 - protein, 645 aa, Arabidopsis thaliana
  peptide (1)..(645): Ceres Seq. ID no. 12725621
  misc_feature (567)..(644): Pfam Name: Galactose binding lectin domain Pfam Description: Galactose binding lectin domain
  misc_feature (1)..(501): Homolog of NCBI NO: 30697899 NR Description: glycosyl hydrolase family 35 (beta-galactosidase)
  misc_feature (1)..(501): Homolog of NCBI NO: 6686884 NR Description: putative beta-galactosidase [Arabidopsis thaliana]
  misc_feature (1)..(487): Homolog of NCBI NO: 34913072 NR Description: putative beta-galactosidase [Oryza sativa
  misc_feature (492)..(644): Homolog of NCBI NO: 34913072 NR Description: putative beta-galactosidase [Oryza sativa
  misc_feature (1)..(487): Homolog of NCBI NO: 1168654 NR Description: Beta-galactosidase precursor (Lactase)
  misc_feature (492)..(644): Homolog of NCBI NO: 1168654 NR Description: Beta-galactosidase precursor (Lactase)
  misc_feature (1)..(259): Homolog of NCBI NO: 7939621 NR Description: beta-galactosidase [Lycopersicon esculentum]
  misc_feature (246)..(487): Homolog of NCBI NO: 7939621 NR Description: beta-galactosidase [Lycopersicon esculentum]
  misc_feature (492)..(645): Homolog of NCBI NO: 7939621 NR Description: beta-galactosidase [Lycopersicon esculentum]
  misc_feature (1)..(487): Homolog of NCBI NO: 7488063 NR Description: probable beta-galactosidase (EC 3.2.1.23)
MKRYAKMIVKLMKSENLYASQGGPIILSQIENEYGMVGRAFRQEGKSYVKWTAKLAVELDTGVPWVMCKQDDAPDPLVNACNGRQCGETFKGPNSPNKPAIWTENWTSLSAEDIAFHVALFIAKNGSFVNYYMYHGGTNFGRNASQFVITSYYDQAPLDEYGLLRQPKWGHLKELHAAVKLCEEPLLSGLQTTISLGKLQTAFVFGKKANLCAAILVNQDKCESTVQFRNSSYRLSPKSVSVLPDCKNVAFNTAKVNAQYNTRTRKARQNLSSPQMWEEFTETVPSFSETSIRSESLLEHMNTTQDTSDYLWQTTRFQQSEGAPSVLKVNHLGHALHAFVNGRFIGSMHGTFKAHRFLLEKNMSLNNGTNNLALLSVMVGLPNSGAHLERRVVGSRSVKIWNGRYQLYFNNYSWGYQVGLKGEKFHVYTEDGSAKVQWKQYRDSKSQPLTWYKASFDTPEGEDPVALNLGSMGKGEAWVNGQSIAMFSYFRYHIPRSFLKPNSNLLVILEEEREGNPLGITIDTVSVTEVCGHVSNTNPHPVISPRKKGLNRKNLTYRYDRKPKVQLQCPTGRKISKILFASFGTPNGSCGSYSIGSCHSPNSLAVVQKACLKKSRCSVPVWSKTFGGDSCPHTVKSLLVRAQCS

SEQ ID NO: 90874 - DNA, 2893 bp, Arabidopsis thaliana
  misc_feature (1)..(2893): Ceres Seq. ID no. 12725622
  misc_feature: MA Experiment ID: 20000173 Result: Down-regulated in Transcription
  misc_feature: MA Experiment 20000173 PARAMETER Experiment Name: At_42deg_Heat_P Parameter: Age (day) Value: 14
  misc_feature: MA Experiment 20000173 PARAMETER Experiment Name: At_42deg_Heat_P Parameter: Organism Value: A. thaliana
  misc_feature: MA Experiment 20000173 PARAMETER Experiment Name: At_42deg_Heat_P Parameter: Plant Line Value: WS
  misc_feature: MA Experiment 20000173 PARAMETER Experiment Name: At_42deg_Heat_P Parameter: Temperature (deg C) Value: 42 vs. 22
  misc_feature: MA Experiment 20000173 PARAMETER Experiment Name: At_42deg_Heat_P Parameter: Timepoint (hr) Value: 6
  misc_feature: MA Experiment 20000173 PARAMETER Experiment Name: At_42deg_Heat_P Parameter: Tissue Value: Aerial
  misc_feature: MA Experiment ID: 20000180 Result: Up-regulated in Transcription
  misc_feature: MA Experiment 20000180 PARAMETER Experiment Name: At_Germinating_Seeds_P Parameter: Age (hr) Value: 24 vs. 0
  misc_feature: MA Experiment 20000180 PARAMETER Experiment Name: At_Germinating_Seeds_P Parameter: Tissue Value: Germinating Seeds
  misc_feature: MA Experiment ID: 20000182 Result: Up-regulated in Transcription
  misc_feature: MA Experiment 20000182 PARAMETER Experiment Name: At_2mM_SA_P Parameter: Age (day) Value: 14
  misc_feature: MA Experiment 20000182 PARAMETER Experiment Name: At_2mM_SA_P Parameter: Organism Value: A. thaliana
  misc_feature: MA Experiment 20000182 PARAMETER Experiment Name: At_2mM_SA_P Parameter: Plant Line Value: WS
  misc_feature: MA Experiment 20000182 PARAMETER Experiment Name: At_2mM_SA_P Parameter: Timepoint (hr) Value: 6
  misc_feature: MA Experiment 20000182 PARAMETER Experiment Name: At_2mM_SA_P Parameter: Tissue Value: Aerial
  misc_feature: MA Experiment 20000182 PARAMETER Experiment Name: At_2mM_SA_P Parameter: Treatment Value: 2mM SA vs. No Treatment
  misc_feature: MA Experiment ID: 20000184 Result: Down-regulated in Transcription
  misc_feature: MA Experiment 20000184 PARAMETER Experiment Name: At_Shoots__P Parameter: Age (day) Value: 7
  misc_feature: MA Experiment 20000184 PARAMETER Experiment Name: At_Shoots__P Parameter: Tissue Value: Shoots vs. Whole Plant
  misc_feature: MA Experiment ID: 20000185 Result: Up-regulated in Transcription
  misc_feature: MA Experiment 20000185 PARAMETER Experiment Name: At_Roots__P Parameter: Age (day) Value: 7 vs. 21
  misc_feature: MA Experiment 20000185 PARAMETER Experiment Name: At_Roots__P Parameter: Organism Value: A. thaliana
  misc_feature: MA Experiment 20000185 PARAMETER Experiment Name: At_Roots__P Parameter: Tissue Value: Roots vs. Whole Plant
  misc_feature: MA Experiment ID: 20000438 Result: Down-regulated in Transcription
  misc_feature: MA Experiment 20000438 PARAMETER Experiment Name: At_Shoots__P Parameter: Age (day) Value: 14
  misc_feature: MA Experiment 20000438 PARAMETER Experiment Name: At_Shoots__P Parameter: Tissue Value: Shoots vs. Whole Plant
atgggttgcggaggatcaaaagtagataatcaaccaatagtgattctctgtagagaacgaaaggagctgcttaaagcggcgtcgtatcatcgttctgctctcgctgtcgctcacctaacttacttccagtctctctccgacgtcggtgaagctattcaacgtttcgttgacgacgaagtcgtagctggtttttcttcttcttcttcgccggattctccagttcttacacttccgtccgacgaagggaaaccgacgaaacacaagaggatttctccttcttcaaccacctcaatttctcattccgtcatcgaagaagaagacactgatgatgattcgcatttgcatctaagctccggatccgaatccgaatcagaagttggatctaaggatcatatccaaattactagcactccagaacaagagcggtcaacggaatcatttccttccggttatcatccaacaaactatgctccaccggtttacccacctggttatccacccggttacccattcagttacccgaccggttattcatcgggtaattatcaaccgggttacccgaattacacaggtgagaatccatacggaaatcgaggaatgtattacatgaagaaatctgcgccacaatcacgaccgttcattttccaaccggagaatcatcgagtggaggagaacgcgcaatggccgtcggattctggatttagaaacacaggagtgcaacggagatcgccgtctccgttacctcctccgtcaccacctacggtttcaacttgggattttttgaatgtgtttgatacttatgattacagcaacgcccgttctcgtgcttcgggatattatccgatgggaatggcgtcaatctcaagcagtcctgattcgaaggaagttagagaaagagaagggattcctgagctagaagaagtaacagagcaagaagttatcaagcaagtgtatagacgtcccaagagaccaggattggagaaggttaaagaacacagagacgagcacaagcacaacgtttttcctgagaggaacattaacaaaagggaagttccaatgccagaacaagtcactgagagctcattggattcagagacaatttcgtctttttcaggaagtgatgtagaatcggagtttcactatgttaatggtggtgaaggaaagagtagcagcatcagttcaatcagtcatggggctgggacaaagagctcgagagaagtagaagaacagtatgggaggaaaaaaggagtgagctttgagttggaggaaacaacgagcacttcgtcttttgatgttgaatcttccaagataagtagcttatccagtttgtcgattcatgccactagggatctcagagaagttgttaaggagatcaagagtgagttcgagattgcttcttcttgtgggaaggaggttgctttgttacttgaagtcggcaagttgccttatcagcataaaaacaatggcgttaaagttatcttatccaggatcatgtatctggtagcaccatccacacggtcatcgcactctcagcccagactatcaatacgtttaacatctagaactcgaaaaatggcgaaatcatacaatggacaagatgttaatggaggcttcaatggaaacctctcatcaaccttagagaaactgtatgcgtgggaaaagaaactgtacaaggaagtcaaggacgaagaaaagcttcgtgctatctatgaagagaagtgcaggagactaaaaaaaatggatagtcatggagcagaatctatcaagatcgatgctactcgggcagccattaggaagcttctgaccaaaatcgatgtttgtataagatcagttgattcgatttccagcagaatccataaacttagagatgaagagttgcagccacagttgatacagttaattcacgggttgataagaatgtggaggtcaatgctgaggtgccaccagaaacagtttcaggcgatcagggagagcaaggttcgatctctaaaggcgaacacaaccttacaaaatgactctggctctacagcaattcttgatcttgagatagagcttagagaatggtgcatcagcttcaacaactgggtcaacacccagaaatcatacgtccagttcctaagcggatggctcacgaaatgccttcactatgaacccgaggcaaccgatgacggaatcgctcctttctctcctagccagatcggtgcaccgcccatctttatcatttgcaaagattggcaagaagcaatgtgtagaatatctggagagaatgtgaccaatgcaatgcaaggttttgcttcaagcctacacgagctatgggagaagcaagaagaagagcaaagggtaaaagcgcaatctgagcagcgagatgcagagtcagagagaagtgtggtttcgaaaggtcggtcagagagcgggatatcagctttggatgatttgaaagtggatttagattcaatgaggaagaggctagtcgaggagagaggtaagggtaaagaaaccattaagcttgtgaacaacgcgtcttcgagcagcttaaaagctggtttagttcccattttcggggcactgagaaaattcacatcagaagttgtgaaagctcatgaaattgttaggcttcaacatcctcagacctcttcttgagtagagagtgtggacttaccacatttttgcaccgttttgaagttttgttacttgcaaattagacataggtctatatagaaggaaattgttgtatagatgagttcatattcaattattggttggttagtttcccttgtaaaccgtttttaaatggtgaagaagaagatatctagtttgccttgtaagccgttacttgctgaattaaaaagaatgtaatatgactgttcctggttgagattaaaaggaaaatagg

SEQ ID NO: 90875 - protein, 879 aa, Arabidopsis thaliana
  peptide (1)..(879): Ceres Seq. ID no. 12725623
  misc_feature (431)..(772): Pfam Name: Protein of unknown function (DUF632) Pfam Description: Protein of unknown function (DUF632)
  misc_feature (244)..(879): Homolog of NCBI NO: 15219083 NR Description: putative bzip-like transcription factor; protein At1g21740.1 [Arabidopsis thaliana] >gi|25518309|pir||A86351
  misc_feature (1)..(233): Homolog of NCBI NO: 15219083 NR Description: putative bzip-like transcription factor; protein At1g21740.1 [Arabidopsis thaliana] >gi|25518309|pir||A86351
  misc_feature (362)..(871): Homolog of NCBI NO: 34905788 NR Description: bzip-like transcription factor-like [Oryza sativa
  misc_feature (16)..(176): Homolog of NCBI NO: 34905788 NR Description: bzip-like transcription factor-like [Oryza sativa
  misc_feature (1)..(322): Homolog of NCBI NO: 15236929 NR Description: putative protein; protein id: At4g35240.1
  misc_feature (541)..(868): Homolog of NCBI NO: 15236929 NR Description: putative protein; protein id: At4g35240.1
  misc_feature (746)..(876): Homolog of NCBI NO: 15219083 NR Description: putative bzip-like transcription factor; protein At1g21740.1 [Arabidopsis thaliana] >gi|25518309|pir||A86351
  misc_feature (318)..(610): Homolog of NCBI NO: 25411780 NR Description: hypothetical protein At2g17100 [imported] -
  misc_feature (637)..(874): Homolog of NCBI NO: 25411780 NR Description: hypothetical protein At2g17100 [imported] -
  misc_feature (1)..(170): Homolog of NCBI NO: 25411780 NR Description: hypothetical protein At2g17100 [imported] -
MGCGGSKVDNQPIVILCRERKELLKAASYHRSALAVAHLTYFQSLSDVGEAIQRFVDDEVVAGFSSSSSPDSPVLTLPSDEGKPTKHKRISPSSTTSISHSVIEEEDTDDDSHLHLSSGSESESEVGSKDHIQITSTPEQERSTESFPSGYHPTNYAPPVYPPGYPPGYPFSYPTGYSSGNYQPGYPNYTGENPYGNRGMYYMKKSAPQSRPFIFQPENHRVEENAQWPSDSGFRNTGVQRRSPSPLPPPSPPTVSTWDFLNVFDTYDYSNARSRASGYYPMGMASISSSPDSKEVREREGIPELEEVTEQEVIKQVYRRPKRPGLEKVKEHRDEHKHNVFPERNINKREVPMPEQVTESSLDSETISSFSGSDVESEFHYVNGGEGKSSSISSISHGAGTKSSREVEEQYGRKKGVSFELEETTSTSSFDVESSKISSLSSLSIHATRDLREVVKEIKSEFEIASSCGKEVALLLEVGKLPYQHKNNGVKVILSRIMYLVAPSTRSSHSQPRLSIRLTSRTRKMAKSYNGQDVNGGFNGNLSSTLEKLYAWEKKLYKEVKDEEKLRAIYEEKCRRLKKMDSHGAESIKIDATRAAIRKLLTKIDVCIRSVDSISSRIHKLRDEELQPQLIQLIHGLIRMWRSMLRCHQKQFQAIRESKVRSLKANTTLQNDSGSTAILDLEIELREWCISFNNWVNTQKSYVQFLSGWLTKCLHYEPEATDDGIAPFSPSQIGAPPIFIICKDWQEAMCRISGENVTNAMQGFASSLHELWEKQEEEQRVKAQSEQRDAESERSVVSKGRSESGISALDDLKVDLDSMRKRLVEERGKGKETIKLVNNASSSSLKAGLVPIFGALRKFTSEVVKAHEIVRLQHPQTSS

SEQ ID NO: 90876 - protein, 680 aa, Arabidopsis thaliana
  peptide (1)..(680): Ceres Seq. ID no. 12725624
  misc_feature (232)..(573): Pfam Name: Protein of unknown function (DUF632) Pfam Description: Protein of unknown function (DUF632)
  misc_feature (45)..(680): Homolog of NCBI NO: 15219083 NR Description: putative bzip-like transcription factor; protein At1g21740.1 [Arabidopsis thaliana] >gi|25518309|pir||A86351
  misc_feature (1)..(34): Homolog of NCBI NO: 15219083 NR Description: putative bzip-like transcription factor; protein At1g21740.1 [Arabidopsis thaliana] >gi|25518309|pir||A86351
  misc_feature (163)..(672): Homolog of NCBI NO: 34905788 NR Description: bzip-like transcription factor-like [Oryza sativa
  misc_feature (1)..(123): Homolog of NCBI NO: 15236929 NR Description: putative protein; protein id: At4g35240.1
  misc_feature (342)..(669): Homolog of NCBI NO: 15236929 NR Description: putative protein; protein id: At4g35240.1
  misc_feature (547)..(677): Homolog of NCBI NO: 15219083 NR Description: putative bzip-like transcription factor; protein At1g21740.1 [Arabidopsis thaliana] >gi|25518309|pir||A86351
  misc_feature (119)..(411): Homolog of NCBI NO: 25411780 NR Description: hypothetical protein At2g17100 [imported] -
  misc_feature (438)..(675): Homolog of NCBI NO: 25411780 NR Description: hypothetical protein At2g17100 [imported] -
  misc_feature (276)..(675): Homolog of NCBI NO: 18398315 NR Description: expressed protein; protein id: At2g17110.1, by cDNA: gi_15724285 [Arabidopsis thaliana] AT4g35240/F23E12_200 [Arabidopsis thaliana]
  misc_feature (364)..(672): Homolog of NCBI NO: 38345928 NR Description: OSJNBb0078D11.3 [Oryza sativa (japonica
MYYMKKSAPQSRPFIFQPENHRVEENAQWPSDSGFRNTGVQRRSPSPLPPPSPPTVSTWDFLNVFDTYDYSNARSRASGYYPMGMASISSSPDSKEVREREGIPELEEVTEQEVIKQVYRRPKRPGLEKVKEHRDEHKHNVFPERNINKREVPMPEQVTESSLDSETISSFSGSDVESEFHYVNGGEGKSSSISSISHGAGTKSSREVEEQYGRKKGVSFELEETTSTSSFDVESSKISSLSSLSIHATRDLREVVKEIKSEFEIASSCGKEVALLLEVGKLPYQHKNNGVKVILSRIMYLVAPSTRSSHSQPRLSIRLTSRTRKMAKSYNGQDVNGGFNGNLSSTLEKLYAWEKKLYKEVKDEEKLRAIYEEKCRRLKKMDSHGAESIKIDATRAAIRKLLTKIDVCIRSVDSISSRIHKLRDEELQPQLIQLIHGLIRMWRSMLRCHQKQFQAIRESKVRSLKANTTLQNDSGSTAILDLEIELREWCISFNNWVNTQKSYVQFLSGWLTKCLHYEPEATDDGIAPFSPSQIGAPPIFIICKDWQEAMCRISGENVTNAMQGFASSLHELWEKQEEEQRVKAQSEQRDAESERSVVSKGRSESGISALDDLKVDLDSMRKRLVEERGKGKETIKLVNNASSSSLKAGLVPIFGALRKFTSEVVKAHEIVRLQHPQTSS

SEQ ID NO: 90877 - protein, 677 aa, Arabidopsis thaliana
  peptide (1)..(677): Ceres Seq. ID no. 12725625
  misc_feature (229)..(570): Pfam Name: Protein of unknown function (DUF632) Pfam Description: Protein of unknown function (DUF632)
  misc_feature (42)..(677): Homolog of NCBI NO: 15219083 NR Description: putative bzip-like transcription factor; protein At1g21740.1 [Arabidopsis thaliana] >gi|25518309|pir||A86351
  misc_feature (1)..(31): Homolog of NCBI NO: 15219083 NR Description: putative bzip-like transcription factor; protein At1g21740.1 [Arabidopsis thaliana] >gi|25518309|pir||A86351
  misc_feature (160)..(669): Homolog of NCBI NO: 34905788 NR Description: bzip-like transcription factor-like [Oryza sativa
  misc_feature (1)..(120): Homolog of NCBI NO: 15236929 NR Description: putative protein; protein id: At4g35240.1
  misc_feature (339)..(666): Homolog of NCBI NO: 15236929 NR Description: putative protein; protein id: At4g35240.1
  misc_feature (544)..(674): Homolog of NCBI NO: 15219083 NR Description: putative bzip-like transcription factor; protein At1g21740.1 [Arabidopsis thaliana] >gi|25518309|pir||A86351
  misc_feature (116)..(408): Homolog of NCBI NO: 25411780 NR Description: hypothetical protein At2g17100 [imported] -
  misc_feature (435)..(672): Homolog of NCBI NO: 25411780 NR Description: hypothetical protein At2g17100 [imported] -
  misc_feature (273)..(672): Homolog of NCBI NO: 18398315 NR Description: expressed protein; protein id: At2g17110.1, by cDNA: gi_15724285 [Arabidopsis thaliana] AT4g35240/F23E12_200 [Arabidopsis thaliana]
  misc_feature (361)..(669): Homolog of NCBI NO: 38345928 NR Description: OSJNBb0078D11.3 [Oryza sativa (japonica
MKKSAPQSRPFIFQPENHRVEENAQWPSDSGFRNTGVQRRSPSPLPPPSPPTVSTWDFLNVFDTYDYSNARSRASGYYPMGMASISSSPDSKEVREREGIPELEEVTEQEVIKQVYRRPKRPGLEKVKEHRDEHKHNVFPERNINKREVPMPEQVTESSLDSETISSFSGSDVESEFHYVNGGEGKSSSISSISHGAGTKSSREVEEQYGRKKGVSFELEETTSTSSFDVESSKISSLSSLSIHATRDLREVVKEIKSEFEIASSCGKEVALLLEVGKLPYQHKNNGVKVILSRIMYLVAPSTRSSHSQPRLSIRLTSRTRKMAKSYNGQDVNGGFNGNLSSTLEKLYAWEKKLYKEVKDEEKLRAIYEEKCRRLKKMDSHGAESIKIDATRAAIRKLLTKIDVCIRSVDSISSRIHKLRDEELQPQLIQLIHGLIRMWRSMLRCHQKQFQAIRESKVRSLKANTTLQNDSGSTAILDLEIELREWCISFNNWVNTQKSYVQFLSGWLTKCLHYEPEATDDGIAPFSPSQIGAPPIFIICKDWQEAMCRISGENVTNAMQGFASSLHELWEKQEEEQRVKAQSEQRDAESERSVVSKGRSESGISALDDLKVDLDSMRKRLVEERGKGKETIKLVNNASSSSLKAGLVPIFGALRKFTSEVVKAHEIVRLQHPQTSS

SEQ ID NO: 90878 - DNA, 1146 bp, Arabidopsis thaliana
  misc_feature (1)..(1146): Ceres Seq. ID no. 12725626
  misc_feature: MA Experiment ID: 108433 Result: Up-regulated in Transcription
  misc_feature: MA Experiment 108433 PARAMETER Experiment Name: At_rhl_Mutant2_cDNA_P Parameter: Age (day) Value: 7
  misc_feature: MA Experiment 108433 PARAMETER Experiment Name: At_rhl_Mutant2_cDNA_P Parameter: Organism Value: A. thaliana
  misc_feature: MA Experiment 108433 PARAMETER Experiment Name: At_rhl_Mutant2_cDNA_P Parameter: Plant Line Value: rhl Mutant vs. wt landsburg
  misc_feature: MA Experiment 108433 PARAMETER Experiment Name: At_rhl_Mutant2_cDNA_P Parameter: Tissue Value: Roots
  misc_feature: MA Experiment ID: 108434 Result: Down-regulated in Transcription
  misc_feature: MA Experiment 108434 PARAMETER Experiment Name: At_Root_Tips_cDNA_P Parameter: Tissue Value: Root Tips
  misc_feature: MA Experiment ID: 108463 Result: Up-regulated in Transcription
  misc_feature: MA Experiment 108463 PARAMETER Experiment Name: At_Germinating_Seeds_cDNA_P Parameter: Age (day) Value: 3 vs. 0
  misc_feature: MA Experiment 108463 PARAMETER Experiment Name: At_Germinating_Seeds_cDNA_P Parameter: Tissue Value: Germinating Seeds
  misc_feature: MA Experiment ID: 108464 Result: Up-regulated in Transcription
  misc_feature: MA Experiment 108464 PARAMETER Experiment Name: At_Germinating_Seeds_cDNA_P Parameter: Age (day) Value: 4 vs. 0
  misc_feature: MA Experiment 108464 PARAMETER Experiment Name: At_Germinating_Seeds_cDNA_P Parameter: Tissue Value: Germinating Seeds
  misc_feature: MA Experiment ID: 108594 Result: Down-regulated in Transcription
  misc_feature: MA Experiment 108594 PARAMETER Experiment Name: At_Ler-rhl_Root_cDNA_P Parameter: Plant Line Value: null
  misc_feature: MA Experiment ID: 108595 Result: Up-regulated in Transcription
  misc_feature: MA Experiment 108595 PARAMETER Experiment Name: At_Ler-pi_Ovule_cDNA_P Parameter: Plant Line Value: null
  misc_feature: MA Experiment ID: 20000069 Result: Up-regulated in Transcription
  misc_feature: MA Experiment 20000069 PARAMETER Experiment Name: At_100uM_ABA_Mutants_cDNA_P Parameter: Plant Line Value: CS23
  misc_feature: MA Experiment 20000069 PARAMETER Experiment Name: At_100uM_ABA_Mutants_cDNA_P Parameter: Timepoint (hr) Value: 6
  misc_feature: MA Experiment 20000069 PARAMETER Experiment Name: At_100uM_ABA_Mutants_cDNA_P Parameter: Tissue Value: Aerial
  misc_feature: MA Experiment 20000069 PARAMETER Experiment Name: At_100uM_ABA_Mutants_cDNA_P Parameter: Treatment Value: 100uM ABA vs. No Treatment
  misc_feature: MA Experiment ID: 20000113 Result: Down-regulated in Transcription
  misc_feature: MA Experiment 20000113 PARAMETER Experiment Name: At_42deg_Heat_cDNA_P Parameter: Temperature (deg C) Value: 42 vs. 22
  misc_feature: MA Experiment 20000113 PARAMETER Experiment Name: At_42deg_Heat_cDNA_P Parameter: Timepoint (hr) Value: 8
  misc_feature: MA Experiment 20000113 PARAMETER Experiment Name: At_42deg_Heat_cDNA_P Parameter: Tissue Value: Aerial
  misc_feature: MA Experiment ID: 20000185 Result: Up-regulated in Transcription
  misc_feature: MA Experiment 20000185 PARAMETER Experiment Name: At_Roots__P Parameter: Age (day) Value: 7 vs. 21
  misc_feature: MA Experiment 20000185 PARAMETER Experiment Name: At_Roots__P Parameter: Organism Value: A. thaliana
  misc_feature: MA Experiment 20000185 PARAMETER Experiment Name: At_Roots__P Parameter: Tissue Value: Roots vs. Whole Plant
  misc_feature: MA Experiment ID: 20000227 Result: Down-regulated in Transcription
  misc_feature: MA Experiment 20000227 PARAMETER Experiment Name: At_Root-Tips-vs-Tops_P Parameter: Tissue Value: Root Tips vs. Root Tops
  misc_feature: MA Experiment ID: 20000436 Result: Down-regulated in Transcription
  misc_feature: MA Experiment 20000436 PARAMETER Experiment Name: At_Drought_P Parameter: Age (day) Value: 7
  misc_feature: MA Experiment 20000436 PARAMETER Experiment Name: At_Drought_P Parameter: Organism Value: A. thaliana
  misc_feature: MA Experiment 20000436 PARAMETER Experiment Name: At_Drought_P Parameter: Plant Line Value: WS
  misc_feature: MA Experiment 20000436 PARAMETER Experiment Name: At_Drought_P Parameter: Timepoint (hr) Value: 12
  misc_feature: MA Experiment 20000436 PARAMETER Experiment Name: At_Drought_P Parameter: Tissue Value: Whole Plant
  misc_feature: MA Experiment 20000436 PARAMETER Experiment Name: At_Drought_P Parameter: Treatment Value: Drought vs. No Drought
  misc_feature: MA Experiment ID: 20000439 Result: Up-regulated in Transcription
  misc_feature: MA Experiment 20000439 PARAMETER Experiment Name: At_Roots__P Parameter: Age (day) Value: 14 vs. 21
  misc_feature: MA Experiment 20000439 PARAMETER Experiment Name: At_Roots__P Parameter: Organism Value: A. thaliana
  misc_feature: MA Experiment 20000439 PARAMETER Experiment Name: At_Roots__P Parameter: Tissue Value: Roots vs. Whole Plant
  misc_feature: MA Experiment ID: 20000451 Result: Down-regulated in Transcription
  misc_feature: MA Experiment 20000451 PARAMETER Experiment Name: At_CS6879_Shoots-Roots_P Parameter: Age (day) Value: 14
  misc_feature: MA Experiment 20000451 PARAMETER Experiment Name: At_CS6879_Shoots-Roots_P Parameter: Organism Value: A. thaliana
  misc_feature: MA Experiment 20000451 PARAMETER Experiment Name: At_CS6879_Shoots-Roots_P Parameter: Plant Line Value: CS6879 vs. WS
  misc_feature: MA Experiment 20000451 PARAMETER Experiment Name: At_CS6879_Shoots-Roots_P Parameter: Tissue Value: Roots
  misc_feature: MA Experiment ID: 20000460 Result: Down-regulated in Transcription
  misc_feature: MA Experiment 20000460 PARAMETER Experiment Name: At_10percent_PEG_P Parameter: Age (day) Value: 12
  misc_feature: MA Experiment 20000460 PARAMETER Experiment Name: At_10percent_PEG_P Parameter: Organism Value: A. thaliana
  misc_feature: MA Experiment 20000460 PARAMETER Experiment Name: At_10percent_PEG_P Parameter: Plant Line Value: WS
  misc_feature: MA Experiment 20000460 PARAMETER Experiment Name: At_10percent_PEG_P Parameter: Timepoint (day) Value: 12
  misc_feature: MA Experiment 20000460 PARAMETER Experiment Name: At_10percent_PEG_P Parameter: Tissue Value: Whole Plant
  misc_feature: MA Experiment 20000460 PARAMETER Experiment Name: At_10percent_PEG_P Parameter: Treatment Value: 10percent PEG vs. No Treatment
  misc_feature: MA Experiment ID: 20000527 Result: Down-regulated in Transcription
  misc_feature: MA Experiment 20000527 PARAMETER Experiment Name: At_10percent_PEG_P Parameter: Age (day) Value: 20
  misc_feature: MA Experiment 20000527 PARAMETER Experiment Name: At_10percent_PEG_P Parameter: Organism Value: A. thaliana
  misc_feature: MA Experiment 20000527 PARAMETER Experiment Name: At_10percent_PEG_P Parameter: Plant Line Value: WS
  misc_feature: MA Experiment 20000527 PARAMETER Experiment Name: At_10percent_PEG_P Parameter: Timepoint (day) Value: 20
  misc_feature: MA Experiment 20000527 PARAMETER Experiment Name: At_10percent_PEG_P Parameter: Tissue Value: Whole Plant
  misc_feature: MA Experiment 20000527 PARAMETER Experiment Name: At_10percent_PEG_P Parameter: Treatment Value: 10percent PEG vs. No Treatment
atgtcaaaccatcttcaagatcccttaaccacttaccctaaaccgggtttaaccaaagaagaacaagaaatcgacgagaaaatggtgagcttgcaagcggagagtatagtcaacgccgtggctttccccatggttctcaaagccgccttagagcttggagtcattgatacgatcgctgctgctagcaacggcacgtggctctcaccgtctgagatagccgttagtctcccaaacaaacccactaacccggaggcgccggtattgctggaccggatgctgcggttacttgtaagccactcgatcttgaagtgttgtatggttgaaagcagagaaaatggtcaaaccggaaagatcgagagagtatatgcagctgaaccgatttgcaagtacttcttgaaagatagtgacggctctggttctctctcgtccttgttattgttgctccatagccaagtcattctcaaaacatggacaaatctcaaggatgtgatactagaaggaaaagatgcattcagctctgcccacgacatgagacttttcgaatatattagttcggatgaccagttctctaagttgtttcaccgcgcaatgtcggaatcttccacaatggtcatgaagaaggttctagaagaatacagaggatttgaagatgttaacactttggtggatgtaggaggaggtatcggcaccatattaggtctcatcacttccaagtatcctcatatcaaaggtgttaatttcgacttagctcaagttttaacccaagctcctttttatccaggagtcaagcatgtctccggagacatgtttattgaagttccaaaaggagatgccatctttatgaaatggatactacatgattggggagacgaggattgtataaagattctgaaaaattgttggaaaagtctaccggaaaaaggtaaagtgatcattgtagagatgattacaccaatggaaccaaagcctaatgacttttcgtgtaacaccgtgttgggcatggacttgttgatgttaacacaatgctctggtggtaaagagcgatctctttcgcagttcgagaatttagcgtttgcgtcaggctttcttctatgtgaaatcatatgtctttcttattcatattctgttatcgaattccacaaataa

SEQ ID NO: 90879 - protein, 381 aa, Arabidopsis thaliana
  peptide (1)..(381): Ceres Seq. ID no. 12725627
  misc_feature (115)..(358): Pfam Name: O-methyltransferase Pfam Description: O-methyltransferase
  misc_feature (1)..(381): Homolog of NCBI NO: 15223977 NR Description: O-methyltransferase, family 2 family; protein id: [Arabidopsis thaliana] >gi|25315960|pir||G96804 hypothetical
  misc_feature (1)..(381): Homolog of NCBI NO: 15223976 NR Description: O-methyltransferase, family 2 family; protein id:
  misc_feature (1)..(381): Homolog of NCBI NO: 27808586 NR Description: At1g77520 [Arabidopsis thaliana]
  misc_feature (44)..(381): Homolog of NCBI NO: 21593350 NR Description: putative caffeic acid 3-O-methyltransferase
  misc_feature (1)..(381): Homolog of NCBI NO: 25315953 NR Description: hypothetical protein F16M19.12 [imported] -
  misc_feature (1)..(381): Homolog of NCBI NO: 21618183 NR Description: caffeic acid 3-O-methyltransferase-like protein
  misc_feature (1)..(381): Homolog of NCBI NO: 15238847 NR Description: O-methyltransferase 1, putative; protein id: supported by cDNA: 99784. [Arabidopsis thaliana]
  misc_feature (185)..(381): Homolog of NCBI NO: 15240132 NR Description: O-methyltransferase, family 2 family; protein id:
  misc_feature (64)..(126): Homolog of NCBI NO: 15240132 NR Description: O-methyltransferase, family 2 family; protein id:
  misc_feature (1)..(44): Homolog of NCBI NO: 15240132 NR Description: O-methyltransferase, family 2 family; protein id:
MSNHLQDPLTTYPKPGLTKEEQEIDEKMVSLQAESIVNAVAFPMVLKAALELGVIDTIAAASNGTWLSPSEIAVSLPNKPTNPEAPVLLDRMLRLLVSHSILKCCMVESRENGQTGKIERVYAAEPICKYFLKDSDGSGSLSSLLLLLHSQVILKTWTNLKDVILEGKDAFSSAHDMRLFEYISSDDQFSKLFHRAMSESSTMVMKKVLEEYRGFEDVNTLVDVGGGIGTILGLITSKYPHIKGVNFDLAQVLTQAPFYPGVKHVSGDMFIEVPKGDAIFMKWILHDWGDEDCIKILKNCWKSLPEKGKVIIVEMITPMEPKPNDFSCNTVLGMDLLMLTQCSGGKERSLSQFENLAFASGFLLCEIICLSYSYSVIEFHK

SEQ ID NO: 90880 - protein, 354 aa, Arabidopsis thaliana
  peptide (1)..(354): Ceres Seq. ID no. 12725628
  misc_feature (88)..(331): Pfam Name: O-methyltransferase Pfam Description: O-methyltransferase
  misc_feature (1)..(354): Homolog of NCBI NO: 15223977 NR Description: O-methyltransferase, family 2 family; protein id: [Arabidopsis thaliana] >gi|25315960|pir||G96804 hypothetical
  misc_feature (1)..(354): Homolog of NCBI NO: 15223976 NR Description: O-methyltransferase, family 2 family; protein id:
  misc_feature (1)..(354): Homolog of NCBI NO: 27808586 NR Description: At1g77520 [Arabidopsis thaliana]
  misc_feature (17)..(354): Homolog of NCBI NO: 21593350 NR Description: putative caffeic acid 3-O-methyltransferase
  misc_feature (1)..(354): Homolog of NCBI NO: 25315953 NR Description: hypothetical protein F16M19.12 [imported] -
  misc_feature (1)..(354): Homolog of NCBI NO: 21618183 NR Description: caffeic acid 3-O-methyltransferase-like protein
  misc_feature (1)..(354): Homolog of NCBI NO: 15238847 NR Description: O-methyltransferase 1, putative; protein id: supported by cDNA: 99784. [Arabidopsis thaliana]
  misc_feature (158)..(354): Homolog of NCBI NO: 15240132 NR Description: O-methyltransferase, family 2 family; protein id:
  misc_feature (37)..(99): Homolog of NCBI NO: 15240132 NR Description: O-methyltransferase, family 2 family; protein id:
  misc_feature (1)..(17): Homolog of NCBI NO: 15240132 NR Description: O-methyltransferase, family 2 family; protein id:
MVSLQAESIVNAVAFPMVLKAALELGVIDTIAAASNGTWLSPSEIAVSLPNKPTNPEAPVLLDRMLRLLVSHSILKCCMVESRENGQTGKIERVYAAEPICKYFLKDSDGSGSLSSLLLLLHSQVILKTWTNLKDVILEGKDAFSSAHDMRLFEYISSDDQFSKLFHRAMSESSTMVMKKVLEEYRGFEDVNTLVDVGGGIGTILGLITSKYPHIKGVNFDLAQVLTQAPFYPGVKHVSGDMFIEVPKGDAIFMKWILHDWGDEDCIKILKNCWKSLPEKGKVIIVEMITPMEPKPNDFSCNTVLGMDLLMLTQCSGGKERSLSQFENLAFASGFLLCEIICLSYSYSVIEFHK

SEQ ID NO: 90881 - protein, 338 aa, Arabidopsis thaliana
  peptide (1)..(338): Ceres Seq. ID no. 12725629
  misc_feature (72)..(315): Pfam Name: O-methyltransferase Pfam Description: O-methyltransferase
  misc_feature (1)..(338): Homolog of NCBI NO: 15223977 NR Description: O-methyltransferase, family 2 family; protein id: [Arabidopsis thaliana] >gi|25315960|pir||G96804 hypothetical
  misc_feature (1)..(338): Homolog of NCBI NO: 15223976 NR Description: O-methyltransferase, family 2 family; protein id:
  misc_feature (1)..(338): Homolog of NCBI NO: 27808586 NR Description: At1g77520 [Arabidopsis thaliana]
  misc_feature (1)..(338): Homolog of NCBI NO: 21593350 NR Description: putative caffeic acid 3-O-methyltransferase
  misc_feature (1)..(338): Homolog of NCBI NO: 25315953 NR Description: hypothetical protein F16M19.12 [imported] -
  misc_feature (1)..(338): Homolog of NCBI NO: 21618183 NR Description: caffeic acid 3-O-methyltransferase-like protein
  misc_feature (1)..(338): Homolog of NCBI NO: 15238847 NR Description: O-methyltransferase 1, putative; protein id: supported by cDNA: 99784. [Arabidopsis thaliana]
  misc_feature (142)..(338): Homolog of NCBI NO: 15240132 NR Description: O-methyltransferase, family 2 family; protein id:
  misc_feature (21)..(83): Homolog of NCBI NO: 15240132 NR Description: O-methyltransferase, family 2 family; protein id:
  misc_feature (1)..(338): Homolog of NCBI NO: 21618219 NR Description: O-methyltransferase, putative [Arabidopsis
MVLKAALELGVIDTIAAASNGTWLSPSEIAVSLPNKPTNPEAPVLLDRMLRLLVSHSILKCCMVESRENGQTGKIERVYAAEPICKYFLKDSDGSGSLSSLLLLLHSQVILKTWTNLKDVILEGKDAFSSAHDMRLFEYISSDDQFSKLFHRAMSESSTMVMKKVLEEYRGFEDVNTLVDVGGGIGTILGLITSKYPHIKGVNFDLAQVLTQAPFYPGVKHVSGDMFIEVPKGDAIFMKWILHDWGDEDCIKILKNCWKSLPEKGKVIIVEMITPMEPKPNDFSCNTVLGMDLLMLTQCSGGKERSLSQFENLAFASGFLLCEIICLSYSYSVIEFHK

SEQ ID NO: 90882 - DNA, 735 bp, Arabidopsis thaliana
  misc_feature (1)..(735): Ceres Seq. ID no. 12725634
  misc_feature: MA Experiment ID: 20000182 Result: Down-regulated in Transcription
  misc_feature: MA Experiment 20000182 PARAMETER Experiment Name: At_2mM_SA_P Parameter: Age (day) Value: 14
  misc_feature: MA Experiment 20000182 PARAMETER Experiment Name: At_2mM_SA_P Parameter: Organism Value: A. thaliana
  misc_feature: MA Experiment 20000182 PARAMETER Experiment Name: At_2mM_SA_P Parameter: Plant Line Value: WS
  misc_feature: MA Experiment 20000182 PARAMETER Experiment Name: At_2mM_SA_P Parameter: Timepoint (hr) Value: 6
  misc_feature: MA Experiment 20000182 PARAMETER Experiment Name: At_2mM_SA_P Parameter: Tissue Value: Aerial
  misc_feature: MA Experiment 20000182 PARAMETER Experiment Name: At_2mM_SA_P Parameter: Treatment Value: 2mM SA vs. No Treatment
  misc_feature: MA Experiment ID: 20000185 Result: Down-regulated in Transcription
  misc_feature: MA Experiment 20000185 PARAMETER Experiment Name: At_Roots__P Parameter: Age (day) Value: 7 vs. 21
  misc_feature: MA Experiment 20000185 PARAMETER Experiment Name: At_Roots__P Parameter: Organism Value: A. thaliana
  misc_feature: MA Experiment 20000185 PARAMETER Experiment Name: At_Roots__P Parameter: Tissue Value: Roots vs. Whole Plant
  misc_feature: MA Experiment ID: 20000265 Result: Down-regulated in Transcription
  misc_feature: MA Experiment 20000265 PARAMETER Experiment Name: At_Open_Flower_P Parameter: Age (day) Value: 21
  misc_feature: MA Experiment 20000265 PARAMETER Experiment Name: At_Open_Flower_P Parameter: Plant Line Value: WS
  misc_feature: MA Experiment 20000265 PARAMETER Experiment Name: At_Open_Flower_P Parameter: Tissue Value: Closed Flower vs. Whole Plant
  misc_feature: MA Experiment ID: 20000268 Result: Down-regulated in Transcription
  misc_feature: MA Experiment 20000268 PARAMETER Experiment Name: At_100mM_NaCl__P Parameter: Age (day) Value: 14
  misc_feature: MA Experiment 20000268 PARAMETER Experiment Name: At_100mM_NaCl__P Parameter: Organism Value: A. thaliana
  misc_feature: MA Experiment 20000268 PARAMETER Experiment Name: At_100mM_NaCl__P Parameter: Plant Line Value: WS
  misc_feature: MA Experiment 20000268 PARAMETER Experiment Name: At_100mM_NaCl__P Parameter: Timepoint (hr) Value: 6
  misc_feature: MA Experiment 20000268 PARAMETER Experiment Name: At_100mM_NaCl__P Parameter: Tissue Value: Whole Plant
  misc_feature: MA Experiment 20000268 PARAMETER Experiment Name: At_100mM_NaCl__P Parameter: Treatment Value: 100mM NaCl vs. No Treatment
  misc_feature: MA Experiment ID: 20000288 Result: Down-regulated in Transcription
  misc_feature: MA Experiment 20000288 PARAMETER Experiment Name: At_Drought_P Parameter: Age (day) Value: 7
  misc_feature: MA Experiment 20000288 PARAMETER Experiment Name: At_Drought_P Parameter: Organism Value: A. thaliana
  misc_feature: MA Experiment 20000288 PARAMETER Experiment Name: At_Drought_P Parameter: Plant Line Value: WS
  misc_feature: MA Experiment 20000288 PARAMETER Experiment Name: At_Drought_P Parameter: Timepoint (hr) Value: 1
  misc_feature: MA Experiment 20000288 PARAMETER Experiment Name: At_Drought_P Parameter: Tissue Value: Whole Plant
  misc_feature: MA Experiment 20000288 PARAMETER Experiment Name: At_Drought_P Parameter: Treatment Value: Drought vs. No Drought
  misc_feature: MA Experiment ID: 20000437 Result: Down-regulated in Transcription
  misc_feature: MA Experiment 20000437 PARAMETER Experiment Name: At_Drought_P Parameter: Age (day) Value: 8
  misc_feature: MA Experiment 20000437 PARAMETER Experiment Name: At_Drought_P Parameter: Organism Value: A. thaliana
  misc_feature: MA Experiment 20000437 PARAMETER Experiment Name: At_Drought_P Parameter: Plant Line Value: WS
  misc_feature: MA Experiment 20000437 PARAMETER Experiment Name: At_Drought_P Parameter: Timepoint (hr) Value: 24
  misc_feature: MA Experiment 20000437 PARAMETER Experiment Name: At_Drought_P Parameter: Tissue Value: Whole Plant
  misc_feature: MA Experiment 20000437 PARAMETER Experiment Name: At_Drought_P Parameter: Treatment Value: Drought vs. No Drought
  misc_feature: MA Experiment ID: 20000453 Result: Up-regulated in Transcription
  misc_feature: MA Experiment 20000453 PARAMETER Experiment Name: At_100uM_ABA_P Parameter: Age (day) Value: 15
  misc_feature: MA Experiment 20000453 PARAMETER Experiment Name: At_100uM_ABA_P Parameter: Organism Value: A. thaliana
  misc_feature: MA Experiment 20000453 PARAMETER Experiment Name: At_100uM_ABA_P Parameter: Plant Line Value: WS
  misc_feature: MA Experiment 20000453 PARAMETER Experiment Name: At_100uM_ABA_P Parameter: Timepoint (hr) Value: 24
  misc_feature: MA Experiment 20000453 PARAMETER Experiment Name: At_100uM_ABA_P Parameter: Tissue Value: Aerial
  misc_feature: MA Experiment 20000453 PARAMETER Experiment Name: At_100uM_ABA_P Parameter: Treatment Value: 100uM ABA vs. No Treatment
  misc_feature: MA Experiment ID: 20000460 Result: Up-regulated in Transcription
  misc_feature: MA Experiment 20000460 PARAMETER Experiment Name: At_10percent_PEG_P Parameter: Age (day) Value: 12
  misc_feature: MA Experiment 20000460 PARAMETER Experiment Name: At_10percent_PEG_P Parameter: Organism Value: A. thaliana
  misc_feature: MA Experiment 20000460 PARAMETER Experiment Name: At_10percent_PEG_P Parameter: Plant Line Value: WS
  misc_feature: MA Experiment 20000460 PARAMETER Experiment Name: At_10percent_PEG_P Parameter: Timepoint (day) Value: 12
  misc_feature: MA Experiment 20000460 PARAMETER Experiment Name: At_10percent_PEG_P Parameter: Tissue Value: Whole Plant
  misc_feature: MA Experiment 20000460 PARAMETER Experiment Name: At_10percent_PEG_P Parameter: Treatment Value: 10percent PEG vs. No Treatment
  misc_feature: MA Experiment ID: 20000495 Result: Down-regulated in Transcription
  misc_feature: MA Experiment 20000495 PARAMETER Experiment Name: At_Guard_Cells_P Parameter: Harvest Date Value: 8/2/2002
  misc_feature: MA Experiment 20000495 PARAMETER Experiment Name: At_Guard_Cells_P Parameter: Organism Value: A. thaliana
  misc_feature: MA Experiment 20000495 PARAMETER Experiment Name: At_Guard_Cells_P Parameter: Tissue Value: Guard Cells vs. Leaves
  misc_feature: MA Experiment ID: 20000496 Result: Down-regulated in Transcription
  misc_feature: MA Experiment 20000496 PARAMETER Experiment Name: At_Guard_Cells_P Parameter: Harvest Date Value: 7/19/2002
  misc_feature: MA Experiment 20000496 PARAMETER Experiment Name: At_Guard_Cells_P Parameter: Organism Value: Canola
  misc_feature: MA Experiment 20000496 PARAMETER Experiment Name: At_Guard_Cells_P Parameter: Tissue Value: Guard Cells vs. Leaves
  misc_feature: MA Experiment ID: 20000527 Result: Up-regulated in Transcription
  misc_feature: MA Experiment 20000527 PARAMETER Experiment Name: At_10percent_PEG_P Parameter: Age (day) Value: 20
  misc_feature: MA Experiment 20000527 PARAMETER Experiment Name: At_10percent_PEG_P Parameter: Organism Value: A. thaliana
  misc_feature: MA Experiment 20000527 PARAMETER Experiment Name: At_10percent_PEG_P Parameter: Plant Line Value: WS
  misc_feature: MA Experiment 20000527 PARAMETER Experiment Name: At_10percent_PEG_P Parameter: Timepoint (day) Value: 20
  misc_feature: MA Experiment 20000527 PARAMETER Experiment Name: At_10percent_PEG_P Parameter: Tissue Value: Whole Plant
  misc_feature: MA Experiment 20000527 PARAMETER Experiment Name: At_10percent_PEG_P Parameter: Treatment Value: 10percent PEG vs. No Treatment
  misc_feature: MA Experiment ID: 20000794 Result: Down-regulated in Transcription
  misc_feature: MA Experiment 20000794 PARAMETER Experiment Name: At_Petals_P Parameter: Age (day) Value: 23-25 days
  misc_feature: MA Experiment 20000794 PARAMETER Experiment Name: At_Petals_P Parameter: Plant Line Value: WS
  misc_feature: MA Experiment 20000794 PARAMETER Experiment Name: At_Petals_P Parameter: Tissue Value: Petals vs. Whole plant
  misc_feature: MA Experiment ID: 20001450 Result: Up-regulated in Transcription
  misc_feature: MA Experiment 20001450 PARAMETER Experiment Name: At_Far-red-induction_P Parameter: Age (day) Value: 7
  misc_feature: MA Experiment 20001450 PARAMETER Experiment Name: At_Far-red-induction_P Parameter: Light Value: Far-red vs. White
  misc_feature: MA Experiment 20001450 PARAMETER Experiment Name: At_Far-red-induction_P Parameter: Organism Value: A. thaliana
  misc_feature: MA Experiment 20001450 PARAMETER Experiment Name: At_Far-red-induction_P Parameter: Plant Line Value: Columbia
  misc_feature: MA Experiment 20001450 PARAMETER Experiment Name: At_Far-red-induction_P Parameter: Timepoint (hr) Value: 8
  misc_feature: MA Experiment 20001450 PARAMETER Experiment Name: At_Far-red-induction_P Parameter: Tissue Value: Whole Plant
  misc_feature: MA Experiment ID: 20001557 Result: Up-regulated in Transcription
  misc_feature: MA Experiment 20001557 PARAMETER Experiment Name: At_Drought_Soil_Dry_P Parameter: Age (day) Value: 27
  misc_feature: MA Experiment 20001557 PARAMETER Experiment Name: At_Drought_Soil_Dry_P Parameter: Organism Value: A. thaliana
  misc_feature: MA Experiment 20001557 PARAMETER Experiment Name: At_Drought_Soil_Dry_P Parameter: Plant Line Value: WS
  misc_feature: MA Experiment 20001557 PARAMETER Experiment Name: At_Drought_Soil_Dry_P Parameter: Post Timepoint (hr) Value: 3
  misc_feature: MA Experiment 20001557 PARAMETER Experiment Name: At_Drought_Soil_Dry_P Parameter: Post-Treatment Value: Re-Water vs. No Drought
  misc_feature: MA Experiment 20001557 PARAMETER Experiment Name: At_Drought_Soil_Dry_P Parameter: Timepoint (day) Value: 13
  misc_feature: MA Experiment 20001557 PARAMETER Experiment Name: At_Drought_Soil_Dry_P Parameter: Treatment Value: Drought vs. No Drought
  misc_feature: MA Experiment ID: 20001558 Result: Up-regulated in Transcription
  misc_feature: MA Experiment 20001558 PARAMETER Experiment Name: At_Drought_Soil_Dry_P Parameter: Age (day) Value: 27
  misc_feature: MA Experiment 20001558 PARAMETER Experiment Name: At_Drought_Soil_Dry_P Parameter: Organism Value: A. thaliana
  misc_feature: MA Experiment 20001558 PARAMETER Experiment Name: At_Drought_Soil_Dry_P Parameter: Plant Line Value: WS
  misc_feature: MA Experiment 20001558 PARAMETER Experiment Name: At_Drought_Soil_Dry_P Parameter: Post Timepoint (hr) Value: 6
  misc_feature: MA Experiment 20001558 PARAMETER Experiment Name: At_Drought_Soil_Dry_P Parameter: Post-Treatment Value: Re-Water vs. No Drought
  misc_feature: MA Experiment 20001558 PARAMETER Experiment Name: At_Drought_Soil_Dry_P Parameter: Timepoint (day) Value: 13
  misc_feature: MA Experiment 20001558 PARAMETER Experiment Name: At_Drought_Soil_Dry_P Parameter: Treatment Value: Drought vs. No Drought
  misc_feature: MA Experiment ID: 20001774 Result: Down-regulated in Transcription
  misc_feature: MA Experiment 20001774 PARAMETER Experiment Name: At_Far-red-enriched-adult_P Parameter: Age (day) Value: 31
  misc_feature: MA Experiment 20001774 PARAMETER Experiment Name: At_Far-red-enriched-adult_P Parameter: Light Value: Far-red enriched vs. White
  misc_feature: MA Experiment 20001774 PARAMETER Experiment Name: At_Far-red-enriched-adult_P Parameter: Organism Value: A. thaliana
  misc_feature: MA Experiment 20001774 PARAMETER Experiment Name: At_Far-red-enriched-adult_P Parameter: Plant Line Value: Columbia
  misc_feature: MA Experiment 20001774 PARAMETER Experiment Name: At_Far-red-enriched-adult_P Parameter: Timepoint (hr) Value: 72
  misc_feature: MA Experiment 20001774 PARAMETER Experiment Name: At_Far-red-enriched-adult_P Parameter: Tissue Value: Aerial
  misc_feature: MA Experiment ID: 20001904 Result: Down-regulated in Transcription
  misc_feature: MA Experiment 20001904 PARAMETER Experiment Name: At_Drought_Reproduction_P Parameter: Age (day) Value: 37
  misc_feature: MA Experiment 20001904 PARAMETER Experiment Name: At_Drought_Reproduction_P Parameter: Organism Value: A. thaliana
  misc_feature: MA Experiment 20001904 PARAMETER Experiment Name: At_Drought_Reproduction_P Parameter: Plant Line Value: WS
  misc_feature: MA Experiment 20001904 PARAMETER Experiment Name: At_Drought_Reproduction_P Parameter: Timepoint (day) Value: 7
  misc_feature: MA Experiment 20001904 PARAMETER Experiment Name: At_Drought_Reproduction_P Parameter: Tissue Value: Rosettes
  misc_feature: MA Experiment 20001904 PARAMETER Experiment Name: At_Drought_Reproduction_P Parameter: Treatment Value: Drought vs. No Drought
atggtgaaacaagaactcaagatccaagttactacttcctcatcatcactctctcattcttcatcttcttcttcttcttcaacgtcggcactacgtcatcaatcttgtaagaacaagataaagaagtataaaggtgtgaggatgcgaagttggggatcatgggttactgaaattagggcaccaaatcaaaagacaagaatctggttaggttcttactccaccgcagaagcagctgctagggcttacgacgctgctctcttgtgtcttaagggacctaaagctaatctcaacttccctaacatcaccactacttctccttttcttatgaacatcgacgaaaagacccttttgtccccaaaatcaatccaaaaggtcgccgctcaagccgctaactcctcttctgaccattttacccctccgtccgatgaaaatgatcatgatcatgatgacggactcgatcaccatccatctgcttcttcttcagctgcatcttcaccaccagatgatgatcatcataatgatgacgatggtgatttggtatcgttgatggaatctttcgtggattacaacgaacacgtgtctctgatggatccatcgctgtatgaatttggacataatgagatcttcttcaccaacggagatccgtttgattattctccacagttacatagctcagaggcaacgatggatgacttctacgacgatgttgatattccgctatggagtttcagttaa

SEQ ID NO: 90883 - protein, 244 aa, Arabidopsis thaliana
  peptide (1)..(244): Ceres Seq. ID no. 12725635
  misc_feature (40)..(104): Pfam Name: AP2 domain Pfam Description: AP2 domain
  misc_feature (1)..(244): Homolog of NCBI NO: 15224024 NR Description: hypothetical protein; protein id: At1g77640.1
  misc_feature (1)..(172): Homolog of NCBI NO: 15219139 NR Description: TINY-like protein; protein id: At1g21910.1, by cDNA: 19721. [Arabidopsis thaliana] >gi|25402947|pir||D86352
  misc_feature (1)..(172): Homolog of NCBI NO: 21554056 NR Description: TINY-like protein [Arabidopsis thaliana]
  misc_feature (8)..(190): Homolog of NCBI NO: 15219452 NR Description: transcription factor, putative; protein id: [Arabidopsis thaliana] >gi|25352175|pir||D96507 hypothetical
  misc_feature (11)..(194): Homolog of NCBI NO: 38605848 NR Description: OSJNBb0034G17.6 [Oryza sativa (japonica
  misc_feature (40)..(130): Homolog of NCBI NO: 34902130 NR Description: hypothetical protein [Oryza sativa (japonica group)] >gi|29893600|gb|AAP06854.1| hypothetical protein [Oryza
  misc_feature (11)..(183): Homolog of NCBI NO: 14140163 NR Description: putative AP2 domain containing protein [Oryza
  misc_feature (42)..(170): Homolog of NCBI NO: 15222040 NR Description: AP2 domain containing protein, putative; protein At1g74930.1 [Arabidopsis thaliana] >gi|25352178|pir||A96779
  misc_feature (20)..(177): Homolog of NCBI NO: 37536842 NR Description: putative DNA binding protein [Oryza sativa
  misc_feature (11)..(204): Homolog of NCBI NO: 38605845 NR Description: OSJNBb0034G17.3 [Oryza sativa (japonica
MVKQELKIQVTTSSSSLSHSSSSSSSSTSALRHQSCKNKIKKYKGVRMRSWGSWVTEIRAPNQKTRIWLGSYSTAEAAARAYDAALLCLKGPKANLNFPNITTTSPFLMNIDEKTLLSPKSIQKVAAQAANSSSDHFTPPSDENDHDHDDGLDHHPSASSSAASSPPDDDHHNDDDGDLVSLMESFVDYNEHVSLMDPSLYEFGHNEIFFTNGDPFDYSPQLHSSEATMDDFYDDVDIPLWSFS

SEQ ID NO: 90884 - protein, 197 aa, Arabidopsis thaliana
  peptide (1)..(197): Ceres Seq. ID no. 12725636
  misc_feature (1)..(57): Pfam Name: AP2 domain Pfam Description: AP2 domain
  misc_feature (1)..(197): Homolog of NCBI NO: 15224024 NR Description: hypothetical protein; protein id: At1g77640.1
  misc_feature (1)..(125): Homolog of NCBI NO: 15219139 NR Description: TINY-like protein; protein id: At1g21910.1, by cDNA: 19721. [Arabidopsis thaliana] >gi|25402947|pir||D86352
  misc_feature (1)..(125): Homolog of NCBI NO: 21554056 NR Description: TINY-like protein [Arabidopsis thaliana]
  misc_feature (1)..(143): Homolog of NCBI NO: 15219452 NR Description: transcription factor, putative; protein id: [Arabidopsis thaliana] >gi|25352175|pir||D96507 hypothetical
  misc_feature (1)..(147): Homolog of NCBI NO: 38605848 NR Description: OSJNBb0034G17.6 [Oryza sativa (japonica
  misc_feature (1)..(83): Homolog of NCBI NO: 34902130 NR Description: hypothetical protein [Oryza sativa (japonica group)] >gi|29893600|gb|AAP06854.1| hypothetical protein [Oryza
  misc_feature (1)..(136): Homolog of NCBI NO: 14140163 NR Description: putative AP2 domain containing protein [Oryza
  misc_feature (1)..(123): Homolog of NCBI NO: 15222040 NR Description: AP2 domain containing protein, putative; protein At1g74930.1 [Arabidopsis thaliana] >gi|25352178|pir||A96779
  misc_feature (1)..(130): Homolog of NCBI NO: 37536842 NR Description: putative DNA binding protein [Oryza sativa
  misc_feature (1)..(157): Homolog of NCBI NO: 38605845 NR Description: OSJNBb0034G17.3 [Oryza sativa (japonica
MRSWGSWVTEIRAPNQKTRIWLGSYSTAEAAARAYDAALLCLKGPKANLNFPNITTTSPFLMNIDEKTLLSPKSIQKVAAQAANSSSDHFTPPSDENDHDHDDGLDHHPSASSSAASSPPDDDHHNDDDGDLVSLMESFVDYNEHVSLMDPSLYEFGHNEIFFTNGDPFDYSPQLHSSEATMDDFYDDVDIPLWSFS

SEQ ID NO: 90885 - protein, 136 aa, Arabidopsis thaliana
  peptide (1)..(136): Ceres Seq. ID no. 12725637
  misc_feature (1)..(136): Homolog of NCBI NO: 15224024 NR Description: hypothetical protein; protein id: At1g77640.1
  misc_feature (1)..(64): Homolog of NCBI NO: 15219139 NR Description: TINY-like protein; protein id: At1g21910.1, by cDNA: 19721. [Arabidopsis thaliana] >gi|25402947|pir||D86352
  misc_feature (1)..(64): Homolog of NCBI NO: 21554056 NR Description: TINY-like protein [Arabidopsis thaliana]
  misc_feature (1)..(82): Homolog of NCBI NO: 15219452 NR Description: transcription factor, putative; protein id: [Arabidopsis thaliana] >gi|25352175|pir||D96507 hypothetical
  misc_feature (1)..(86): Homolog of NCBI NO: 38605848 NR Description: OSJNBb0034G17.6 [Oryza sativa (japonica
  misc_feature (1)..(22): Homolog of NCBI NO: 34902130 NR Description: hypothetical protein [Oryza sativa (japonica group)] >gi|29893600|gb|AAP06854.1| hypothetical protein [Oryza
  misc_feature (1)..(75): Homolog of NCBI NO: 14140163 NR Description: putative AP2 domain containing protein [Oryza
  misc_feature (1)..(62): Homolog of NCBI NO: 15222040 NR Description: AP2 domain containing protein, putative; protein At1g74930.1 [Arabidopsis thaliana] >gi|25352178|pir||A96779
  misc_feature (1)..(69): Homolog of NCBI NO: 37536842 NR Description: putative DNA binding protein [Oryza sativa
  misc_feature (1)..(96): Homolog of NCBI NO: 38605845 NR Description: OSJNBb0034G17.3 [Oryza sativa (japonica
MNIDEKTLLSPKSIQKVAAQAANSSSDHFTPPSDENDHDHDDGLDHHPSASSSAASSPPDDDHHNDDDGDLVSLMESFVDYNEHVSLMDPSLYEFGHNEIFFTNGDPFDYSPQLHSSEATMDDFYDDVDIPLWSFS

SEQ ID NO: 90886 - DNA, 1636 bp, Arabidopsis thaliana
  misc_feature (1)..(1636): Ceres Seq. ID no. 12725642
  misc_feature: MA Experiment ID: 20000169 Result: Down-regulated in Transcription
  misc_feature: MA Experiment 20000169 PARAMETER Experiment Name: At_100uM_ABA_P Parameter: Age (day) Value: 14
  misc_feature: MA Experiment 20000169 PARAMETER Experiment Name: At_100uM_ABA_P Parameter: Organism Value: A. thaliana
  misc_feature: MA Experiment 20000169 PARAMETER Experiment Name: At_100uM_ABA_P Parameter: Plant Line Value: WS
  misc_feature: MA Experiment 20000169 PARAMETER Experiment Name: At_100uM_ABA_P Parameter: Timepoint (hr) Value: 6
  misc_feature: MA Experiment 20000169 PARAMETER Experiment Name: At_100uM_ABA_P Parameter: Tissue Value: Aerial
  misc_feature: MA Experiment 20000169 PARAMETER Experiment Name: At_100uM_ABA_P Parameter: Treatment Value: 100uM ABA vs. No Treatment
  misc_feature: MA Experiment ID: 20000173 Result: Down-regulated in Transcription
  misc_feature: MA Experiment 20000173 PARAMETER Experiment Name: At_42deg_Heat_P Parameter: Age (day) Value: 14
  misc_feature: MA Experiment 20000173 PARAMETER Experiment Name: At_42deg_Heat_P Parameter: Organism Value: A. thaliana
  misc_feature: MA Experiment 20000173 PARAMETER Experiment Name: At_42deg_Heat_P Parameter: Plant Line Value: WS
  misc_feature: MA Experiment 20000173 PARAMETER Experiment Name: At_42deg_Heat_P Parameter: Temperature (deg C) Value: 42 vs. 22
  misc_feature: MA Experiment 20000173 PARAMETER Experiment Name: At_42deg_Heat_P Parameter: Timepoint (hr) Value: 6
  misc_feature: MA Experiment 20000173 PARAMETER Experiment Name: At_42deg_Heat_P Parameter: Tissue Value: Aerial
  misc_feature: MA Experiment ID: 20000180 Result: Up-regulated in Transcription
  misc_feature: MA Experiment 20000180 PARAMETER Experiment Name: At_Germinating_Seeds_P Parameter: Age (hr) Value: 24 vs. 0
  misc_feature: MA Experiment 20000180 PARAMETER Experiment Name: At_Germinating_Seeds_P Parameter: Tissue Value: Germinating Seeds
  misc_feature: MA Experiment ID: 20000234 Result: Down-regulated in Transcription
  misc_feature: MA Experiment 20000234 PARAMETER Experiment Name: At_Siliques_P Parameter: Age (day) Value: 21
  misc_feature: MA Experiment 20000234 PARAMETER Experiment Name: At_Siliques_P Parameter: Organism Value: A. thaliana
  misc_feature: MA Experiment 20000234 PARAMETER Experiment Name: At_Siliques_P Parameter: Plant Line Value: WS
  misc_feature: MA Experiment 20000234 PARAMETER Experiment Name: At_Siliques_P Parameter: Tissue Value: Less Than 5mm Siliques vs. Whole Plant
  misc_feature: MA Experiment ID: 20000437 Result: Down-regulated in Transcription
  misc_feature: MA Experiment 20000437 PARAMETER Experiment Name: At_Drought_P Parameter: Age (day) Value: 8
  misc_feature: MA Experiment 20000437 PARAMETER Experiment Name: At_Drought_P Parameter: Organism Value: A. thaliana
  misc_feature: MA Experiment 20000437 PARAMETER Experiment Name: At_Drought_P Parameter: Plant Line Value: WS
  misc_feature: MA Experiment 20000437 PARAMETER Experiment Name: At_Drought_P Parameter: Timepoint (hr) Value: 24
  misc_feature: MA Experiment 20000437 PARAMETER Experiment Name: At_Drought_P Parameter: Tissue Value: Whole Plant
  misc_feature: MA Experiment 20000437 PARAMETER Experiment Name: At_Drought_P Parameter: Treatment Value: Drought vs. No Drought
  misc_feature: MA Experiment ID: 20001555 Result: Down-regulated in Transcription
  misc_feature: MA Experiment 20001555 PARAMETER Experiment Name: At_Drought_Soil_Dry_P Parameter: Age (day) Value: 24
  misc_feature: MA Experiment 20001555 PARAMETER Experiment Name: At_Drought_Soil_Dry_P Parameter: Organism Value: A. thaliana
  misc_feature: MA Experiment 20001555 PARAMETER Experiment Name: At_Drought_Soil_Dry_P Parameter: Plant Line Value: WS
  misc_feature: MA Experiment 20001555 PARAMETER Experiment Name: At_Drought_Soil_Dry_P Parameter: Post Timepoint (hr) Value: None
  misc_feature: MA Experiment 20001555 PARAMETER Experiment Name: At_Drought_Soil_Dry_P Parameter: Post-Treatment Value: None
  misc_feature: MA Experiment 20001555 PARAMETER Experiment Name: At_Drought_Soil_Dry_P Parameter: Timepoint (day) Value: 10
  misc_feature: MA Experiment 20001555 PARAMETER Experiment Name: At_Drought_Soil_Dry_P Parameter: Treatment Value: Drought vs. No Drought
  misc_feature: MA Experiment ID: 20001556 Result: Down-regulated in Transcription
  misc_feature: MA Experiment 20001556 PARAMETER Experiment Name: At_Drought_Soil_Dry_P Parameter: Age (day) Value: 26
  misc_feature: MA Experiment 20001556 PARAMETER Experiment Name: At_Drought_Soil_Dry_P Parameter: Organism Value: A. thaliana
  misc_feature: MA Experiment 20001556 PARAMETER Experiment Name: At_Drought_Soil_Dry_P Parameter: Plant Line Value: WS
  misc_feature: MA Experiment 20001556 PARAMETER Experiment Name: At_Drought_Soil_Dry_P Parameter: Post Timepoint (hr) Value: None
  misc_feature: MA Experiment 20001556 PARAMETER Experiment Name: At_Drought_Soil_Dry_P Parameter: Post-Treatment Value: None
  misc_feature: MA Experiment 20001556 PARAMETER Experiment Name: At_Drought_Soil_Dry_P Parameter: Timepoint (day) Value: 12
  misc_feature: MA Experiment 20001556 PARAMETER Experiment Name: At_Drought_Soil_Dry_P Parameter: Treatment Value: Drought vs. No Drought
  misc_feature: MA Experiment ID: 20001757 Result: Up-regulated in Transcription
  misc_feature: MA Experiment 20001757 PARAMETER Experiment Name: At_50mM_NH4NO3_L-to-H_P Parameter: Timepoint (hr) Value: 6
  misc_feature: MA Experiment 20001757 PARAMETER Experiment Name: At_50mM_NH4NO3_L-to-H_P Parameter: Tissue Value: Leaf
  misc_feature: MA Experiment 20001757 PARAMETER Experiment Name: At_50mM_NH4NO3_L-to-H_P Parameter: Treatment Value: 50mM NH4NO3 vs 100mM Mannitol
  misc_feature: MA Experiment ID: 20001906 Result: Down-regulated in Transcription
  misc_feature: MA Experiment 20001906 PARAMETER Experiment Name: At_Drought_Reproduction_P Parameter: Age (day) Value: 35
  misc_feature: MA Experiment 20001906 PARAMETER Experiment Name: At_Drought_Reproduction_P Parameter: Organism Value: A. thaliana
  misc_feature: MA Experiment 20001906 PARAMETER Experiment Name: At_Drought_Reproduction_P Parameter: Plant Line Value: WS
  misc_feature: MA Experiment 20001906 PARAMETER Experiment Name: At_Drought_Reproduction_P Parameter: Timepoint (day) Value: 5
  misc_feature: MA Experiment 20001906 PARAMETER Experiment Name: At_Drought_Reproduction_P Parameter: Tissue Value: Siliques
  misc_feature: MA Experiment 20001906 PARAMETER Experiment Name: At_Drought_Reproduction_P Parameter: Treatment Value: Drought vs. No Drought
gaaactgagagaagaagagaaaaatggcggcagagaaaatagagacagtggtcgcagggaattacttagaaatggagagggaagaagaaaacataagtggtaacaagaaatcttcaactaaaacaaaactctctaatttcttctggcatggtggttctgtctacgatgcttggtttagttgtgcttcaaatcaggtggcacaagttctgttgacattaccatactcgttctcacaacttgggatgatgtcgggaattttgtttcaactcttttatggattaatgggaagttggactgcttatctcattagtgttctttacgttgaatatcgaactcgtaaagaacgagaaaaattcgatttccgtaaccacgttattcagtggtttgaggtgttagatggattgttggggaaacattggaggaaccttggattgatctttaactgcacttttcttctctttggatctgttattcagctcattgcttgtgctagcaatatatattatattaatgacaaattggacaagaggacatggacatacatatttggggcgtgctgtgcaacaactgtttttattccttccttccacaattatagaatttggtcattcctcggactcgctatgaccacttacacttcttggtatctcaccattgcttcactccttcatggccaggctgaggatgtgaaacactctggtccaaccacaatggtgctttacttcaccggagccaccaacattctctacacctttggtggccacgccgtcacagtggagataatgcacgctatgtggaaaccgcaaaagttcaaggcgatatatctactagcgaccatatatgtactaacgctaacgctaccatccgcgtctgcggtttattgggcgtttggcgataagctactaactcattccaatgcgctctctcttctccctaagactggttttagagataccgcagtgatcctcatgctcattcatcaatttataacgttcggattcgcgtctacaccgttatattttgtgtgggagaaattgataggtgtgcatgagacgaagagcatgttcaaaagagccatggctagattacccgtggttgtacccatatggttcttagccattatcttcccctttttcggaccaatcaattccgcggtcggatctctcttagttagcttcactgtctacatcatccccgcattggctcatatgcttacctttgctcctgctccttcaagagagaatgcggtggagaggccaccgagagtggtaggaggatggatggggacttactgcataaacatatttgtggtggtttgggtattcgtagttgggttcgggtttggaggatgggcaagtatggtcaactttgttcgccagatcgacacttttggtctctttaccaaatgctaccaatgccctcctcacaagccatgatatacaaatttgccattcaagaccttctagaaagagagtttcatataagggggttttgatttcgagatctaatatatataagttactacatccaatttttttttagtatttattaaaaatcacatctctttgtaattgtttgacgacaataatcttttacctcgggtttgtttaatttgttatgttgagttatttttggt

SEQ ID NO: 90887 - protein, 470 aa, Arabidopsis thaliana
  peptide (1)..(470): Ceres Seq. ID no. 12725643
  misc_feature (1)..(470): Homolog of NCBI NO: 15217443 NR Description: putative AUX1-like permease; protein id: supported by cDNA: gi_15809995 [Arabidopsis thaliana]
  misc_feature (1)..(469): Homolog of NCBI NO: 10800922 NR Description: putative AUX1-like permease [Medicago truncatula]
  misc_feature (1)..(470): Homolog of NCBI NO: 21586474 NR Description: auxin influx carrier protein [Medicago truncatula]
  misc_feature (7)..(467): Homolog of NCBI NO: 15226450 NR Description: AUX1-like amino acid permease; protein id: supported by cDNA: gi_15451207 [Arabidopsis thaliana]
  misc_feature (1)..(467): Homolog of NCBI NO: 14279184 NR Description: putative AUX1-like permease [Populus tremula x
  misc_feature (1)..(468): Homolog of NCBI NO: 6689614 NR Description: AUX1 protein [Zea mays]
  misc_feature (18)..(468): Homolog of NCBI NO: 37531048 NR Description: putative AUX1-like permease [Oryza sativa
  misc_feature (1)..(470): Homolog of NCBI NO: 15240927 NR Description: LAX1 / AUX1 -like permease; protein id:
  misc_feature (3)..(467): Homolog of NCBI NO: 18404642 NR Description: expressed protein; protein id: At2g38120.1, by cDNA: 31586., supported by cDNA: gi_15450815, supported by gi_20259903 [Arabidopsis thaliana] >gi|7485590|pir||T01244
  misc_feature (1)..(470): Homolog of NCBI NO: 21586468 NR Description: auxin influx carrier protein [Medicago truncatula]
MAAEKIETVVAGNYLEMEREEENISGNKKSSTKTKLSNFFWHGGSVYDAWFSCASNQVAQVLLTLPYSFSQLGMMSGILFQLFYGLMGSWTAYLISVLYVEYRTRKEREKFDFRNHVIQWFEVLDGLLGKHWRNLGLIFNCTFLLFGSVIQLIACASNIYYINDKLDKRTWTYIFGACCATTVFIPSFHNYRIWSFLGLAMTTYTSWYLTIASLLHGQAEDVKHSGPTTMVLYFTGATNILYTFGGHAVTVEIMHAMWKPQKFKAIYLLATIYVLTLTLPSASAVYWAFGDKLLTHSNALSLLPKTGFRDTAVILMLIHQFITFGFASTPLYFVWEKLIGVHETKSMFKRAMARLPVVVPIWFLAIIFPFFGPINSAVGSLLVSFTVYIIPALAHMLTFAPAPSRENAVERPPRVVGGWMGTYCINIFVVVWVFVVGFGFGGWASMVNFVRQIDTFGLFTKCYQCPPHKP

SEQ ID NO: 90888 - protein, 454 aa, Arabidopsis thaliana
  peptide (1)..(454): Ceres Seq. ID no. 12725644
  misc_feature (1)..(454): Homolog of NCBI NO: 15217443 NR Description: putative AUX1-like permease; protein id: supported by cDNA: gi_15809995 [Arabidopsis thaliana]
  misc_feature (1)..(453): Homolog of NCBI NO: 10800922 NR Description: putative AUX1-like permease [Medicago truncatula]
  misc_feature (1)..(454): Homolog of NCBI NO: 21586474 NR Description: auxin influx carrier protein [Medicago truncatula]
  misc_feature (1)..(451): Homolog of NCBI NO: 15226450 NR Description: AUX1-like amino acid permease; protein id: supported by cDNA: gi_15451207 [Arabidopsis thaliana]
  misc_feature (1)..(451): Homolog of NCBI NO: 14279184 NR Description: putative AUX1-like permease [Populus tremula x
  misc_feature (1)..(452): Homolog of NCBI NO: 6689614 NR Description: AUX1 protein [Zea mays]
  misc_feature (2)..(452): Homolog of NCBI NO: 37531048 NR Description: putative AUX1-like permease [Oryza sativa
  misc_feature (1)..(454): Homolog of NCBI NO: 15240927 NR Description: LAX1 / AUX1 -like permease; protein id:
  misc_feature (1)..(451): Homolog of NCBI NO: 18404642 NR Description: expressed protein; protein id: At2g38120.1, by cDNA: 31586., supported by cDNA: gi_15450815, supported by gi_20259903 [Arabidopsis thaliana] >gi|7485590|pir||T01244
  misc_feature (1)..(454): Homolog of NCBI NO: 21586468 NR Description: auxin influx carrier protein [Medicago truncatula]
MEREEENISGNKKSSTKTKLSNFFWHGGSVYDAWFSCASNQVAQVLLTLPYSFSQLGMMSGILFQLFYGLMGSWTAYLISVLYVEYRTRKEREKFDFRNHVIQWFEVLDGLLGKHWRNLGLIFNCTFLLFGSVIQLIACASNIYYINDKLDKRTWTYIFGACCATTVFIPSFHNYRIWSFLGLAMTTYTSWYLTIASLLHGQAEDVKHSGPTTMVLYFTGATNILYTFGGHAVTVEIMHAMWKPQKFKAIYLLATIYVLTLTLPSASAVYWAFGDKLLTHSNALSLLPKTGFRDTAVILMLIHQFITFGFASTPLYFVWEKLIGVHETKSMFKRAMARLPVVVPIWFLAIIFPFFGPINSAVGSLLVSFTVYIIPALAHMLTFAPAPSRENAVERPPRVVGGWMGTYCINIFVVVWVFVVGFGFGGWASMVNFVRQIDTFGLFTKCYQCPPHKP

SEQ ID NO: 90889 - protein, 397 aa, Arabidopsis thaliana
  peptide (1)..(397): Ceres Seq. ID no. 12725645
  misc_feature (1)..(397): Homolog of NCBI NO: 15217443 NR Description: putative AUX1-like permease; protein id: supported by cDNA: gi_15809995 [Arabidopsis thaliana]
  misc_feature (1)..(396): Homolog of NCBI NO: 10800922 NR Description: putative AUX1-like permease [Medicago truncatula]
  misc_feature (1)..(397): Homolog of NCBI NO: 21586474 NR Description: auxin influx carrier protein [Medicago truncatula]
  misc_feature (1)..(394): Homolog of NCBI NO: 15226450 NR Description: AUX1-like amino acid permease; protein id: supported by cDNA: gi_15451207 [Arabidopsis thaliana]
  misc_feature (1)..(394): Homolog of NCBI NO: 14279184 NR Description: putative AUX1-like permease [Populus tremula x
  misc_feature (1)..(395): Homolog of NCBI NO: 6689614 NR Description: AUX1 protein [Zea mays]
  misc_feature (1)..(395): Homolog of NCBI NO: 37531048 NR Description: putative AUX1-like permease [Oryza sativa
  misc_feature (1)..(397): Homolog of NCBI NO: 15240927 NR Description: LAX1 / AUX1 -like permease; protein id:
  misc_feature (1)..(394): Homolog of NCBI NO: 18404642 NR Description: expressed protein; protein id: At2g38120.1, by cDNA: 31586., supported by cDNA: gi_15450815, supported by gi_20259903 [Arabidopsis thaliana] >gi|7485590|pir||T01244
  misc_feature (1)..(397): Homolog of NCBI NO: 21586468 NR Description: auxin influx carrier protein [Medicago truncatula]
MMSGILFQLFYGLMGSWTAYLISVLYVEYRTRKEREKFDFRNHVIQWFEVLDGLLGKHWRNLGLIFNCTFLLFGSVIQLIACASNIYYINDKLDKRTWTYIFGACCATTVFIPSFHNYRIWSFLGLAMTTYTSWYLTIASLLHGQAEDVKHSGPTTMVLYFTGATNILYTFGGHAVTVEIMHAMWKPQKFKAIYLLATIYVLTLTLPSASAVYWAFGDKLLTHSNALSLLPKTGFRDTAVILMLIHQFITFGFASTPLYFVWEKLIGVHETKSMFKRAMARLPVVVPIWFLAIIFPFFGPINSAVGSLLVSFTVYIIPALAHMLTFAPAPSRENAVERPPRVVGGWMGTYCINIFVVVWVFVVGFGFGGWASMVNFVRQIDTFGLFTKCYQCPPHKP

SEQ ID NO: 90890 - DNA, 3033 bp, Arabidopsis thaliana
  misc_feature (1)..(3033): Ceres Seq. ID no. 12725655
  misc_feature: MA Experiment ID: 20000166 Result: Down-regulated in Transcription
  misc_feature: MA Experiment 20000166 PARAMETER Experiment Name: At_100uM_ABA_P Parameter: Age (day) Value: 14
  misc_feature: MA Experiment 20000166 PARAMETER Experiment Name: At_100uM_ABA_P Parameter: Organism Value: A. thaliana
  misc_feature: MA Experiment 20000166 PARAMETER Experiment Name: At_100uM_ABA_P Parameter: Plant Line Value: WS
  misc_feature: MA Experiment 20000166 PARAMETER Experiment Name: At_100uM_ABA_P Parameter: Timepoint (hr) Value: 1
  misc_feature: MA Experiment 20000166 PARAMETER Experiment Name: At_100uM_ABA_P Parameter: Tissue Value: Aerial
  misc_feature: MA Experiment 20000166 PARAMETER Experiment Name: At_100uM_ABA_P Parameter: Treatment Value: 100uM ABA vs. No Treatment
  misc_feature: MA Experiment ID: 20000171 Result: Down-regulated in Transcription
  misc_feature: MA Experiment 20000171 PARAMETER Experiment Name: At_42deg_Heat_P Parameter: Age (day) Value: 14
  misc_feature: MA Experiment 20000171 PARAMETER Experiment Name: At_42deg_Heat_P Parameter: Organism Value: A. thaliana
  misc_feature: MA Experiment 20000171 PARAMETER Experiment Name: At_42deg_Heat_P Parameter: Plant Line Value: WS
  misc_feature: MA Experiment 20000171 PARAMETER Experiment Name: At_42deg_Heat_P Parameter: Temperature (deg C) Value: 42 vs. 22
  misc_feature: MA Experiment 20000171 PARAMETER Experiment Name: At_42deg_Heat_P Parameter: Timepoint (hr) Value: 1
  misc_feature: MA Experiment 20000171 PARAMETER Experiment Name: At_42deg_Heat_P Parameter: Tissue Value: Aerial
  misc_feature: MA Experiment ID: 20000173 Result: Up-regulated in Transcription
  misc_feature: MA Experiment 20000173 PARAMETER Experiment Name: At_42deg_Heat_P Parameter: Age (day) Value: 14
  misc_feature: MA Experiment 20000173 PARAMETER Experiment Name: At_42deg_Heat_P Parameter: Organism Value: A. thaliana
  misc_feature: MA Experiment 20000173 PARAMETER Experiment Name: At_42deg_Heat_P Parameter: Plant Line Value: WS
  misc_feature: MA Experiment 20000173 PARAMETER Experiment Name: At_42deg_Heat_P Parameter: Temperature (deg C) Value: 42 vs. 22
  misc_feature: MA Experiment 20000173 PARAMETER Experiment Name: At_42deg_Heat_P Parameter: Timepoint (hr) Value: 6
  misc_feature: MA Experiment 20000173 PARAMETER Experiment Name: At_42deg_Heat_P Parameter: Tissue Value: Aerial
  misc_feature: MA Experiment ID: 20000180 Result: Down-regulated in Transcription
  misc_feature: MA Experiment 20000180 PARAMETER Experiment Name: At_Germinating_Seeds_P Parameter: Age (hr) Value: 24 vs. 0
  misc_feature: MA Experiment 20000180 PARAMETER Experiment Name: At_Germinating_Seeds_P Parameter: Tissue Value: Germinating Seeds
  misc_feature: MA Experiment ID: 20000182 Result: Up-regulated in Transcription
  misc_feature: MA Experiment 20000182 PARAMETER Experiment Name: At_2mM_SA_P Parameter: Age (day) Value: 14
  misc_feature: MA Experiment 20000182 PARAMETER Experiment Name: At_2mM_SA_P Parameter: Organism Value: A. thaliana
  misc_feature: MA Experiment 20000182 PARAMETER Experiment Name: At_2mM_SA_P Parameter: Plant Line Value: WS
  misc_feature: MA Experiment 20000182 PARAMETER Experiment Name: At_2mM_SA_P Parameter: Timepoint (hr) Value: 6
  misc_feature: MA Experiment 20000182 PARAMETER Experiment Name: At_2mM_SA_P Parameter: Tissue Value: Aerial
  misc_feature: MA Experiment 20000182 PARAMETER Experiment Name: At_2mM_SA_P Parameter: Treatment Value: 2mM SA vs. No Treatment
  misc_feature: MA Experiment ID: 20000184 Result: Up-regulated in Transcription
  misc_feature: MA Experiment 20000184 PARAMETER Experiment Name: At_Shoots__P Parameter: Age (day) Value: 7
  misc_feature: MA Experiment 20000184 PARAMETER Experiment Name: At_Shoots__P Parameter: Tissue Value: Shoots vs. Whole Plant
  misc_feature: MA Experiment ID: 20000185 Result: Up-regulated in Transcription
  misc_feature: MA Experiment 20000185 PARAMETER Experiment Name: At_Roots__P Parameter: Age (day) Value: 7 vs. 21
  misc_feature: MA Experiment 20000185 PARAMETER Experiment Name: At_Roots__P Parameter: Organism Value: A. thaliana
  misc_feature: MA Experiment 20000185 PARAMETER Experiment Name: At_Roots__P Parameter: Tissue Value: Roots vs. Whole Plant
  misc_feature: MA Experiment ID: 20000213 Result: Up-regulated in Transcription
  misc_feature: MA Experiment 20000213 PARAMETER Experiment Name: At_4deg_Cold_P Parameter: Timepoint (hr) Value: 2
  misc_feature: MA Experiment ID: 20000234 Result: Down-regulated in Transcription
  misc_feature: MA Experiment 20000234 PARAMETER Experiment Name: At_Siliques_P Parameter: Age (day) Value: 21
  misc_feature: MA Experiment 20000234 PARAMETER Experiment Name: At_Siliques_P Parameter: Organism Value: A. thaliana
  misc_feature: MA Experiment 20000234 PARAMETER Experiment Name: At_Siliques_P Parameter: Plant Line Value: WS
  misc_feature: MA Experiment 20000234 PARAMETER Experiment Name: At_Siliques_P Parameter: Tissue Value: Less Than 5mm Siliques vs. Whole Plant
  misc_feature: MA Experiment ID: 20000235 Result: Down-regulated in Transcription
  misc_feature: MA Experiment 20000235 PARAMETER Experiment Name: At_Siliques_P Parameter: Age (day) Value: 21
  misc_feature: MA Experiment 20000235 PARAMETER Experiment Name: At_Siliques_P Parameter: Organism Value: A. thaliana
  misc_feature: MA Experiment 20000235 PARAMETER Experiment Name: At_Siliques_P Parameter: Plant Line Value: WS
  misc_feature: MA Experiment 20000235 PARAMETER Experiment Name: At_Siliques_P Parameter: Tissue Value: 5-10mm Siliques vs. Whole Plant
  misc_feature: MA Experiment ID: 20000264 Result: Up-regulated in Transcription
  misc_feature: MA Experiment 20000264 PARAMETER Experiment Name: At_Open_Flower_P Parameter: Age (day) Value: 21
  misc_feature: MA Experiment 20000264 PARAMETER Experiment Name: At_Open_Flower_P Parameter: Plant Line Value: WS
  misc_feature: MA Experiment 20000264 PARAMETER Experiment Name: At_Open_Flower_P Parameter: Tissue Value: Open Flower vs. Whole Plant
  misc_feature: MA Experiment ID: 20000267 Result: Down-regulated in Transcription
  misc_feature: MA Experiment 20000267 PARAMETER Experiment Name: At_Drought_P Parameter: Age (day) Value: 7
  misc_feature: MA Experiment 20000267 PARAMETER Experiment Name: At_Drought_P Parameter: Organism Value: A. thaliana
  misc_feature: MA Experiment 20000267 PARAMETER Experiment Name: At_Drought_P Parameter: Plant Line Value: WS
  misc_feature: MA Experiment 20000267 PARAMETER Experiment Name: At_Drought_P Parameter: Timepoint (hr) Value: 6
  misc_feature: MA Experiment 20000267 PARAMETER Experiment Name: At_Drought_P Parameter: Tissue Value: Whole Plant
  misc_feature: MA Experiment 20000267 PARAMETER Experiment Name: At_Drought_P Parameter: Treatment Value: Drought vs. No Drought
  misc_feature: MA Experiment ID: 20000268 Result: Down-regulated in Transcription
  misc_feature: MA Experiment 20000268 PARAMETER Experiment Name: At_100mM_NaCl__P Parameter: Age (day) Value: 14
  misc_feature: MA Experiment 20000268 PARAMETER Experiment Name: At_100mM_NaCl__P Parameter: Organism Value: A. thaliana
  misc_feature: MA Experiment 20000268 PARAMETER Experiment Name: At_100mM_NaCl__P Parameter: Plant Line Value: WS
  misc_feature: MA Experiment 20000268 PARAMETER Experiment Name: At_100mM_NaCl__P Parameter: Timepoint (hr) Value: 6
  misc_feature: MA Experiment 20000268 PARAMETER Experiment Name: At_100mM_NaCl__P Parameter: Tissue Value: Whole Plant
  misc_feature: MA Experiment 20000268 PARAMETER Experiment Name: At_100mM_NaCl__P Parameter: Treatment Value: 100mM NaCl vs. No Treatment
  misc_feature: MA Experiment ID: 20000308 Result: Down-regulated in Transcription
  misc_feature: MA Experiment 20000308 PARAMETER Experiment Name: At_100mM_NaCl__P Parameter: Age (day) Value: 17
  misc_feature: MA Experiment 20000308 PARAMETER Experiment Name: At_100mM_NaCl__P Parameter: Organism Value: A. thaliana
  misc_feature: MA Experiment 20000308 PARAMETER Experiment Name: At_100mM_NaCl__P Parameter: Plant Line Value: WS
  misc_feature: MA Experiment 20000308 PARAMETER Experiment Name: At_100mM_NaCl__P Parameter: Timepoint (hr) Value: 72
  misc_feature: MA Experiment 20000308 PARAMETER Experiment Name: At_100mM_NaCl__P Parameter: Tissue Value: Whole Plant
  misc_feature: MA Experiment 20000308 PARAMETER Experiment Name: At_100mM_NaCl__P Parameter: Treatment Value: 100mM NaCl vs. No Treatment
  misc_feature: MA Experiment ID: 20000437 Result: Down-regulated in Transcription
  misc_feature: MA Experiment 20000437 PARAMETER Experiment Name: At_Drought_P Parameter: Age (day) Value: 8
  misc_feature: MA Experiment 20000437 PARAMETER Experiment Name: At_Drought_P Parameter: Organism Value: A. thaliana
  misc_feature: MA Experiment 20000437 PARAMETER Experiment Name: At_Drought_P Parameter: Plant Line Value: WS
  misc_feature: MA Experiment 20000437 PARAMETER Experiment Name: At_Drought_P Parameter: Timepoint (hr) Value: 24
  misc_feature: MA Experiment 20000437 PARAMETER Experiment Name: At_Drought_P Parameter: Tissue Value: Whole Plant
  misc_feature: MA Experiment 20000437 PARAMETER Experiment Name: At_Drought_P Parameter: Treatment Value: Drought vs. No Drought
  misc_feature: MA Experiment ID: 20000438 Result: Up-regulated in Transcription
  misc_feature: MA Experiment 20000438 PARAMETER Experiment Name: At_Shoots__P Parameter: Age (day) Value: 14
  misc_feature: MA Experiment 20000438 PARAMETER Experiment Name: At_Shoots__P Parameter: Tissue Value: Shoots vs. Whole Plant
  misc_feature: MA Experiment ID: 20000439 Result: Up-regulated in Transcription
  misc_feature: MA Experiment 20000439 PARAMETER Experiment Name: At_Roots__P Parameter: Age (day) Value: 14 vs. 21
  misc_feature: MA Experiment 20000439 PARAMETER Experiment Name: At_Roots__P Parameter: Organism Value: A. thaliana
  misc_feature: MA Experiment 20000439 PARAMETER Experiment Name: At_Roots__P Parameter: Tissue Value: Roots vs. Whole Plant
  misc_feature: MA Experiment ID: 20000441 Result: Up-regulated in Transcription
  misc_feature: MA Experiment 20000441 PARAMETER Experiment Name: At_1uM_BR-BRZ__P Parameter: Tissue Value: Shoot Apices
  misc_feature: MA Experiment 20000441 PARAMETER Experiment Name: At_1uM_BR-BRZ__P Parameter: Treatment Value: 1uM BR vs. No Treatment
  misc_feature: MA Experiment ID: 20000443 Result: Up-regulated in Transcription
  misc_feature: MA Experiment 20000443 PARAMETER Experiment Name: At_1uM_BR-BRZ__P Parameter: Tissue Value: Shoot Apices
  misc_feature: MA Experiment 20000443 PARAMETER Experiment Name: At_1uM_BR-BRZ__P Parameter: Treatment Value: 1uM BRZ vs. No Treatment
  misc_feature: MA Experiment ID: 20000451 Result: Up-regulated in Transcription
  misc_feature: MA Experiment 20000451 PARAMETER Experiment Name: At_CS6879_Shoots-Roots_P Parameter: Age (day) Value: 14
  misc_feature: MA Experiment 20000451 PARAMETER Experiment Name: At_CS6879_Shoots-Roots_P Parameter: Organism Value: A. thaliana
  misc_feature: MA Experiment 20000451 PARAMETER Experiment Name: At_CS6879_Shoots-Roots_P Parameter: Plant Line Value: CS6879 vs. WS
  misc_feature: MA Experiment 20000451 PARAMETER Experiment Name: At_CS6879_Shoots-Roots_P Parameter: Tissue Value: Roots
  misc_feature: MA Experiment ID: 20000453 Result: Down-regulated in Transcription
  misc_feature: MA Experiment 20000453 PARAMETER Experiment Name: At_100uM_ABA_P Parameter: Age (day) Value: 15
  misc_feature: MA Experiment 20000453 PARAMETER Experiment Name: At_100uM_ABA_P Parameter: Organism Value: A. thaliana
  misc_feature: MA Experiment 20000453 PARAMETER Experiment Name: At_100uM_ABA_P Parameter: Plant Line Value: WS
  misc_feature: MA Experiment 20000453 PARAMETER Experiment Name: At_100uM_ABA_P Parameter: Timepoint (hr) Value: 24
  misc_feature: MA Experiment 20000453 PARAMETER Experiment Name: At_100uM_ABA_P Parameter: Tissue Value: Aerial
  misc_feature: MA Experiment 20000453 PARAMETER Experiment Name: At_100uM_ABA_P Parameter: Treatment Value: 100uM ABA vs. No Treatment
  misc_feature: MA Experiment ID: 20000495 Result: Down-regulated in Transcription
  misc_feature: MA Experiment 20000495 PARAMETER Experiment Name: At_Guard_Cells_P Parameter: Harvest Date Value: 8/2/2002
  misc_feature: MA Experiment 20000495 PARAMETER Experiment Name: At_Guard_Cells_P Parameter: Organism Value: A. thaliana
  misc_feature: MA Experiment 20000495 PARAMETER Experiment Name: At_Guard_Cells_P Parameter: Tissue Value: Guard Cells vs. Leaves
  misc_feature: MA Experiment ID: 20000527 Result: Up-regulated in Transcription
  misc_feature: MA Experiment 20000527 PARAMETER Experiment Name: At_10percent_PEG_P Parameter: Age (day) Value: 20
  misc_feature: MA Experiment 20000527 PARAMETER Experiment Name: At_10percent_PEG_P Parameter: Organism Value: A. thaliana
  misc_feature: MA Experiment 20000527 PARAMETER Experiment Name: At_10percent_PEG_P Parameter: Plant Line Value: WS
  misc_feature: MA Experiment 20000527 PARAMETER Experiment Name: At_10percent_PEG_P Parameter: Timepoint (day) Value: 20
  misc_feature: MA Experiment 20000527 PARAMETER Experiment Name: At_10percent_PEG_P Parameter: Tissue Value: Whole Plant
  misc_feature: MA Experiment 20000527 PARAMETER Experiment Name: At_10percent_PEG_P Parameter: Treatment Value: 10percent PEG vs. No Treatment
  misc_feature: MA Experiment ID: 20000709 Result: Up-regulated in Transcription
  misc_feature: MA Experiment 20000709 PARAMETER Experiment Name: At_15mM_NH4NO3_L-to-H_P Parameter: Age (hr) Value: 14
  misc_feature: MA Experiment 20000709 PARAMETER Experiment Name: At_15mM_NH4NO3_L-to-H_P Parameter: Organism Value: A. thaliana
  misc_feature: MA Experiment 20000709 PARAMETER Experiment Name: At_15mM_NH4NO3_L-to-H_P Parameter: Plant Line Value: WS
  misc_feature: MA Experiment 20000709 PARAMETER Experiment Name: At_15mM_NH4NO3_L-to-H_P Parameter: Timepoint (hr) Value: 4
  misc_feature: MA Experiment 20000709 PARAMETER Experiment Name: At_15mM_NH4NO3_L-to-H_P Parameter: Tissue Value: Aerial
  misc_feature: MA Experiment 20000709 PARAMETER Experiment Name: At_15mM_NH4NO3_L-to-H_P Parameter: Treatment Value: 15mM NH4NO3 vs. 30mM Mannitol
  misc_feature: MA Experiment ID: 20000794 Result: Up-regulated in Transcription
  misc_feature: MA Experiment 20000794 PARAMETER Experiment Name: At_Petals_P Parameter: Age (day) Value: 23-25 days
  misc_feature: MA Experiment 20000794 PARAMETER Experiment Name: At_Petals_P Parameter: Plant Line Value: WS
  misc_feature: MA Experiment 20000794 PARAMETER Experiment Name: At_Petals_P Parameter: Tissue Value: Petals vs. Whole plant
  misc_feature: MA Experiment ID: 20001459 Result: Up-regulated in Transcription
  misc_feature: MA Experiment 20001459 PARAMETER Experiment Name: At_50mM_NH4NO3_L-to-H_P Parameter: Age (day) Value: Undefined
  misc_feature: MA Experiment 20001459 PARAMETER Experiment Name: At_50mM_NH4NO3_L-to-H_P Parameter: Organism Value: Undefined
  misc_feature: MA Experiment 20001459 PARAMETER Experiment Name: At_50mM_NH4NO3_L-to-H_P Parameter: Plant Line Value: Undefined
  misc_feature: MA Experiment 20001459 PARAMETER Experiment Name: At_50mM_NH4NO3_L-to-H_P Parameter: Timepoint (hr) Value: 4
  misc_feature: MA Experiment 20001459 PARAMETER Experiment Name: At_50mM_NH4NO3_L-to-H_P Parameter: Tissue Value: Siliques
  misc_feature: MA Experiment 20001459 PARAMETER Experiment Name: At_50mM_NH4NO3_L-to-H_P Parameter: Treatment Value: 50mM NH4NO3 vs. 100mM Manitol
  misc_feature: MA Experiment ID: 20001556 Result: Down-regulated in Transcription
  misc_feature: MA Experiment 20001556 PARAMETER Experiment Name: At_Drought_Soil_Dry_P Parameter: Age (day) Value: 26
  misc_feature: MA Experiment 20001556 PARAMETER Experiment Name: At_Drought_Soil_Dry_P Parameter: Organism Value: A. thaliana
  misc_feature: MA Experiment 20001556 PARAMETER Experiment Name: At_Drought_Soil_Dry_P Parameter: Plant Line Value: WS
  misc_feature: MA Experiment 20001556 PARAMETER Experiment Name: At_Drought_Soil_Dry_P Parameter: Post Timepoint (hr) Value: None
  misc_feature: MA Experiment 20001556 PARAMETER Experiment Name: At_Drought_Soil_Dry_P Parameter: Post-Treatment Value: None
  misc_feature: MA Experiment 20001556 PARAMETER Experiment Name: At_Drought_Soil_Dry_P Parameter: Timepoint (day) Value: 12
  misc_feature: MA Experiment 20001556 PARAMETER Experiment Name: At_Drought_Soil_Dry_P Parameter: Treatment Value: Drought vs. No Drought
  misc_feature: MA Experiment ID: 20001559 Result: Down-regulated in Transcription
  misc_feature: MA Experiment 20001559 PARAMETER Experiment Name: At_Drought_Soil_Dry_P Parameter: Age (day) Value: 28
  misc_feature: MA Experiment 20001559 PARAMETER Experiment Name: At_Drought_Soil_Dry_P Parameter: Organism Value: A. thaliana
  misc_feature: MA Experiment 20001559 PARAMETER Experiment Name: At_Drought_Soil_Dry_P Parameter: Plant Line Value: WS
  misc_feature: MA Experiment 20001559 PARAMETER Experiment Name: At_Drought_Soil_Dry_P Parameter: Post Timepoint (hr) Value: 29
  misc_feature: MA Experiment 20001559 PARAMETER Experiment Name: At_Drought_Soil_Dry_P Parameter: Post-Treatment Value: Re-Water vs. No Drought
  misc_feature: MA Experiment 20001559 PARAMETER Experiment Name: At_Drought_Soil_Dry_P Parameter: Timepoint (day) Value: 14
  misc_feature: MA Experiment 20001559 PARAMETER Experiment Name: At_Drought_Soil_Dry_P Parameter: Treatment Value: Drought vs. No Drought
  misc_feature: MA Experiment ID: 20001560 Result: Down-regulated in Transcription
  misc_feature: MA Experiment 20001560 PARAMETER Experiment Name: At_Drought_Soil_Dry_P Parameter: Age (day) Value: 28
  misc_feature: MA Experiment 20001560 PARAMETER Experiment Name: At_Drought_Soil_Dry_P Parameter: Organism Value: A. thaliana
  misc_feature: MA Experiment 20001560 PARAMETER Experiment Name: At_Drought_Soil_Dry_P Parameter: Plant Line Value: WS
  misc_feature: MA Experiment 20001560 PARAMETER Experiment Name: At_Drought_Soil_Dry_P Parameter: Post Timepoint (hr) Value: None
  misc_feature: MA Experiment 20001560 PARAMETER Experiment Name: At_Drought_Soil_Dry_P Parameter: Post-Treatment Value: None
  misc_feature: MA Experiment 20001560 PARAMETER Experiment Name: At_Drought_Soil_Dry_P Parameter: Timepoint (day) Value: 14
  misc_feature: MA Experiment 20001560 PARAMETER Experiment Name: At_Drought_Soil_Dry_P Parameter: Treatment Value: Drought vs. No Drought
  misc_feature: MA Experiment ID: 20001757 Result: Up-regulated in Transcription
  misc_feature: MA Experiment 20001757 PARAMETER Experiment Name: At_50mM_NH4NO3_L-to-H_P Parameter: Timepoint (hr) Value: 6
  misc_feature: MA Experiment 20001757 PARAMETER Experiment Name: At_50mM_NH4NO3_L-to-H_P Parameter: Tissue Value: Leaf
  misc_feature: MA Experiment 20001757 PARAMETER Experiment Name: At_50mM_NH4NO3_L-to-H_P Parameter: Treatment Value: 50mM NH4NO3 vs 100mM Mannitol
  misc_feature: MA Experiment ID: 20001760 Result: Up-regulated in Transcription
  misc_feature: MA Experiment 20001760 PARAMETER Experiment Name: At_50mM_NH4NO3_L-to-H_P Parameter: Timepoint (hr) Value: 2
  misc_feature: MA Experiment 20001760 PARAMETER Experiment Name: At_50mM_NH4NO3_L-to-H_P Parameter: Tissue Value: Siliques
  misc_feature: MA Experiment 20001760 PARAMETER Experiment Name: At_50mM_NH4NO3_L-to-H_P Parameter: Treatment Value: 50mM NH4NO3 vs 100mM Mannitol
  misc_feature: MA Experiment ID: 20001911 Result: Down-regulated in Transcription
  misc_feature: MA Experiment 20001911 PARAMETER Experiment Name: At_Drought_Reproduction_P Parameter: Age (day) Value: 40
  misc_feature: MA Experiment 20001911 PARAMETER Experiment Name: At_Drought_Reproduction_P Parameter: Organism Value: A. thaliana
  misc_feature: MA Experiment 20001911 PARAMETER Experiment Name: At_Drought_Reproduction_P Parameter: Plant Line Value: WS
  misc_feature: MA Experiment 20001911 PARAMETER Experiment Name: At_Drought_Reproduction_P Parameter: Timepoint (day) Value: 10
  misc_feature: MA Experiment 20001911 PARAMETER Experiment Name: At_Drought_Reproduction_P Parameter: Tissue Value: Flowers
  misc_feature: MA Experiment 20001911 PARAMETER Experiment Name: At_Drought_Reproduction_P Parameter: Treatment Value: Drought vs. No Drought
accaaaaaatttcacaaaccaaaccaaaaccaaaaaaatagcttatctctctcttatcaccggttcaatcactaaaccatggcgacctccgtcgataaccgccattatcccaccatgaacggcgtcgctcacgccttcaaacctcctctcgttccttctcctcgctcattcgaccgccaccgtcaccaaaaccaaactctcgacgtcatcctcaccgaaactaaaatcgtcaaagaaaccgaagtcatcaccaccgtcgtagacagttacgacgactcctcaagcgacgacgaagacgagagccataaccgtaacgtcccttactacaaagagctggttaaaaaatcaaacagcgatttagaaccgtcgattttagatccgagagatgaatcaacggctgatagttggattcaacgtaactcatccatgctccgtctcaccggaaaacatccattcaacgccgaagcacctcttcctcgtcttatgcaccatggattcatcactccagttccactccattacgtccgcaaccacggtgcagttcccaaagcgaattggtcagactggtcaatcgaaattaccggactcgttaaacgtccggctaaattcaccatggaagagctaatctccgagttccccagccgcgaattcccggtgacactcgtctgcgccggtaatcgccgcaaggaacagaacatggtgaaacaaacgatcggattcaattggggatccgccggagtatctacttctctatggaaaggtattccgttaagcgaaatcctccgtcgatgcgggatctatagccggagaggaggcgcgttaaacgtttgcttcgaaggagcggaggatcttcccggcggcggcggatctaaatacggaacaagtattaagaaggagatggcgatggatccggctagagatattatcttagcttatatgcaaaacggcgagcttttaacgccggatcatgggtttccggttcgggtcattgtaccgggtttcatcggtggtcggatggttaaatggttaaagagaatcatcgtcacgcctcaagaatctgacagttactatcactataaagacaatcgagtccttccttctctcgttgatgctgagctggcaaattccgaagcttggtggtataagcctgaatacataatcaacgagcttaatataaactcggtgattacaacacctggtcacgcagagattttaccgattaatgcattcactactcagaagccgtacacattaaaaggctacgcttattctggaggaggtaagaaggtaacgagggttgaggtgactctagacggaggagacacgtggagtgtttgtgagcttgaccaccaggagaaaccgaacaagtacggtaaattctggtgctggtgtttctggtcacttgacgttgaggttcttgatctgctcagtgctaaagacgtcgcggttcgagcctgggacgagtctttcaatactcagcctgataaactcatctggaacctcatggggatgatgaacaattgctggttcaggattaggaccaacgtgtgcaagcctcatagaggagagatagggatagttttcgaacacccgaccagacccggaaaccagtcgggtgggtggatggcaaaggagcgtcagcttgagatttcctcagaatccaacaataccttgaagaaatctgtctcatctcctttcatgaacactgcctcgaagatgtattcaatctctgaagttagaaaacacaacactgctgactctgcatggatcatcgtccacggtcacatctatgactgtacacgtttcttgaaagatcatccaggaggcacagattctatcctgataaacgcaggtacagattgcaccgaagagtttgaagccattcactctgacaaagccaagaagcttttggaagattaccgtatcggtgaactcatcaccactggctacgactcttcccctaacgtctcagttcatggtgcctcaaactttggtcctttgttagctccaatcaaagagctaactcctcaaaagaacattgctttggtcaacccacgtgagaaaatcccggttaggctcattgagaagacttcgatctcgcacgacgttcgtaagttccgattcgcattaccatcagaagatcaacagcttggtttacccgtggggaagcacgttttcgtttgcgccaacataaacgacaaactctgtctcagagcttatactcccaccagcgccatcgacgcggttggtcatatcgacctcgtcgtcaaagtttacttcaaagacgttcatccaaggtttcccaatggtggactcatgtctcaacacttagactcgttaccaatcgggtcaatgatagatatcaaaggtccactagggcacatcgagtacaaaggcaaaggcaacttcctggtcagcggcaaacctaagtttgccaagaaactagcaatgctcgccggaggaacaggcatcactcctatctaccagatcattcaatctatattgagtgatccagaggacgaaaccgagatgtatgtggtttacgcaaacagaaccgaggatgacattcttgtgagggaagagctagaaggatgggctagtaagcataaggagaggctaaagatttggtacgtcgttgaaatcgcaaaggaaggttggagttacagtaccgggtttataactgaagctgtgcttagggaacatatccctgaaggtttggaaggcgaatcgctagcactcgcatgcggaccaccgcctatgattcagtttgcgttgcagccaaatctagagaagatgggttacaacgtgaaggaggatctcttaatcttctagatttgctcaagttctgtgctattggaaattcgaaagttgataacaagtatcgcttatgtgtgtatatacatggttatttgggcacttttgttatagttgttgtttatcagagctccaaattgtatattgtataaaattgtgtttaattatgatctatgttgttgatgatgatgatgataaatgatgaacttattgtaactc

SEQ ID NO: 90891 - protein, 917 aa, Arabidopsis thaliana
  peptide (1)..(917): Ceres Seq. ID no. 12725656
  misc_feature (103)..(332): Pfam Name: Oxidoreductase molybdopterin binding domain Pfam Description: Oxidoreductase molybdopterin binding domain
  misc_feature (98)..(912): Homolog of NCBI NO: 7432652 NR Description: nitrate reductase (NADH) (EC 1.7.1.1) - Chlorella vulgaris >gi|1113861|gb|AAC49459.1| nitrate reductase
  misc_feature (89)..(916): Homolog of NCBI NO: 30526321 NR Description: nitrate reductase ['Chlorella' ellipsoidea]
  misc_feature (92)..(917): Homolog of NCBI NO: 730148 NR Description: Nitrate reductase [NADPH] (NR)
  misc_feature (435)..(917): Homolog of NCBI NO: 6224515 NR Description: nitrate reductase [Hebeloma cylindrosporum]
  misc_feature (95)..(518): Homolog of NCBI NO: 6224515 NR Description: nitrate reductase [Hebeloma cylindrosporum]
  misc_feature (103)..(917): Homolog of NCBI NO: 2894356 NR Description: nitrate reductase (NADPH) [Phaeosphaeria nodorum]
  misc_feature (101)..(917): Homolog of NCBI NO: 2342599 NR Description: Nitrate reductase [Metarhizium anisopliae]
  misc_feature (95)..(917): Homolog of NCBI NO: 730145 NR Description: Nitrate reductase [NADPH] (NR)
  misc_feature (435)..(917): Homolog of NCBI NO: 548358 NR Description: Nitrate reductase [NADPH] (NR)
  misc_feature (435)..(917): Homolog of NCBI NO: 1071816 NR Description: nitrate reductase (NADPH) (EC 1.6.6.3) -
MATSVDNRHYPTMNGVAHAFKPPLVPSPRSFDRHRHQNQTLDVILTETKIVKETEVITTVVDSYDDSSSDDEDESHNRNVPYYKELVKKSNSDLEPSILDPRDESTADSWIQRNSSMLRLTGKHPFNAEAPLPRLMHHGFITPVPLHYVRNHGAVPKANWSDWSIEITGLVKRPAKFTMEELISEFPSREFPVTLVCAGNRRKEQNMVKQTIGFNWGSAGVSTSLWKGIPLSEILRRCGIYSRRGGALNVCFEGAEDLPGGGGSKYGTSIKKEMAMDPARDIILAYMQNGELLTPDHGFPVRVIVPGFIGGRMVKWLKRIIVTPQESDSYYHYKDNRVLPSLVDAELANSEAWWYKPEYIINELNINSVITTPGHAEILPINAFTTQKPYTLKGYAYSGGGKKVTRVEVTLDGGDTWSVCELDHQEKPNKYGKFWCWCFWSLDVEVLDLLSAKDVAVRAWDESFNTQPDKLIWNLMGMMNNCWFRIRTNVCKPHRGEIGIVFEHPTRPGNQSGGWMAKERQLEISSESNNTLKKSVSSPFMNTASKMYSISEVRKHNTADSAWIIVHGHIYDCTRFLKDHPGGTDSILINAGTDCTEEFEAIHSDKAKKLLEDYRIGELITTGYDSSPNVSVHGASNFGPLLAPIKELTPQKNIALVNPREKIPVRLIEKTSISHDVRKFRFALPSEDQQLGLPVGKHVFVCANINDKLCLRAYTPTSAIDAVGHIDLVVKVYFKDVHPRFPNGGLMSQHLDSLPIGSMIDIKGPLGHIEYKGKGNFLVSGKPKFAKKLAMLAGGTGITPIYQIIQSILSDPEDETEMYVVYANRTEDDILVREELEGWASKHKERLKIWYVVEIAKEGWSYSTGFITEAVLREHIPEGLEGESLALACGPPPMIQFALQPNLEKMGYNVKEDLLIF

SEQ ID NO: 90892 - protein, 905 aa, Arabidopsis thaliana
  peptide (1)..(905): Ceres Seq. ID no. 12725657
  misc_feature (91)..(320): Pfam Name: Oxidoreductase molybdopterin binding domain Pfam Description: Oxidoreductase molybdopterin binding domain
  misc_feature (86)..(900): Homolog of NCBI NO: 7432652 NR Description: nitrate reductase (NADH) (EC 1.7.1.1) - Chlorella vulgaris >gi|1113861|gb|AAC49459.1| nitrate reductase
  misc_feature (77)..(904): Homolog of NCBI NO: 30526321 NR Description: nitrate reductase ['Chlorella' ellipsoidea]
  misc_feature (80)..(905): Homolog of NCBI NO: 730148 NR Description: Nitrate reductase [NADPH] (NR)
  misc_feature (423)..(905): Homolog of NCBI NO: 6224515 NR Description: nitrate reductase [Hebeloma cylindrosporum]
  misc_feature (83)..(506): Homolog of NCBI NO: 6224515 NR Description: nitrate reductase [Hebeloma cylindrosporum]
  misc_feature (91)..(905): Homolog of NCBI NO: 2894356 NR Description: nitrate reductase (NADPH) [Phaeosphaeria nodorum]
  misc_feature (89)..(905): Homolog of NCBI NO: 2342599 NR Description: Nitrate reductase [Metarhizium anisopliae]
  misc_feature (83)..(905): Homolog of NCBI NO: 730145 NR Description: Nitrate reductase [NADPH] (NR)
  misc_feature (423)..(905): Homolog of NCBI NO: 548358 NR Description: Nitrate reductase [NADPH] (NR)
  misc_feature (423)..(905): Homolog of NCBI NO: 1071816 NR Description: nitrate reductase (NADPH) (EC 1.6.6.3) -
MNGVAHAFKPPLVPSPRSFDRHRHQNQTLDVILTETKIVKETEVITTVVDSYDDSSSDDEDESHNRNVPYYKELVKKSNSDLEPSILDPRDESTADSWIQRNSSMLRLTGKHPFNAEAPLPRLMHHGFITPVPLHYVRNHGAVPKANWSDWSIEITGLVKRPAKFTMEELISEFPSREFPVTLVCAGNRRKEQNMVKQTIGFNWGSAGVSTSLWKGIPLSEILRRCGIYSRRGGALNVCFEGAEDLPGGGGSKYGTSIKKEMAMDPARDIILAYMQNGELLTPDHGFPVRVIVPGFIGGRMVKWLKRIIVTPQESDSYYHYKDNRVLPSLVDAELANSEAWWYKPEYIINELNINSVITTPGHAEILPINAFTTQKPYTLKGYAYSGGGKKVTRVEVTLDGGDTWSVCELDHQEKPNKYGKFWCWCFWSLDVEVLDLLSAKDVAVRAWDESFNTQPDKLIWNLMGMMNNCWFRIRTNVCKPHRGEIGIVFEHPTRPGNQSGGWMAKERQLEISSESNNTLKKSVSSPFMNTASKMYSISEVRKHNTADSAWIIVHGHIYDCTRFLKDHPGGTDSILINAGTDCTEEFEAIHSDKAKKLLEDYRIGELITTGYDSSPNVSVHGASNFGPLLAPIKELTPQKNIALVNPREKIPVRLIEKTSISHDVRKFRFALPSEDQQLGLPVGKHVFVCANINDKLCLRAYTPTSAIDAVGHIDLVVKVYFKDVHPRFPNGGLMSQHLDSLPIGSMIDIKGPLGHIEYKGKGNFLVSGKPKFAKKLAMLAGGTGITPIYQIIQSILSDPEDETEMYVVYANRTEDDILVREELEGWASKHKERLKIWYVVEIAKEGWSYSTGFITEAVLREHIPEGLEGESLALACGPPPMIQFALQPNLEKMGYNVKEDLLIF

SEQ ID NO: 90893 - protein, 801 aa, Arabidopsis thaliana
  peptide (1)..(801): Ceres Seq. ID no. 12725658
  misc_feature (1)..(216): Pfam Name: Oxidoreductase molybdopterin binding domain Pfam Description: Oxidoreductase molybdopterin binding domain
  misc_feature (1)..(796): Homolog of NCBI NO: 7432652 NR Description: nitrate reductase (NADH) (EC 1.7.1.1) - Chlorella vulgaris >gi|1113861|gb|AAC49459.1| nitrate reductase
  misc_feature (1)..(800): Homolog of NCBI NO: 30526321 NR Description: nitrate reductase ['Chlorella' ellipsoidea]
  misc_feature (1)..(801): Homolog of NCBI NO: 730148 NR Description: Nitrate reductase [NADPH] (NR)
  misc_feature (319)..(801): Homolog of NCBI NO: 6224515 NR Description: nitrate reductase [Hebeloma cylindrosporum]
  misc_feature (1)..(402): Homolog of NCBI NO: 6224515 NR Description: nitrate reductase [Hebeloma cylindrosporum]
  misc_feature (1)..(801): Homolog of NCBI NO: 2894356 NR Description: nitrate reductase (NADPH) [Phaeosphaeria nodorum]
  misc_feature (1)..(801): Homolog of NCBI NO: 2342599 NR Description: Nitrate reductase [Metarhizium anisopliae]
  misc_feature (1)..(801): Homolog of NCBI NO: 730145 NR Description: Nitrate reductase [NADPH] (NR)
  misc_feature (319)..(801): Homolog of NCBI NO: 548358 NR Description: Nitrate reductase [NADPH] (NR)
  misc_feature (319)..(801): Homolog of NCBI NO: 1071816 NR Description: nitrate reductase (NADPH) (EC 1.6.6.3) -
MLRLTGKHPFNAEAPLPRLMHHGFITPVPLHYVRNHGAVPKANWSDWSIEITGLVKRPAKFTMEELISEFPSREFPVTLVCAGNRRKEQNMVKQTIGFNWGSAGVSTSLWKGIPLSEILRRCGIYSRRGGALNVCFEGAEDLPGGGGSKYGTSIKKEMAMDPARDIILAYMQNGELLTPDHGFPVRVIVPGFIGGRMVKWLKRIIVTPQESDSYYHYKDNRVLPSLVDAELANSEAWWYKPEYIINELNINSVITTPGHAEILPINAFTTQKPYTLKGYAYSGGGKKVTRVEVTLDGGDTWSVCELDHQEKPNKYGKFWCWCFWSLDVEVLDLLSAKDVAVRAWDESFNTQPDKLIWNLMGMMNNCWFRIRTNVCKPHRGEIGIVFEHPTRPGNQSGGWMAKERQLEISSESNNTLKKSVSSPFMNTASKMYSISEVRKHNTADSAWIIVHGHIYDCTRFLKDHPGGTDSILINAGTDCTEEFEAIHSDKAKKLLEDYRIGELITTGYDSSPNVSVHGASNFGPLLAPIKELTPQKNIALVNPREKIPVRLIEKTSISHDVRKFRFALPSEDQQLGLPVGKHVFVCANINDKLCLRAYTPTSAIDAVGHIDLVVKVYFKDVHPRFPNGGLMSQHLDSLPIGSMIDIKGPLGHIEYKGKGNFLVSGKPKFAKKLAMLAGGTGITPIYQIIQSILSDPEDETEMYVVYANRTEDDILVREELEGWASKHKERLKIWYVVEIAKEGWSYSTGFITEAVLREHIPEGLEGESLALACGPPPMIQFALQPNLEKMGYNVKEDLLIF

SEQ ID NO: 90894 - DNA, 1092 bp, Arabidopsis thaliana
  misc_feature (1)..(1092): Ceres Seq. ID no. 12725663
atgttcctcatagctacgcttctttttctttcagccagattaaccaccgccggaaatatgaattccttcgccggagtatgttatggaagaaatggagacaatctcccatctccagccaaaactgtgtctctatacaagaaaataaacgtcggtgggataagactctacgagcctttccctgacctcatcgtctcattacaaggaactggtcttcttgtagccatcggaccaagaaacgaagcaatcaaaacattagccgaagaataccaatttgccttaaattgggataaaacatttatagcaccatacaaaaacgtagctttcaattggataaccgtgggaaacgaagtgatagaaggagagatcggacgttacgtgccacaagccatgaaaaatataaaagctgcgttgaccgaaatcggaaactcaaagatccacgtcaccactgtcatatccacagccgcactcgctaactcttacccaccatcagccggagtatttaaaccggcaataaccgaacttataaccgaaatcgtatcgattcttagctctaccgattcaccgctcatggtcaacgtttacccttatttcgcttacgcatcagaccctagccacgtgtcactggaatacgcaacgttccgttcgacttcaccggtagtgaccgacggaaaataccaatacacaaatatattcgatgcaacgttggatgctttcaacgtggcattagagaagatcaaccacggaagcgtgaaggtctacgtagcggagaccggttggcctactagagggaatgatccatacacaagcgtggagaacgctcgtgcttataaccaggggttgcttaagaaactaaccacaggtaagggtacgccaaggcggcccaatgttccagtgataacttttttcttcgaaatgttcaatgaagatttgaaacaaggagcggttgaacaaagcttcggattcttcgatcctaatatggctcctgtctacgatatgtggaatatagctaggacaagtaacgctagtcctagttgggttatttggactaattgggttatttggactatgctcataactagattgttttattaa

SEQ ID NO: 90895 - protein, 363 aa, Arabidopsis thaliana
  peptide (1)..(363): Ceres Seq. ID no. 12725664
  misc_feature (24)..(334): Pfam Name: Glycosyl hydrolases family 17 Pfam Description: Glycosyl hydrolases family 17
  misc_feature (1)..(363): Homolog of NCBI NO: 15218106 NR Description: glycosyl hydrolase family 17; protein id:
  misc_feature (7)..(333): Homolog of NCBI NO: 15218107 NR Description: glycosyl hydrolase family 17; protein id:
  misc_feature (25)..(330): Homolog of NCBI NO: 34908958 NR Description: beta-1,3-glucanase precursor [Oryza sativa
  misc_feature (1)..(330): Homolog of NCBI NO: 4097946 NR Description: beta-1,3-glucanase precursor [Oryza sativa]
  misc_feature (25)..(330): Homolog of NCBI NO: 4097944 NR Description: beta-1,3-glucanase precursor [Oryza sativa]
  misc_feature (26)..(330): Homolog of NCBI NO: 4884532 NR Description: beta-1,3-glucanase [Oryza sativa]
  misc_feature (2)..(265): Homolog of NCBI NO: 7484720 NR Description: endo-1,3-beta-glucanase (EC 3.2.1.-) - upland
  misc_feature (8)..(332): Homolog of NCBI NO: 6073860 NR Description: beta-1, 3-glucananse [Musa acuminata]
  misc_feature (25)..(332): Homolog of NCBI NO: 6448757 NR Description: beta-1,3-glucanase [Musa acuminata]
  misc_feature (25)..(330): Homolog of NCBI NO: 322839 NR Description: glucan endo-1,3-beta-D-glucosidase (EC 3.2.1.39)
MFLIATLLFLSARLTTAGNMNSFAGVCYGRNGDNLPSPAKTVSLYKKINVGGIRLYEPFPDLIVSLQGTGLLVAIGPRNEAIKTLAEEYQFALNWDKTFIAPYKNVAFNWITVGNEVIEGEIGRYVPQAMKNIKAALTEIGNSKIHVTTVISTAALANSYPPSAGVFKPAITELITEIVSILSSTDSPLMVNVYPYFAYASDPSHVSLEYATFRSTSPVVTDGKYQYTNIFDATLDAFNVALEKINHGSVKVYVAETGWPTRGNDPYTSVENARAYNQGLLKKLTTGKGTPRRPNVPVITFFFEMFNEDLKQGAVEQSFGFFDPNMAPVYDMWNIARTSNASPSWVIWTNWVIWTMLITRLFY

SEQ ID NO: 90896 - protein, 344 aa, Arabidopsis thaliana
  peptide (1)..(344): Ceres Seq. ID no. 12725665
  misc_feature (5)..(315): Pfam Name: Glycosyl hydrolases family 17 Pfam Description: Glycosyl hydrolases family 17
  misc_feature (1)..(344): Homolog of NCBI NO: 15218106 NR Description: glycosyl hydrolase family 17; protein id:
  misc_feature (1)..(314): Homolog of NCBI NO: 15218107 NR Description: glycosyl hydrolase family 17; protein id:
  misc_feature (6)..(311): Homolog of NCBI NO: 34908958 NR Description: beta-1,3-glucanase precursor [Oryza sativa
  misc_feature (1)..(311): Homolog of NCBI NO: 4097946 NR Description: beta-1,3-glucanase precursor [Oryza sativa]
  misc_feature (6)..(311): Homolog of NCBI NO: 4097944 NR Description: beta-1,3-glucanase precursor [Oryza sativa]
  misc_feature (7)..(311): Homolog of NCBI NO: 4884532 NR Description: beta-1,3-glucanase [Oryza sativa]
  misc_feature (1)..(246): Homolog of NCBI NO: 7484720 NR Description: endo-1,3-beta-glucanase (EC 3.2.1.-) - upland
  misc_feature (1)..(313): Homolog of NCBI NO: 6073860 NR Description: beta-1, 3-glucananse [Musa acuminata]
  misc_feature (6)..(313): Homolog of NCBI NO: 6448757 NR Description: beta-1,3-glucanase [Musa acuminata]
  misc_feature (6)..(311): Homolog of NCBI NO: 322839 NR Description: glucan endo-1,3-beta-D-glucosidase (EC 3.2.1.39)
MNSFAGVCYGRNGDNLPSPAKTVSLYKKINVGGIRLYEPFPDLIVSLQGTGLLVAIGPRNEAIKTLAEEYQFALNWDKTFIAPYKNVAFNWITVGNEVIEGEIGRYVPQAMKNIKAALTEIGNSKIHVTTVISTAALANSYPPSAGVFKPAITELITEIVSILSSTDSPLMVNVYPYFAYASDPSHVSLEYATFRSTSPVVTDGKYQYTNIFDATLDAFNVALEKINHGSVKVYVAETGWPTRGNDPYTSVENARAYNQGLLKKLTTGKGTPRRPNVPVITFFFEMFNEDLKQGAVEQSFGFFDPNMAPVYDMWNIARTSNASPSWVIWTNWVIWTMLITRLFY

SEQ ID NO: 90897 - protein, 234 aa, Arabidopsis thaliana
  peptide (1)..(234): Ceres Seq. ID no. 12725666
  misc_feature (1)..(205): Pfam Name: Glycosyl hydrolases family 17 Pfam Description: Glycosyl hydrolases family 17
  misc_feature (1)..(234): Homolog of NCBI NO: 15218106 NR Description: glycosyl hydrolase family 17; protein id:
  misc_feature (1)..(204): Homolog of NCBI NO: 15218107 NR Description: glycosyl hydrolase family 17; protein id:
  misc_feature (1)..(201): Homolog of NCBI NO: 34908958 NR Description: beta-1,3-glucanase precursor [Oryza sativa
  misc_feature (1)..(201): Homolog of NCBI NO: 4097946 NR Description: beta-1,3-glucanase precursor [Oryza sativa]
  misc_feature (1)..(201): Homolog of NCBI NO: 4097944 NR Description: beta-1,3-glucanase precursor [Oryza sativa]
  misc_feature (1)..(201): Homolog of NCBI NO: 4884532 NR Description: beta-1,3-glucanase [Oryza sativa]
  misc_feature (1)..(136): Homolog of NCBI NO: 7484720 NR Description: endo-1,3-beta-glucanase (EC 3.2.1.-) - upland
  misc_feature (1)..(203): Homolog of NCBI NO: 6073860 NR Description: beta-1, 3-glucananse [Musa acuminata]
  misc_feature (1)..(203): Homolog of NCBI NO: 6448757 NR Description: beta-1,3-glucanase [Musa acuminata]
  misc_feature (1)..(201): Homolog of NCBI NO: 322839 NR Description: glucan endo-1,3-beta-D-glucosidase (EC 3.2.1.39)
MKNIKAALTEIGNSKIHVTTVISTAALANSYPPSAGVFKPAITELITEIVSILSSTDSPLMVNVYPYFAYASDPSHVSLEYATFRSTSPVVTDGKYQYTNIFDATLDAFNVALEKINHGSVKVYVAETGWPTRGNDPYTSVENARAYNQGLLKKLTTGKGTPRRPNVPVITFFFEMFNEDLKQGAVEQSFGFFDPNMAPVYDMWNIARTSNASPSWVIWTNWVIWTMLITRLFY

SEQ ID NO: 90898 - DNA, 954 bp, Arabidopsis thaliana
  misc_feature (1)..(954): Ceres Seq. ID no. 12725679
  misc_feature: MA Experiment ID: 20000314 Result: Up-regulated in Transcription
  misc_feature: MA Experiment 20000314 PARAMETER Experiment Name: At_14day_Shoots-Roots_Sub_P Parameter: Age (day) Value: 14
  misc_feature: MA Experiment 20000314 PARAMETER Experiment Name: At_14day_Shoots-Roots_Sub_P Parameter: Organism Value: A. thaliana
  misc_feature: MA Experiment 20000314 PARAMETER Experiment Name: At_14day_Shoots-Roots_Sub_P Parameter: Plant Line Value: WS
  misc_feature: MA Experiment 20000314 PARAMETER Experiment Name: At_14day_Shoots-Roots_Sub_P Parameter: Tissue Value: Roots vs. Whole Plant
atggatcagtcttgttcaaactcagtaaacggattctactcgtttctaaacagatcaatggaagatctcgaaagggtttatatctccaacaacttcatgtccttacagttcctacagagagtcatctgtcttctaagaacctctcactctcatctcacacttcttgtccagaaacttaacctccctgtcggtgacaagtggcttgacgactacatggacgaaacttccaagctttgggacgtctgccacgtcatcaaatccgctatctccaccatcgaaagcttttgctcctccgctatctccatcacctccaccctcgacggccactaccaccaccgtcgtctcctctcccctcagatttcccggcaggtgatacgagcgatatctggatgtaggagagaagcggtggggatagaagaagaaaacagagcattaatggagaatcgtattcaaaggtttcctttttggtcggagcaagttactacgacggggatggagtcttccaagatacagaacggtttcagcggtttcagaggagtgatgaacactatgaagaacataaactcgttacttctcgtgatcttgatgcaaggtcttgtttattacattcccggagacacgacggttccgacggggacgatgatgaggttaaagcagagagtggcggcggaaatggagaggataggggtgaggaaaggaatgatgatgtacgagtataggagaagcaagacggcgatggaggagcttaaggtggagctggaacggcggtgttgcggcggcggaggagaggaggaggcggtggagaaggggttgagagagagaattgagaatttgaaaggaagtgttgggagtttgaggaatggaacagagagtattgttgctcagattgatgatttctttgatgatattgttgatggtaggaaaatgcttttggattattgtagccacaggtga
